United States Patent Application Publication US 2011/0183924 A1 - sequence listing, part 107

SEQ ID NO: 320423 - DNA, 2378 bp, Homo sapiens
gaggaggagtggggaccgggcggggggtggaggaagaggcctcgcgcagaggagggagcaattgaatttcaaacacaaacaactgcacgagcgcgcacccaccgcgccggagccttgccccgatccgcgcccgccccgtccgtgcggcgcgcgggcggagacgccgtggccgcgccggagctcgggccgggggccaccatcgaggcgggggccgcgcgagggccggagcggagcggcgccgccaccgccgcacgcgcaaacttgggctcgcgcttcccggcccggcgcggagcccggggcgcccggagccccgccatgtcgcgatccaaccggcagaaggagtacaaatgcggggacctggtgttcgccaagatgaagggctacccacactggccggcccggattgacgagatgcctgaggctgccgtgaaatcaacagccaacaaataccaagtcttttttttcgggacccacgagacggcattcctgggccccaaagacctcttcccttacgaggaatccaaggagaagtttggcaagcccaacaagaggaaagggttcagcgaggggctgtgggagatcgagaacaaccctactgtcaaggcttccggctatcagtcctcccagaaaaagagctgtgtggaagagcctgaaccagagcccgaagctgcagagggtgacggtgataagaaggggaatgcagagggcagcagcgacgaggaagggaagctggtcattgatgagccagccaaggagaagaacgagaaaggagcgttgaagaggagagcaggggacttgctggaggactctcctaaacgtcccaaggaggcagaaaaccctgaaggagaggagaaggaggcagccaccttggaggttgagaggccccttcctatggaggtggaaaagaatagcaccccctctgagcccggctctggccgggggcctccccaagaggaagaagaagaggaggatgaagaggaagaggctaccaaggaagatgctgaggccccaggcatcagagatcatgagagcctgtagccaccaatgtttcaagaggagcccccaccctgttcctgctgctgtctgggtgctactggggaaactggccatggcctgcaaactgggaacccctttcccaccccaacctgctctcctcttctactcacttttcccactccaagcccagcccatggagattgacctggatggggcaggccacctggctctcacctctaggtccccatactcctatgatctgagtcagagccatgtcttctccctggaatgagttgaggccactgtgttccttccgcttggagctattttccaggcttctgctggggcctgggacaactgctcccacctcctgacacccttctcccactctcctaggcattctggacctctgggttgggatcaggggtaggaatggaaaggatggagcatcaacagcagggtgggcttgtggggcctgggaggggcaatcctcaaatgcggggtgggggcagcacaggagggcggcctccttctgagctcctgtcccctgctacacctattatcccagctgcctagattcagggaaagtgggacagcttgtaggggaggggctcctttccataaatccttgatgattgacaacacccatttttccttttgccgaccccaagagttttgggagttgtagttaatcatcaagagaatttggggcttccaagttgttcgggccaaggacctgagacctgaagggttgactttacccatttgggtgggagtgttgagcatctgtccccctttagatctctgaagccacaaataggatgcttgggaagactcctagctgtcctttttcctctccacacagtgctcaaggccagcttatagtcatatatatcacccagacataaaggaaaagacacattttttaggaaatgtttttaataaaagaaaattacaaaaaaaaattttaaagacccctaaccctttgtgtgctctccattctgctccttccccatcgttgcccccatttctgaggtgcactgggaggctccccttctatttggggcttgatgactttctttttgtagctggggctttgatgttccttccagtgtcatttctcatccacataccctgacctggccccctcagtgttgtcaccagatctgatttgtaacccactgagaggacagagagaaataagtgccctctcccaccctcttcctactggtctctctatgcctctctacagtctcgtctcttttaccctggcccctctcccttgggctctgatgaaaaattgctgactgtagctttggaagtttagctctgagaaccgtagatgatttcagttctaggaaaataaaacccgttgattacta

SEQ ID NO: 320424 - DNA, 2155 bp, Homo sapiens
  misc_feature (2)..(2): n is a, c, g, or t
  misc_feature (28)..(28): n is a, c, g, or t
anggctaggtacgaggctgggtggctgngattgacgagatgcctgaggctgccgtgaaatcaacagccaacaaataccaagtcttttttttcgggacccacgagacgtgagtggaggccaaaggggtataggtcgggagggccccgggaggactactctggggaaggtgaggtggtgttggtgcccctttcatgccgggctgtgcagctcaggggcagtgaggggcttgagagcacagtctcccatctctcaccagggcattcctgggccccaaagacctcttcccttacgaggaatccaaggagaagtttggcaagcccaacaagaggaaagggttcagcgaggggctgtgggagatcgagaacaaccctactgtcaaggcttccggctatcagtcctcccagaaaaagagctgtgtggaagagcctgaaccagagcccgaagctgcagagggtgacggtgataagaaggggaatgcagagggcagcagcgacgaggaagggaagctggtcattgatgagccagccaaggagaagaacgagaaaggagcgttgaagaggagagcaggggacttgctggaggactctcctaaacgtcccaaggaggcagaaaaccctgaaggagaggagaaggaggcagccaccttggaggttgagaggccccttcctatggaggtggaaaagaatagcaccccctctgagcccggctctggccgggggcctccccaagaggaagaagaagaggaggatgaagaggaagaggctaccaaggaagatgctgaggccccaggcatcagagatcatgagagcctgtagccaccaatgtttcaagaggagcccccaccctgttcctgctgctgtctgggtgctactggggaaactggccatggcctgcaaactgggaacccctttcccaccccaacctgctctcctcttctactcacttttcccactccaagcccagcccatggagattgacctggatggggcaggccacctggctctcacctctaggtccccatactcctatgatctgagtcagagccatgtcttctccctggaatgagttgaggccactgtgttccttccgcttggagctattttccaggcttctgctggggcctgggacaactgctcccacctcctgacacccttctcccactctcctaggcattctggacctctgggttgggatcaggggtaggaatggaaaggatggagcatcaacagcagggtgggcttgtggggcctgggaggggcaatcctcaaatgcggggtgggggcagcacaggagggcggcctccttctgagctcctgtcccctgctacacctattatcccagctgcctagattcagggaaagtgggacagcttgtaggggaggggctcctttccataaatccttgatgattgacaacacccatttttccttttgccgaccccaagagttttgggagttgtagttaatcatcaagagaatttggggcttccaagttgttcgggccaaggacctgagacctgaagggttgactttacccatttgggtgggagtgttgagcatctgtccccctttagatctctgaagccacaaataggatgcttgggaagactcctagctgtcctttttcctctccacacagtgctcaaggccagcttatagtcatatatatcacccagacataaaggaaaagacacattttttaggaaatgtttttaataaaagaaaattacaaaaaaaaattttaaagacccctaaccctttgtgtgctctccattctgctccttccccatcgttgcccccatttctgaggtgcactgggaggctccccttctatttggggcttgatgactttctttttgtagctggggctttgatgttccttccagtgtcatttctcatccacataccctgacctggccccctcagtgttgtcaccagatctgatttgtaacccactgagaggacagagagaaataagtgccctctcccaccctcttcctactggtctctctatgcctctctacagtctcgtctcttttaccctggcccctctcccttgggctctgatgaaaaattgctgactgtagctttggaagtttagctctgagaaccgtagatgatttcagttctaggaaaataaaacccgttgattacta

SEQ ID NO: 320425 - DNA, 1851 bp, Homo sapiens
taagaaactactctttattttagacaacctcataaaattattttcacatcccccccaacttcttgctcttaatcctcatctttttcttccttcctcccagaaaaagagctgtgtggaagagcctgaaccagagcccgaagctgcagagggtgacggtgataagaaggggaatgcagagggcagcagcgacgaggaagggaagctggtcattgatgagccagccaaggagaagaacgagaaaggagcgttgaagaggagagcaggggacttgctggaggactctcctaaacgtcccaaggaggcagaaaaccctgaaggagaggagaaggaggcagccaccttggaggttgagaggccccttcctatggaggtggaaaagaatagcaccccctctgagcccggctctggccgggggcctccccaagaggaagaagaagaggaggatgaagaggaagaggctaccaaggaagatgctgaggccccaggcatcagagatcatgagagcctgtagccaccaatgtttcaagaggagcccccaccctgttcctgctgctgtctgggtgctactggggaaactggccatggcctgcaaactgggaacccctttcccaccccaacctgctctcctcttctactcacttttcccactccaagcccagcccatggagattgacctggatggggcaggccacctggctctcacctctaggtccccatactcctatgatctgagtcagagccatgtcttctccctggaatgagttgaggccactgtgttccttccgcttggagctattttccaggcttctgctggggcctgggacaactgctcccacctcctgacacccttctcccactctcctaggcattctggacctctgggttgggatcaggggtaggaatggaaaggatggagcatcaacagcagggtgggcttgtggggcctgggaggggcaatcctcaaatgcggggtgggggcagcacaggagggcggcctccttctgagctcctgtcccctgctacacctattatcccagctgcctagattcagggaaagtgggacagcttgtaggggaggggctcctttccataaatccttgatgattgacaacacccatttttccttttgccgaccccaagagttttgggagttgtagttaatcatcaagagaatttggggcttccaagttgttcgggccaaggacctgagacctgaagggttgactttacccatttgggtgggagtgttgagcatctgtccccctttagatctctgaagccacaaataggatgcttgggaagactcctagctgtcctttttcctctccacacagtgctcaaggccagcttatagtcatatatatcacccagacataaaggaaaagacacattttttaggaaatgtttttaataaaagaaaattacaaaaaaaaattttaaagacccctaaccctttgtgtgctctccattctgctccttccccatcgttgcccccatttctgaggtgcactgggaggctccccttctatttggggcttgatgactttctttttgtagctggggctttgatgttccttccagtgtcatttctcatccacataccctgacctggccccctcagtgttgtcaccagatctgatttgtaacccactgagaggacagagagaaataagtgccctctcccaccctcttcctactggtctctctatgcctctctacagtctcgtctcttttaccctggcccctctcccttgggctctgatgaaaaattgctgactgtagctttggaagtttagctctgagaaccgtagatgatttcagttctaggaaaataaaacccgttgattacta

SEQ ID NO: 320426 - DNA, 1799 bp, Homo sapiens
  misc_feature (15)..(15): n is a, c, g, or t
  misc_feature (25)..(25): n is a, c, g, or t
  misc_feature (146)..(146): n is a, c, g, or t
gcaaccagaagggtntgccagggcntgcagggactggagtcatcctcccagaactgagagagggccctcccctgtcgtcctccagccgtttaatgccgccgcgaattcgcggccgcgtcgacacggctgcgagaagacgacagaangaagctggtcattgatgagccagccaaggagaagaacgagaaaggagcgttgaagaggagagcaggggacttgctggaggactctcctaaacgtcccaaggaggcagaaaaccctgaaggagaggagaaggaggcagccaccttggaggttgagaggccccttcctatggaggtggaaaagaatagcaccccctctgagcccggctctggccgggggcctccccaagaggaagaagaagaggaggatgaagaggaagaggctaccaaggaagatgctgaggccccaggcatcagagatcatgagagcctgtagccaccaatgtttcaagaggagcccccaccctgttcctgctgctgtctgggtgctactggggaaactggccatggcctgcaaactgggaacccctttcccaccccaacctgctctcctcttctactcacttttcccactccaagcccagcccatggagattgacctggatggggcaggccacctggctctcacctctaggtccccatactcctatgatctgagtcagagccatgtcttctccctggaatgagttgaggccactgtgttccttccgcttggagctattttccaggcttctgctggggcctgggacaactgctcccacctcctgacacccttctcccactctcctaggcattctggacctctgggttgggatcaggggtaggaatggaaaggatggagcatcaacagcagggtgggcttgtggggcctgggaggggcaatcctcaaatgcggggtgggggcagcacaggagggcggcctccttctgagctcctgtcccctgctacacctattatcccagctgcctagattcagggaaagtgggacagcttgtaggggaggggctcctttccataaatccttgatgattgacaacacccatttttccttttgccgaccccaagagttttgggagttgtagttaatcatcaagagaatttggggcttccaagttgttcgggccaaggacctgagacctgaagggttgactttacccatttgggtgggagtgttgagcatctgtccccctttagatctctgaagccacaaataggatgcttgggaagactcctagctgtcctttttcctctccacacagtgctcaaggccagcttatagtcatatatatcacccagacataaaggaaaagacacattttttaggaaatgtttttaataaaagaaaattacaaaaaaaaattttaaagacccctaaccctttgtgtgctctccattctgctccttccccatcgttgcccccatttctgaggtgcactgggaggctccccttctatttggggcttgatgactttctttttgtagctggggctttgatgttccttccagtgtcatttctcatccacataccctgacctggccccctcagtgttgtcaccagatctgatttgtaacccactgagaggacagagagaaataagtgccctctcccaccctcttcctactggtctctctatgcctctctacagtctcgtctcttttaccctggcccctctcccttgggctctgatgaaaaattgctgactgtagctttggaagtttagctctgagaaccgtagatgatttcagttctaggaaaataaaacccgttgattacta

SEQ ID NO: 320427 - DNA, 2084 bp, Homo sapiens
  misc_feature (2)..(2): n is a, c, g, or t
  misc_feature (28)..(28): n is a, c, g, or t
  misc_feature (2048)..(2048): n is a, c, g, or t
anggctaggtacgaggctgggtggctgngattgacgagatgcctgaggctgccgtgaaatcaacagccaacaaataccaagtcttttttttcgggacccacgagacggcattcctgggccccaaagacctcttcccttacgaggaatccaaggagaagtttggcaagcccaacaagaggaaagggttcagcgaggggctgtgggagatcgagaacaaccctactgtcaaggcttccggctatcagtcctcccagaaaaagagctgtgtggaagagcctgaaccagagcccgaagctgcagagggtgacggtgataagaaggggaatgcagagggcagcagcgacgaggaagggaagctggtcattgatgagccagccaaggagaagaacgagaaaggagcgttgaagaggagagcaggggacttgctggaggactctcctaaacgtcccaaggaggcagaaaaccctgaaggagaggagaaggaggcagccaccttggaggttgagaggccccttcctatggaggtggaaaagaatagcaccccctctgagcccggctctggccgggggcctccccaagaggaagaagaagaggaggatgaagaggaagaggctaccaaggaagatgctgaggccccaggcatcagagatcatgagagcctgtagccaccaatgtttcaagaggagcccccaccctgttcctgctgctgtctgggtgctactggggaaactggccatggcctgcaaactgggaacccctttcccaccccaacctgctctcctcttctactcacttttcccactccaagcccagcccatggagattgacctggatggggcaggccacctggctctcacctctaggtccccatactcctatgatctgagtcagagccatgtcttctccctggaatgagttgaggccactgtgttccttccgcttggagctattttccaggcttctgctggggcctgggacaactgctcccacctcctgacacccttctcccactctcctaggcattctggacctctgggttgggatcaggggtaggaatggaaaggatggagcatcaacagcagggtgggcttgtggggcctgggaggggcaatcctcaaatgcggggtgggggcagcacaggagggcggcctccttctgagctcctgtcccctgctacacctattatcccagctgcctagattcagggaaagtgggacagcttgtaggggaggggctcctttccataaatccttgatgattgacaacacccatttttccttttgccgaccccaagagttttgggagttgtagttaatcatcaagagaatttggggcttccaagttgttcgggccaaggacctgagacctgaagggttgactttacccatttgggtgggagtgttgagcatctgtccccctttagatctctgaagccacaaataggatgcttgggaagactcctagctgtcctttttcctctccacacagtgctcaaggccagcttatagtcatatatatcacccagacataaaggaaaagacacattttttaggaaatgtttttaataaaagaaaattacaaaaaaaaattttaaagacccctaaccctttgtgtgctctccattctgctccttccccatcgttgcccccatttctgaggtgcactgggaggctccccttctatttggggcttgatgactttctttttgtagctggggctttgatgttccttccagtgtcatttctcatccacataccctgacctggccccctcagtgttgtcaccagatctgatttgtaacccactgagaggacagagagaaataagtgccctctcccaccctcttcctactggtctctctatgcctctctacagtctcgtctcttttaccctggcccctctcccttgggctctgatgaaaaattgctgactgtagctttggaagtttagctctgagaaccgtagatgatttcagttctaggaaaataaaacccgttgattactaaaaaaaaaaaaaaaaaaaaaaaaaaaaaaaaaaaaaaaaaaangggggggggcccccaaaattccccccgggggggccc

SEQ ID NO: 320428 - DNA, 1718 bp, Homo sapiens
  misc_feature (2)..(2): n is a, c, g, or t
  misc_feature (28)..(28): n is a, c, g, or t
anggctaggtacgaggctgggtggctgngattgacgagatgcctgaggctgccgtgaaatcaacagccaacaaataccaagtcttttttttcgggacccacgagacggcattcctgggccccaaagacctcttcccttacgaggaatccaaggagaagtttggcaagcccaacaagaggaaagggttcagcgaggggctgtgggagatcgagaacaaccctactgtcaaggcttccggctatcagtcctcccagaaaaagagctgtgtggaagagcctgaaccagagcccgaagctgcagagggtgacggtgataagaaggggaatgcagagggcagcagcgacgaggaagggaagctggtcattgatgagccagccaaggagaagaacgagaaaggagcgttgaagaggagagcaggggacttgctggaggactctcctaaacgtcccaaggaggcagaaaaccctgaaggagaggagaaggaggcagccaccttggaggttgagaggccccttcctatggagagcccatggagattgacctggatggggcaggccacctggctctcacctctaggtccccatactcctatgatctgagtcagagccatgtcttctccctggaatgagttgaggccactgtgttccttccgcttggagctattttccaggcttctgctggggcctgggacaactgctcccacctcctgacacccttctcccactctcctaggcattctggacctctgggttgggatcaggggtaggaatggaaaggatggagcatcaacagcagggtgggcttgtggggcctgggaggggcaatcctcaaatgcggggtgggggcagcacaggagggcggcctccttctgagctcctgtcccctgctacacctattatcccagctgcctagattcagggaaagtgggacagcttgtaggggaggggctcctttccataaatccttgatgattgacaacacccatttttccttttgccgaccccaagagttttgggagttgtagttaatcatcaagagaatttggggcttccaagttgttcgggccaaggacctgagacctgaagggttgactttacccatttgggtgggagtgttgagcatctgtccccctttagatctctgaagccacaaataggatgcttgggaagactcctagctgtcctttttcctctccacacagtgctcaaggccagcttatagtcatatatatcacccagacataaaggaaaagacacattttttaggaaatgtttttaataaaagaaaattacaaaaaaaaattttaaagacccctaaccctttgtgtgctctccattctgctccttccccatcgttgcccccatttctgaggtgcactgggaggctccccttctatttggggcttgatgactttctttttgtagctggggctttgatgttccttccagtgtcatttctcatccacataccctgacctggccccctcagtgttgtcaccagatctgatttgtaacccactgagaggacagagagaaataagtgccctctcccaccctcttcctactggtctctctatgcctctctacagtctcgtctcttttaccctggcccctctcccttgggctctgatgaaaaattgctgactgtagctttggaagtttagctctgagaaccgtagatgatttcagttctaggaaaataaaacccgttgattacta

SEQ ID NO: 320429 - DNA, 2310 bp, Homo sapiens
  misc_feature (2)..(2): n is a, c, g, or t
  misc_feature (28)..(28): n is a, c, g, or t
anggctaggtacgaggctgggtggctgngattgacgagatgcctgaggctgccgtgaaatcaacagccaacaaataccaagtcttttttttcgggacccacgagacggcattcctgggccccaaagacctcttcccttacgaggaatccaaggagaagtttggcaagcccaacaagaggaaagggttcagcgaggggctgtgggagatcgagaacaaccctactgtcaaggcttccggctatcagtcctcccagaaaaagagctgtgtggaagagcctgaaccagagcccgaagctgcagagggtgacggtgataagaaggggaatgcagagggcagcagcgacgaggaagggaagctggtcattgatgagccagccaaggagaagaacgagaaaggagcgttgaagaggagagcaggggacttgctggaggactctcctaaacgtcccaaggaggcagaaaaccctgaaggagaggagaaggaggcagccaccttggaggttgagaggccccttcctatggaggtggaaaagaatagcaccccctctgagcccggctctggccgggggcctccccaagaggaagaagaagaggaggatgaagaggaagaggctaccaaggaagatgctgaggccccaggcatcagagatcatgagagcctgtagccaccaatgtttcaagaggagcccccaccctgttcctgctgctgtctgggtgctactggggaaactggccatggcctgcaaactgggaacccctttcccaccccaacctgctctcctcttctactcacttttcccactccaagcccagcccatggagattgacctggatggggcaggccacctggctctcacctctaggtccccatactcctatgatctgagtcagagccatgtcttctccctggaatgagttgaggccactgtgttccttccgcttggagctattttccaggcttctgctggggcctgggacaactgctcccacctcctgacacccttctcccactctcctaggcattctggacctctgggttgggatcaggggtaggaatggaaaggatggagcatcaacagcagggtgggcttgtggggcctgggaggggcaatcctcaaatgcggggtgggggcagcacaggagggcggcctccttctgagctcctgtcccctgctacacctattatcccagctgcctagattcagggaaagtgggacagcttgtaggggaggggctcctttccataaatccttgatgattgacaacacccatttttccttttgccgaccccaagagttttgggagttgtagttaatcatcaagagaatttggggcttccaagttgttcgggccaaggacctgagacctgaagggttgactttacccatttgggtgggagtgttgagcatctgtccccctttagatctctgaagccacaaataggatgcttgggaagactcctagctgtcctttttcctctccacacagtgctcaaggccagcttatagtcatatatatcacccagacataaaggaaaagacacattttttaggaaatgtttttaataaaagaaaattacaaaaaaaaattttaaagacccctaaccctttgtgtgctctccattctgctccttccccatcgttgcccccatttctgaggtgcactgggaggctccccttctatttggggcttgatgactttctttttgtagctggggctttgatgttccttccagtgtcatttctcatccacataccctgacctggccccctcagtgttgtcaccagatctgatttgtaacccactgagaggacagagagaaataagtgccctctcccaccctcttcctactggtctctctatgcctctctacagtctcgtctcttttaccctggcccctctcccttgggctctgatgaaaaattgctgactgtagctttggaagtttagctctgagaaccgtagatgatttcagttctaggaaaataaaacccgttgattactacaaaaacaaaacaaaacacacaaaaaaaacaaactttttggggcggtctggccctggagaaaggttttcgacaaaaccacttccggtgggggcgcgagggcccccagtagtggtcactggaaacacgtggcgcacatggcggggcccccgagggagctccggggcacgcaaccaagcgctggagtcttccaccaattaaaaggcgcggggggacacacgagggttcggaacccaacccgagaggagtcggaaggccaaggggaccaacccgggggcccaggagccgaaaaaatcccgcgcgcgat

SEQ ID NO: 320430 - DNA, 2052 bp, Homo sapiens
  misc_feature (2)..(2): n is a, c, g, or t
  misc_feature (28)..(28): n is a, c, g, or t
  misc_feature (2012)..(2012): n is a, c, g, or t
anggctaggtacgaggctgggtggctgngattgacgagatgcctgaggctgccgtgaaatcaacagccaacaaataccaagtcttttttttcgggacccacgagacggcattcctgggccccaaagacctcttcccttacgaggaatccaaggagaagtttggcaagcccaacaagaggaaagggttcagcgaggggctgtgggagatcgagaacaaccctactgtcaaggcttccggctatcagtcctcccagaaaaagagctgtgtggaagagcctgaaccagagcccgaagctgcagagggtgacggtgataagaaggggaatgcagagggcagcagcgacgaggaagggaagctggtcattgatgagccagccaaggagaagaacgagaaaggagcgttgaagaggagagcaggggacttgctggaggactctcctaaacgtcccaaggaggcagaaaaccctgaaggagaggagaaggaggcagccaccttggaggttgagaggccccttcctatggaggtggaaaagaatagcaccccctctgagcccggctctggccgggggcctccccaagaggaagaagaagaggaggatgaagaggaagaggctaccaaggaagatgctgaggccccaggcatcagagatcatgagagcctgtagccaccaatgtttcaagaggagcccccaccctgttcctgctgctgtctgggtgctactggggaaactggccatggcctgcaaactgggaacccctttcccaccccaacctgctctcctcttctactcacttttcccactccaagcccagcccatggagattgacctggatggggcaggccacctggctctcacctctaggtccccatactcctatgatctgagtcagagccatgtcttctccctggaatgagttgaggccactgtgttccttccgcttggagctattttccaggcttctgctggggcctgggacaactgctcccacctcctgacacccttctcccactctcctaggcattctggacctctgggttgggatcaggggtaggaatggaaaggatggagcatcaacagcagggtgggcttgtggggcctgggaggggcaatcctcaaatgcggggtgggggcagcacaggagggcggcctccttctgagctcctgtcccctgctacacctattatcccagctgcctagattcagggaaagtgggacagcttgtaggggaggggctcctttccataaatccttgatgattgacaacacccatttttccttttgccgaccccaagagttttgggagttgtagttaatcatcaagagaatttggggcttccaagttgttcgggccaaggacctgagacctgaagggttgactttacccatttgggtgggagtgttgagcatctgtccccctttagatctctgaagccacaaataggatgcttgggaagactcctagctgtcctttttcctctccacacagtgctcaaggccagcttatagtcatatatatcacccagacataaaggaaaagacacattttttaggaaatgtttttaataaaagaaaattacaaaaaaaaattttaaagacccctaaccctttgtgtgctctccattctgctccttccccatcgttgcccccatttctgaggtgcactgggaggctccccttctatttggggcttgatgactttctttttgtagctggggctttgatgttccttccagtgtcatttctcatccacataccctgacctggccccctcagtgttgtcaccagatctgatttgtaacccactgagaggacagagagaaataagtgccctctcccaccctcttcctactggtctctctatgcctctctacagtctcgtctcttttaccctggcccctctcccttgggctctgatgaaaaattgctgactgtagctttggaagtttagctctgagaaccgtagatgatttcagttctaggaaaataaaacccgttgattactaaaaaaanaaaccggcctttgtgggggaaagggtgaggcaggaggtcg

SEQ ID NO: 320431 - DNA, 2117 bp, Homo sapiens
  misc_feature (2)..(2): n is a, c, g, or t
  misc_feature (28)..(28): n is a, c, g, or t
  misc_feature (2081)..(2081): n is a, c, g, or t
anggctaggtacgaggctgggtggctgngattgacgagatgcctgaggctgccgtgaaatcaacagccaacaaataccaagtcttttttttcgggacccacgagacggcattcctgggccccaaagacctcttcccttacgaggaatccaaggagaagtttggcaagcccaacaagaggaaagggttcagcgaggggctgtgggagatcgagaacaaccctactgtcaaggcttccggctatcagtcctcccagaaaaagagctgtgtggaagagcctgaaccagagcccgaagctgcagagggtgacggtgataagaaggggaatgcagagggcagcagcgacgaggaagggaagctggtcattgatgagccagccaaggagaagaacgagaaaggagcgttgaagaggagagcaggggacttgctggaggactctcctaaacgtcccaaggaggcagaaaaccctgaaggagaggagaaggaggcagccaccttggaggttgagaggccccttcctatggaggtggaaaagaatagcaccccctctgagcccggctctggccgggggcctccccaagaggaagaagaagaggaggatgaagaggaagaggctaccaaggaagatgctgaggccccaggcatcagagatcatgagagcctgtagccaccaatgtttcaagaggagcccccaccctgttcctgctgctgtctgggtgctactggggaaactggccatggcctgcaaactgggaacccctttcccaccccaacctgctctcctcttctactcacttttcccactccaagcccagcccatggagattgacctggatggggcaggccacctggctctcacctctaggtccccatactcctatgatctgagtcagagccatgtcttctccctggaatgagttgaggccactgtgttccttccgcttggagctattttccaggcttctgctggggcctgggacaactgctcccacctcctgacacccttctcccactctcctaggcattctggacctctgggttgggatcaggggtaggaatggaaaggatggagcatcaacagcagggtgggcttgtggggcctgggaggggcaatcctcaaatgcggggtgggggcagcacaggagggcggcctccttctgagctcctgtcccctgctacacctattatcccagctgcctagattcagggaaagtgggacagcttgtaggggaggggctcctttccataaatccttgatgattgacaacacccatttttccttttgccgaccccaagagttttgggagttgtagttaatcatcaagagaatttggggcttccaagttgttcgggccaaggacctgagacctgaagggttgactttacccatttgggtgggagtgttgagcatctgtccccctttagatctctgaagccacaaataggatgcttgggaagactcctagctgtcctttttcctctccacacagtgctcaaggccagcttatagtcatatatatcacccagacataaaggaaaagacacattttttaggaaatgtttttaataaaagaaaattacaaaaaaaaattttaaagacccctaaccctttgtgtgctctccattctgctccttccccatcgttgcccccatttctgaggtgcactgggaggctccccttctatttggggcttgatgactttctttttgtagctggggctttgatgttccttccagtgtcatttctcatccacataccctgacctggccccctcagtgttgtcaccagatctgatttgtaacccactgagaggacagagagaaataagtgccctctcccaccctcttcctactggtctctctatgcctctctacagtctcgtctcttttaccctggcccctctcccttgggctctgatgaaaaattgctgactgtagctttggaagtttagctctgagaaccgtagatgatttcagttctaggaaaataaaacccgttgattactacaaaaacaaaacaaaacacacaaaaaaaacaaaaaaaaaaaaaaaaaaaaaaaaaaaaaaaaaaaaaaaaaaaaangggggggggcccccaaaattccccccgggggggccc

SEQ ID NO: 320432 - DNA, 1988 bp, Homo sapiens
  misc_feature (2)..(2): n is a, c, g, or t
  misc_feature (28)..(28): n is a, c, g, or t
anggctaggtacgaggctgggtggctgngattgacgagatgcctgaggctgccgtgaaatcaacagccaacaaataccaagtcttttttttcgggacccacgagacggcattcctgggccccaaagacctcttcccttacgaggaatccaaggagaagtttggcaagcccaacaagaggaaagggttcagcgaggggctgtgggagatcgagaacaaccctactgtcaaggcttccggctatcagtcctcccagaaaaagagctgtgtggaagagcctgaaccagagcccgaagctgcagagggtgacggtgataagaaggggaatgcagagggcagcagcgacgaggaagggaagctggtcattgatgagccagccaaggagaagaacgagaaaggagcgttgaagaggagagcaggggacttgctggaggactctcctaaacgtcccaaggaggcagaaaaccctgaaggagaggagaaggaggcagccaccttggaggttgagaggccccttcctatggaggtggaaaagaatagcaccccctctgagcccggctctggccgggggcctccccaagaggaagaagaagaggaggatgaagaggaagaggctaccaaggaagatgctgaggccccaggcatcagagatcatgagagcctgtagccaccaatgtttcaagaggagcccccaccctgttcctgctgctgtctgggtgctactggggaaactggccatggcctgcaaactgggaacccctttcccaccccaacctgctctcctcttctactcacttttcccactccaagcccagcccatggagattgacctggatggggcaggccacctggctctcacctctaggtccccatactcctatgatctgagtcagagccatgtcttctccctggaatgagttgaggccactgtgttccttccgcttggagctattttccaggcttctgctggggcctgggacaactgctcccacctcctgacacccttctcccactctcctaggcattctggacctctgggttgggatcaggggtaggaatggaaaggatggagcatcaacagcagggtgggcttgtggggcctgggaggggcaatcctcaaatgcggggtgggggcagcacaggagggcggcctccttctgagctcctgtcccctgctacacctattatcccagctgcctagattcagggaaagtgggacagcttgtaggggaggggctcctttccataaatccttgatgattgacaacacccatttttccttttgccgaccccaagagttttgggagttgtagttaatcatcaagagaatttggggcttccaagttgttcgggccaaggacctgagacctgaagggttgactttacccatttgggtgggagtgttgagcatctgtccccctttagatctctgaagccacaaataggatgcttgggaagactcctagctgtcctttttcctctccacacagtgctcaaggccagcttatagtcatatatatcacccagacataaaggaaaagacacattttttaggaaatgtttttaataaaagaaaattacaaaaaaaaattttaaagacccctaaccctttgtgtgctctccattctgctccttccccatcgttgcccccatttctgaggtgcactgggaggctccccttctatttggggcttgatgactttctttttgtagctggggctttgatgttccttccagtgtcatttctcatccacataccctgacctggccccctcagtgttgtcaccagatctgatttgtaacccactgagaggacagagagaaataagtgccctctcccaccctcttcctactggtctctctatgcctctctacagtctcgtctcttttaccctggcccctcctggtctgttgaaatgtgatgggttggagttaggtcggaacgggaaagttacggttggaataaacgggttcaaaacaaaccacaaag

SEQ ID NO: 320433 - DNA, 1369 bp, Homo sapiens
  misc_feature (2)..(2): n is a, c, g, or t
  misc_feature (28)..(28): n is a, c, g, or t
anggctaggtacgaggctgggtggctgngattgacgagatgcctgaggctgccgtgaaatcaacagccaacaaataccaagtcttttttttcgggacccacgagacggcattcctgggccccaaagacctcttcccttacgaggaatccaaggagaagtttggcaagcccaacaagaggaaagggttcagcgaggggctgtgggagatcgagaacaaccctactgtcaaggcttccggctatcagtcctcccagaaaaagagctgtgtggaagagcctgaaccagagcccgaagctgcagagggtgacggtgataagaaggggaatgcagagggcagcagcgacgaggaagggaagctggtcattgatgagccagccaaggagaagaacgagaaaggagcgttgaagaggagagcaggggacttgctggaggactctcctaaacgtcccaaggaggcagaaaaccctgaaggagaggagaaggaggcagccacgggcagcacaggagggcggcctccttctgagctcctgtcccctgctacacctattatcccagctgcctagattcagggaaagtgggacagcttgtaggggaggggctcctttccataaatccttgatgattgacaacacccatttttccttttgccgaccccaagagttttgggagttgtagttaatcatcaagagaatttggggcttccaagttgttcgggccaaggacctgagacctgaagggttgactttacccatttgggtgggagtgttgagcatctgtccccctttagatctctgaagccacaaataggatgcttgggaagactcctagctgtcctttttcctctccacacagtgctcaaggccagcttatagtcatatatatcacccagacataaaggaaaagacacattttttaggaaatgtttttaataaaagaaaattacaaaaaaaaattttaaagacccctaaccctttgtgtgctctccattctgctccttccccatcgttgcccccatttctgaggtgcactgggaggctccccttctatttggggcttgatgactttctttttgtagctggggctttgatgttccttccagtgtcatttctcatccacataccctgacctggccccctcagtgttgtcaccagatctgatttgtaacccactgagaggacagagagaaataagtgccctctcccaccctcttcctactggtctctctatgcctctctacagtctcgtctcttttaccctggcccctctcccttgggctctgatgaaaaattgctgactgtagctttggaagtttagctctgagaaccgtagatgatttcagttctaggaaaataaaacccgttgattacta

SEQ ID NO: 320434 - DNA, 2058 bp, Homo sapiens
  misc_feature (2)..(2): n is a, c, g, or t
  misc_feature (28)..(28): n is a, c, g, or t
anggctaggtacgaggctgggtggctgngattgacgagatgcctgaggctgccgtgaaatcaacagccaacaaataccaagtcttttttttcgggacccacgagacggcattcctgggccccaaagacctcttcccttacgaggaatccaaggagaagtttggcaagcccaacaagaggaaagggttcagcgaggggctgtgggagatcgagaacaaccctactgtcaaggcttccggctatcagtcctcccagaaaaagagctgtgtggaagagcctgaaccagagcccgaagctgcagagggtgacggtgataagaaggggaatgcagagggcagcagcgacgaggaagggaagctggtcattgatgagccagccaaggagaagaacgagaaaggagcgttgaagaggagagcaggggacttgctggaggactctcctaaacgtcccaaggaggcagaaaaccctgaaggagaggagaaggaggcagccaccttggaggttgagaggccccttcctatggaggtggaaaagaatagcaccccctctgagcccggctctggccgggggcctccccaagaggaagaagaagaggaggatgaagaggaagaggctaccaaggaagatgctgaggccccaggcatcagagatcatgagagcctgtagccaccaatgtttcaagaggagcccccaccctgttcctgctgctgtctgggtgctactggggaaactggccatggcctgcaaactgggaacccctttcccaccccaacctgctctcctcttctactcacttttcccactccaagcccagcccatggagattgacctggatggggcaggccacctggctctcacctctaggtccccatactcctatgatctgagtcagagccatgtcttctccctggaatgagttgaggccactgtgttccttccgcttggagctattttccaggcttctgctggggcctgggacaactgctcccacctcctgacacccttctcccactctcctaggcattctggacctctgggttgggatcaggggtaggaatggaaaggatggagcatcaacagcagggtgggcttgtggggcctgggaggggcaatcctcaaatgcggggtggtatagcaatcactgagtcaccacgtgtatacactcatataatatcacattgtgttcatatacatcacgagaaatgtgacagacatccatgctaggaggagaagtccttccttctcttccaaacactccatgatggtcgacacccaacccatatcataccattacgacgacacccaagcgacgttataggcgatcttgatacgtttaacacatcaaagagaattgggggggctacacaccagcagtggtcacgggagaccaccgggaccctgaagaccctgaacgggtagactaacacccacatttgggagtggacagatgttagacgacgcatctgtccccctttagatctctgaagccacaaataggatgcttgggaagactcctagctgtcctttttcctctccacacagtgctcaaggccagcttatagtcatatatatcacccagacataaaggaaaagacacattttttaggaaatgtttttaataaaagaaaattacaaaaaaaaattttaaagacccctaaccctttgtgtgctctccattctgctccttccccatcgttgcccccatttctgaggtgcactgggaggctccccttctatttggggcttgatgactttctttttgtagctggggctttgatgttccttccagtgtcatttctcatccacataccctgacctggccccctcagtgttgtcaccagatctgatttgtaacccactgagaggacagagagaaataagtgccctctcccaccctcttcctactggtctctctatgcctctctacagtctcgtctcttttaccctggcccctctcccttgggctctgatgaaaaattgctgactgtagctttggaagtttagctctgagaaccgtagatgatttcagttctaggaaaataaaacccgttgattacta

SEQ ID NO: 320435 - DNA, 1115 bp, Homo sapiens
  misc_feature (2)..(2): n is a, c, g, or t
  misc_feature (28)..(28): n is a, c, g, or t
anggctaggtacgaggctgggtggctgngattgacgagatgcctgaggctgccgtgaaatcaacagccaacaaataccaagtcttttttttcgggacccacgagacggcattcctgggccccaaagacctcttcccttacgaggaatccaaggagaagtttggcaagcccaacaagaggaaagggttcagcgaggggctgtgggagatcgagaacaaccctactgtcaaggcttccggctatcagtcctcccagaaaaagagctgtgtggaagagcctgaaccagagcccgaagctgcagagggtgacggtgataagaaggggaatgcagagggcagcagcgacgaggaagggaagctggtcattgatgagacaacacccatttttccttttgccgaccccaagagttttgggagttgtagttaatcatcaagagaatttggggcttccaagttgttcgggccaaggacctgagacctgaagggttgactttacccatttgggtgggagtgttgagcatctgtccccctttagatctctgaagccacaaataggatgcttgggaagactcctagctgtcctttttcctctccacacagtgctcaaggccagcttatagtcatatatatcacccagacataaaggaaaagacacattttttaggaaatgtttttaataaaagaaaattacaaaaaaaaattttaaagacccctaaccctttgtgtgctctccattctgctccttccccatcgttgcccccatttctgaggtgcactgggaggctccccttctatttggggcttgatgactttctttttgtagctggggctttgatgttccttccagtgtcatttctcatccacataccctgacctggccccctcagtgttgtcaccagatctgatttgtaacccactgagaggacagagagaaataagtgccctctcccaccctcttcctactggtctctctatgcctctctacagtctcgtctcttttaccctggcccctctcccttgggctctgatgaaaaattgctgactgtagctttggaagtttagctctgagaaccgtagatgatttcagttctaggaaaataaaacccgttgattacta

SEQ ID NO: 320436 - DNA, 1776 bp, Homo sapiens
  misc_feature (2)..(2): n is a, c, g, or t
  misc_feature (28)..(28): n is a, c, g, or t
anggctaggtacgaggctgggtggctgngattgacgagatgcctgaggctgccgtgaaatcaacagccaacaaataccaagtcttttttttcgggacccacgagacggcattcctgggccccaaagacctcttcccttacgaggaatccaaggagaagtttggcaagcccaacaagaggaaagggttcagcgaggggctgtgggagatcgagaacaaccctactgtcaaggcttccggctatcagtcctcccagaaaaagagctgtgtggaagagcctgaaccagagcccgaagctgcagagggtgacggtgataagaaggggaatgcagagggcagcagcgacgaggaagggaagctggtcattgatgagccagccaaggagaagaacgagaaaggagcgttgaagaggagagcaggggacttgctggaggactctcctaaacgtcccaaggaggcagaaaaccctgaaggagaggagaaggaggcagccaccttggaggttgagaggccccttcctatggaggtggaaaagaatagcaccccctctgagcccggctctggccgggggcctccccaagaggaagaagaagaggaggatgaagaggaagaggctaccaaggaagatgctgaggccccaggcatcagagatcatgagagcctgtagccaccaatgtttcaagaggagcccccaccctgttcctgctgctgtctgggtgctactggggaaactggccatggcctgcaaactgggaacccctttcccaccccaacctgctctcctcttctactcacttttcccactccaagcccagcccatggagattgacctggatggggcaggccacctggctctcacctctaggtccccatactcctatgatctgagtcagagccatgtcttctccctggaatgagttgaggccactgtgttccttccgcttggagctattttccaggcttctgctggggcctgggacaactgctcccacctcctgacacccttctcccactctcctaggcattctggacctctgggttgggatcaggggtaggaatggaaaggatggagcatcaacagcagggtgggcttgtggggcctgggaggggcaatcctcaaatgcggggtgggggcagcacaggagggcggcctccttctgagctcctgtcccctgctacacctattatcccagctgcctagattcagggaaagtgggacagcttgtaggggaggggctcctttccataaatccttgatgattgacaacacccatttttccttttgccgaccccaagagttttgggagttgtagttaatcatcaagagaatttggggcttccaagttgttcgggccaaggacctgagacctgaagggttgactttacccatttgggtgggagtgttgagcatctgtccccctttagatctctgaagccacaaataggatgcttgggaagactcctagctgtcctttttcctctccacacagtgctcaaggccagcttatagtcatatatatcacccagacataaaggaaaagacacattttttaggaagtcttactcacaccaacacccaacaacaaacaaaaaccccgggccctaagtggcgggggggaaaaaggtctgaagggctaggccagcgtgtcccgaccgtttggcaaggggattggcggccaaagggcgtaatcaaccgtccgaccgccgccacaaggcaagagagaccacacatcaaaaccagcgcacgacccgcaagcgggcgcctcccactcgtcacc

SEQ ID NO: 320437 - DNA, 1611 bp, Homo sapiens
  misc_feature (2)..(2): n is a, c, g, or t
  misc_feature (28)..(28): n is a, c, g, or t
anggctaggtacgaggctgggtggctgngattgacgagatgcctgaggctgccgtgaaatcaacagccaacaaataccaagtcttttttttcgggacccacgagacggcattcctgggccccaaagacctcttcccttacgaggaatccaaggagaagtttggcaagcccaacaagaggaaagggttcagcgaggggctgtgggagatcgagaacaaccctactgtcaaggcttccggctatcagtcctcccagaaaaagagctgtgtggaagagcctgaaccagagcccgaagctgcagagggtgacggtgataagaaggggaatgcagagggcagcagcgacgaggaagggaagctggtcattgatgagccagccaaggagaagaacgagaaaggagcgttgaagaggagagcaggggacttgctggaggactctcctaaacgtcccaaggaggcagaaaaccctgaaggagaggagaaggaggcagccaccttggaggttgagaggccccttcctatggaggtggaaaagaatagcaccccctctgagcccggctctggccgggggcctccccaagaggaagaagaagaggaggatgaagaggaagaggctaccaaggaagatgctgaggccccaggcatcagagatcatgagagcctgtagccaccaatgtttcaagaggagcccccaccctgttcctgctgctgtctgggtgctactggggaaactggccatggcctgcaaactgggaacccctttcccaccccaacctgctctcctcttctactcacttttcccactccaagcccagcccatggagattgacctggatggggcaggccacctggctctcacctctaggtccccatactcctatgatctgagtcagagccatgtcttctccctggaatgagttgaggccactgtgttccttccgcttggagctattttccaggcttctgctggggcctgggacaactgctcccacctcctgacacccttctcccactctcctaggcattctggacctctgggttgggatcaggggtaggaatggaaaggatggagcatcaacagcagggtgggcttgtggggcctgggaggggcaatcctcaaatgcggggtgggggcagcacaggagggcggcctccttctgagctcctgtcccctgctacacctattatcccagctgcctagattcagggaaagtgggacagcttgtaggggaggggctcctttccataaatccttgatgattgacaacacccatttttccttttgccgaccccaagagttttgggagttgtagttaatcatcaagagaatttggggcttccaatgtcatttctcatccacataccctgacctggccccctcagtgttgtcaccagatctgatttgtaacccactgagaggacagagagaaataagtgccctctcccaccctcttcctactggtctctctatgcctctctacagtctcgtctcttttaccctggcccctctcccttgggctctgatgaaaaattgctgactgtagctttggaagtttagctctgagaaccgtagatgatttcagttctaggaaaataaaacccgttgattacta

SEQ ID NO: 320438 - DNA, 993 bp, Homo sapiens
  misc_feature (2)..(2): n is a, c, g, or t
  misc_feature (28)..(28): n is a, c, g, or t
anggctaggtacgaggctgggtggctgngattgacgagatgcctgaggctgccgtgaaatcaacagccaacaaataccaagtcttttttttcgggacccacgagacggcattcctgggccccaaagacctcttcccttacgaggaatccaaggagaagtttggcaagcccaacaagaggaaagggttcagcgaggggctgtgggagatcgagaacaaccctactgtcaaggcttccggctatcagtcctcccagaaaaagagctgtgtggaagagcctgaaccagagcccgaagctgcagagggtgacggtgataagaaggggaatgcagagggcagcagcgacgaggaagggaagctggtcattgatgagccagccaaggagaagaacgagaaaggagcgttgaagaggagagcaggggacttgctggaggactctcctaaacgtcccaaggaggcagaaaaccctgaaggagaggagaaggaggcagccaccttggaggttgagaggccccttcctatggaggtggaaaagaatagcaccccctctgagcccggctctggccgggggcctccccaagaggaagaagaagaggaggatgaagaggaagaggctaccaaggaagatgctgaggccccaggcatcagagatcatgagaggctccccttctatttggggcttgatgactttctttttgtagctggggctttgatgttccttccagtgtcatttctcatccacataccctgacctggccccctcagtgttgtcaccagatctgatttgtaacccactgagaggacagagagaaataagtgccctctcccaccctcttcctactggtctctctatgcctctctacagtctcgtctcttttaccctggcccctctcccttgggctctgatgaaaaattgctgactgtagctttggaagtttagctctgagaaccgtagatgatttcagttctaggaaaataaaacccgttgattacta

SEQ ID NO: 320439 - DNA, 463 bp, Homo sapiens
  misc_feature (2)..(2): n is a, c, g, or t
  misc_feature (28)..(28): n is a, c, g, or t
anggctaggtacgaggctgggtggctgngattgacgagatgcctgaggctgccgtgaaatcaacagccaacaaataccaagtcttttttttcgggacccacgagacggcattcctgggccccaaagacctcttcccttacgaggaatccaaggagaagtttggcaagcccaacaagaggaaagggttcagcgaggggctgtgggagatcgagaacaaccctactgtcaaggcttccggctatcagtcctcccagaaaaagagctgtgtggaagagcagaaataagtgccctctcccaccctcttcctactggtctctctatgcctctctacagtctcgtctcttttaccctggcccctctcccttgggctctgatgaaaaattgctgactgtagctttggaagtttagctctgagaaccgtagatgatttcagttctaggaaaataaaacccgttgattacta

SEQ ID NO: 320440 - DNA, 473 bp, Homo sapiens
gtactctacatggaatgcttttgtacaaggttacactgaggtagtagaaagttaaacctaaagagaaaatagaaatctggttaattgatatataaccaaggtctgtttttatttaaacactcattagtattctctcctgcctcggaaagctaagtattttagagtaaagaatgtcatgccttttgatggctaacaagaattcatagtcacaattcgaattcctaattagagtattctcatagaagaggtagaataacaggctaaaaatgccaagaccttaggaatcactgtaaggtgattctagtaatttttataaactaaacctaggcattagtttactgtcttataaagttatcttttcatcataagatagtatataaaactaagagggcttttggtagatctgggcagcctccagcataaggctaattttccctcagaatttctgccaaacggaggatgcaaaagggaag

SEQ ID NO: 320441 - DNA, 243 bp, Homo sapiens
aattctggaggctggcaaatccaaggtcaaaagcctgcatctggtgagggcctccttgtagcatcatcccatggcggaagatggagggggaagacagcgtgagagggcaagaaagcaagacacagccaaacttggttttataacaagctcacttgagataacgaatcctctcccacaatagtgacattaatccatttacgaggacagagccctcatgacctagtcacctctcaaaggtttgac

SEQ ID NO: 320442 - DNA, 390 bp, Homo sapiens
ggatccggttgcagtgagccgagattgagccatcgcactccagcctggacaagagcgaaactccatctcaaaaaaacaaaaagatatggcctgacacacaataaccattcctaaatgattcactttttttgtttgtttgagagaaaaggtttcattatgttgcctaggctggtctcaaactcccaaagtgctgagattacaggtgtaagctgccgcgtccggcccaattcatgattatatttacaggttacataagtgtgtatctgcaggtagtctatgtcaatgacacatttccaccattgtgccataaatggcaaagcagcccgcctctctggctggttccattaaactagaagctccctagggccagagcctcatctgcttgtacag

SEQ ID NO: 320443 - DNA, 940 bp, Homo sapiens
aaaataactaaaagagtgtaattggattgtttgtaacataaaggataaatgcttgagagtatggatgccccactctccgtgatgtaattattcctcattgtatgcttgtatcaaaacatctcggccaggcgtgagccattgtgcccggctgacaaggcttttttcttcacatgagtaatttttttggcttcttctcctccactctagtatttccaccctcagtaaggaatggaaacctgtcccgtctggggtgtgaagtgccctctgctttttcccccacattgtttggggttcccagcacctcagccacattgcatgctgggttttcattgtcattgttgcaaatgaaatggagtagacatgtgaaatgctaacctatctaggacctgatctatgccttcttgggaactgagaatgaagaaacagaaatagatggtggaagaactgcctaaggtgtgaaaagctgaagattctaccactgaagtactgaatatgttgtctagttgtgagactagtgtgtaaaatatatgttttctagatgatttctgagacttgtgatgacaaggaacctgacctaaccccatttttcataaagacaaagaacagcaatgttaaattgccatatgaagagaaacactagtgatgtgcgtggtctccttgcctcttgtttccttccctcttcctcactgacttccccttgcacaggggcttctgttttatcccatttattatttgtggcacctatatcaatgtggggtttgtaataggtgagaaatatttgcttggagaagctcttgtgcaattagcctggcaatgattggccggccatgtttgaatgccagtttctcttctttgctgaagtactttatgataaaagtaagcctagacataaaatctggagagaaccatgcaataaacaagtatttttgaaataaattat

SEQ ID NO: 320444 - DNA, 1082 bp, Homo sapiens
gagcctgctgggacttgaaccagcagtaagattttcacgacacagtgctgtctgcttctccgtaagaagttagaaggtaagaaagccagaaatcccgtggagaggcaaatgtaagggatgtggcaacgaccactctattcctacagggtttcatttgttctagttcatttttctgtagaaatgatgaaaattgaatatactttgcgcaagttgctttaaaaaaaggagtcttgacaagtgtagtttttcaatcctagaagaggaaaacagagtttacttaagggctgtaaaatggttttttcttcttttctatgttttgttcttaacttttagggaaatattaaattaatgctcattcgcttagcaaatgttaatatcgagagaaaaatctaaaatgtaacatagttgttctgtaataaaattttctttattattcttcccttaatttaaaaacaaaataattatgtctatattgcctaggctttataacaatgtttttgatttttgaaaatatgaatcttatttgccaaggtttttaaaaagtagatctattccaattagttataacaaaatttgcaccatcagagacaatatcgttactgttcagggtaagtacacggaactgctgcttggtatctgcatcttctatacctgttatttaagtcctttgaattagagtcaatttgcggcatcatttcttcagtaacacaatgtttctttcctaaacatagaattttacttaaaatccatgaggatttagtcttgaaaatcaacattcagttggggaacagaaacttcgtgctctgcaaccactaggttgtagctcagtatgggtatgtggaacagacaggaagagactctgattagcttgtcatttaatggtcaagaactttatttataaagactatactttcagggatcatttctatagtttgttactagagaaatttctctggacatctagagcacacacaaaaaagaaaaaaggaacttcattcttatgttcaggtcaacggtcttttatatacatacactttcccttggtagagttcagtgattgacaagtattaggattatataac

SEQ ID NO: 320445 - DNA, 337 bp, Homo sapiens
gagcctgctgggacttgaaccagcagtaagattttcacgacacagtgctgtctgcttctccgtaagaagttagaagccctagaaaacaatctcctggtccaaggtgcttgagtgggccgatccagctatatcaagaacctttgagaacaaaattctcaagcatttctgaggggagtcgaataggtgaaaaccttggctggcctgaccttatcatggaacctgacgactttgattctgaagacaaagagatattaagctgggatattaatgatgtgaaactgccacagacagagtctcgctctgctgcccaggctggagtgcagtagcactatctcgg

SEQ ID NO: 320446 - DNA, 532 bp, Homo sapiens
agcctggctgggcaacagagcgagactccatctcaaaaaaaaaaaaaaaagaataaataaaaagcaattaggatatcagatttgtgtttgagtgtgaaacatcttaaacacactcatgtctctactgaatgtagggaaatttggctcttactggttagcaagctttaacatggaaacagaggcagcctttgcttttttcaagtgtttcgtggttgtggtcaagccgctgcatgtgtttgtgcgtcaagtattaatgtgtaaggaatgaggaaaatctgatggagctcttatttgtacagagtaactcatgggtgcctatggcagtggttttgatttgcttaacttattaacacgagcatttcactttcctttccagtctcttccaggtgaaacacaaagtcaggggagtttacctttaacttggtctttccaggaaggcgtccaattgcctggtagttacagtggacatttaatagctaacactcctcagcagaactcactaaatgattgcttttccttctccaagagttat

SEQ ID NO: 320447 - DNA, 2770 bp, Homo sapiens
gagcctgctgggacttgaaccagcagtaagattttcacgacacagtgctgtctgcttctccgtaagaagttagaagccctagaaaacaatctcctggtccaaggtgcttgagtgggccgatccagctatatcaagaacctttgagaacaaaattctcaagcatttctgaggggagtcgaataggtgaaaaccttggctggcctgaccttatcatggaacctgacgactttgattctgaagacaaagagatattaagctgggatattaatgatgtgaaactgccacagaacgtgaaaaaaaccgactggttccaggagtggccagattcctatgccaaacacatctacagctcggaggacaagaatgcgcagcggcacctgagcagctgggccatgcgcaataccaacaaccacaactcccgcatcctcaagaagtcctgcctgggtgtggtggtgtgcggccgcgactgtctcgcagaggaggggcgcaagatctacctgagacctgccatctgtgacaaggcccggcagaagcagcagcggaaacgctgtcccaactgtgacgggcctctgaagctcatcccttgccgaggtcatgggggcttcccggtcaccaacttctggaggcacgacggacgctttatatttttccagtcaaagggagagcatgatcatccaaaaccagaaaccaagttagaagctgaggcaagaagagccatgaagaaagtgaacacagcaccttcctccgtctcattgagcctgaaggggagcacagagaccaggtctcttccaggtgaaacacaaagtcaggggagtttacctttaacttggtctttccaggaaggcgtccaattgcctggtagttacagtggacatttaatagctaacactcctcagcagaactcactaaatgattgcttttccttctccaagagttatggtctgggaggaatcacagatctgactgaccagacttccactgtggaccccatgaagctctatgaaaagcgcaaattgtccagtagcagaacctacagtagtggagacctgcttcctccttctgcctccggagtctactctgatcatggcgatctacaagcgtggagtaaaaatgctgctttggggagaaatcatcttgctgacaactgttattccaattatccttttcctctgaccagctggccttgcagcttctctccttcccaaaactcttcagaacccttttaccagcagcttccattggagccacctgcagccaaaactggctgtcccccattatggccaaatccagcgggtaatctttatgaagagaaagtacatgtggattttaacagctacgtccagtctcctgcataccattcacctcaagaagacccctttctcttcacctacgcctctcatcctcatcagcaatattcactgccaagcaagagcagcaaatgggattttgaggaagaaatgacatacttgggtttggatcactgcaacaatgatatgcttctgaacctgtgtcctttgagatgacccaaatctttcactatgtgcaccccagcccctcaaaaatggggaagggctgaaagaatttccttaggaaataatttttaaaacataaccacagataaatgagaatcatgataagcagtagacaaggcttttttctttttcttttttccttctttttttttttttttttttttttgagacagagtcttgctcttttgcccaggcaggaatgcagtggcgccatctcggctcactgcaacctctgcctcccgggtttgagtgattctcctgcgtcagcctcccgagtagctgggattacaggcacctgccactgcgcctggctaatttttctatttttagtagagacagggttttgccatgttggtcaggctgctctcaaactcctgatctcaagtgatctgcccacctcaccatcccaaagtgctgggattacaggcgtgagccattgtgcccggctgacaaggcttttttcttcacatgagtaatttttttggcttcttctcctccactctagtatttccaccctcagtaaggaatggaaacctgtcccgtctggggtgtgaagtgccctctgctttttcccccacattgtttggggttcccagcacctcagccacattgcatgctgggttttcattgtcattgttgcaaatgaaatggagtagacatgtgaaatgctaacctatctaggacctgatctatgccttcttgggaactgagaatgaagaaacagaaatagatggtggaagaactgcctaaggtgtgaaaagctgaagattctaccactgaagtactgaatatgttgtctagttgtgagactagtgtgtaaaatatatgttttctagatgatttctgagacttgtgatgacaaggaacctgacctaaccccatttttcataaagacaaagaacagcaatgttaaattgccatatgaagagaaacactagtgatgtgcgtggtctccttgcctcttgtttccttccctcttcctcactgacttccccttgcacaggggcttctgttttatcccatttattatttgtggcacctatatcaatgtggggtttgtaataggtgagaaatatttgcttggagaagctcttgtgcaattagcctggcaatgattggccggccatgtttgaatgccagtttctcttctttgctgaagtactttatgataaaagtaagcctagacataaaatctggagagaaccatgcaataaacaagtatttttgaaataaattat

SEQ ID NO: 320448 - DNA, 1122 bp, Homo sapiens
tagcctggaggctgcagtccgcgcggccggggagggacgagagggcctgacgtacagattataagcgccatggctatggctagtgttaaattgcttgccggtgttttaagaaagccagatgcctggattggactctggggtgttctccgagggacaccttcatcatacaaactctgtacttcctggaatcgatacttgtatttttctagtaccaagttacgtgcaccaaattataaaacacttttttataatattttctcactgagactcccagggcttttactatctccagaatgtatttttcctttttccgtaagactcaaaagtaatataaggtctacaaaatctactaaaaagtctctgcaaaaagtagatgaagaggactctgatgaagaaagccatcatgatgagatgagtgagcaggaagaggagcttgaggatgatcctactgtagtcaaaaactataaagacctggaaaaagcagttcagtcttttcggtatgatgttgtcctgaagacggggctagatattgggagaaacaaagtggaagatgctttctacaaaggtgaactcaggctgaatgaggaaaaattatggaagaaaagcagaacggtgaaagtgggagatacattggatcttctcattggagaggataaagaagcaggaacagagacagttatgcggattctcttgaaaaaagtgtttgaagagaagactgaaagtgaaaaatacagagtggtgttacggcggtggaaaagtttaaagttgcctaagaagagaatgtctaaataaatggattgctttttagcaatagagctgctttctagtggtaaaggaaggggtcacctgaaaaataggacatttttattaaaataaagttctcttagcgtttgtggaatctgccgagccattttgtggaaattgggatccatatctggagacacttcccaaggcctgcctcacctccaccccctgcccaccttgatccatgctcctttgacctcctcgtgtgagaacccctttgccagagtgagacgtgtgcagaatgaactaagccccagagggttttaatggcttgcctgctgtttcccacataaactacctcaggagtcactgtaaaat

SEQ ID NO: 320449 - DNA, 932 bp, Homo sapiens
tagcctggaggctgcagtccgcgcggccggggagggacgagagggcctgacgtacagattataagcgccatggctatggctagtgttaaattgcttgccggtgttttaagaaagccagatgcctggattggactctggggtgttctccgagggacaccttcatcatacaaactctgtacttcctggaatcgatacttgtatttttctagtaccaagttacgtgcaccaaattataaaacacttttttataatattttctcactgagactcccagggcttttactatctccagaatgtatttttcctttttccgtaagactcaaaagtaatataaggtctacaaaatctactaaaaagtctctgcaaaaagtagatgaagaggactctgatgaagaaagccatcatgatgagatgagtgagcaggaagaggagcttgaggatgatcctactgtagtcaaaaactataaagacctggaaaaagcagttcagtcttttcggtatgatgttgtcctgaagacggggctagatattgggagaaacaaagtggaagatgctttctacaaaggtgaactcaggctgaatgaggaaaaattatggaagaaaagcagaacggtgaaagtgggagatacattggatcttctcattggagaggataaagaagcaggaacagagacagttatgcggattctcttgaaaaaagtgtttgaagagaagactgaaagtgaaaaatacagagtggtgttacggcggtggaaaagtttaaagttgcctaagaagagaatgtctaaataaatggattgctttttagcaatagagctgctttctagtggtaaaggaaggggtcacctgaaaaataggacatttttattaaaataaagcacgatcggccggccccataacatcaaaattacaaatcaaaaaaataaagtttg

SEQ ID NO: 320450 - DNA, 1420 bp, Homo sapiens
ggcgcacaccgccccccgccccccgcccctggccaccaagcgcctccgtggacacgcacttcctgcgagggctccgtgcgcaccttggccgagccgaaccgagccgagtcctgtccttccaggccgttcgcaatggtggatgagttggtgctgctgctgcacgcgctcctgatgcggcaccgcgccctgagcatcgagaacagccagctcatggaacagctgcggctgctggtgtgcgagagggccagcctgctgcgccaggtacgtccgccgagctgcccggtgcccttccccgaaacgtttaatggcgagagctcccggctccccgagtttatcgtgcagacggcgtcttacatgctcgtgaacgagaaccgattctgcaacgacgccatgaaggtggcattcctaatcagcctcctcaccggggaagccgaggagtgggtggtgccctacatcgagatggatagccccatcctaggtgattaccgggccttcctcgatgagatgaaacagtgctttggctgggatgacgacgaagacgacgacgacgaagaagaggaggatgattattaggccctcgaccctcgggcctcgggggggagggccctgcacgccgccaccccctccccgcagccctcaccccgccaggagccactgctctcccccttgccctccggtccccttacctacccgcgcccgtctgctctctctcttcatttctccgtagtgcttgtctttgttccaggaatagcgctccagttacctgctgctggggtcggggctggagcctcactcactcggaagtgcttggaagtgtcatctaccctggccatccccgggatccctcccctgctaatctgaactgtgtcctgaaccccagctattggccaggcccctgttacaaactgcgcagaccacccatagccctgctgctgccacctgccctgctgccaggcttacatcttcccagagaactatgctgccacttcacatccactcaccacatcccacctacagactaccacctttcgagatcaggaccaacctggaaaatgccagagttggctatgccttttcagacattgatttggacagctcaccaacccctgaaggggccgttcagcctggttagttttctacctactccgagtgtcctcccctgccccaccagattgctgcaggggcgcggtgtgcctggcagccaaattgttgacacttcttttttcctatgcactggttttacacagctgtcatttttctttcaaaattgcagcagtcccacagatgtgtgcatttggacaaatagtacttaaaaacaaaacaaacaagcactcagcccagctcctcaatactacctggaaaaagcattggcattattttcaataaatatcaagcactaaaaaaagaaatgattgtcttt

SEQ ID NO: 320451 - DNA, 239 bp, Homo sapiens
  misc_feature (16)..(16): n is a, c, g, or t
  misc_feature (22)..(22): n is a, c, g, or t
  misc_feature (24)..(24): n is a, c, g, or t
gtgtaaggtgatctanaggatntnaccgactagccgacaggcggggaggtgtcatctaccctggccatccccgggatccctcccctgctaatctgaactgtgtcctgaaccccagctattggccaggcccctgttacaaactgcgcagaccacccatagccctgcaaggcctctgcactcaatgcctgtcgggctagtcggggctgtcgggctagtcggggctgtcgggctagtcgggg

SEQ ID NO: 320452 - DNA, 1536 bp, Homo sapiens
ggcgcacaccgccccccgccccccgcccctggccaccaagcgcctccgtggacacgcacttcctgcgagggctccgtgcgcaccttggccgagccgaaccgagccgagtcctgtccttccaggccgttcgcaatggtggatgagttggtgctgctgctgcacgcgctcctgatgcggcaccgcgccctgagcatcgagaacagccagctcatggaacagctgcggctgctggtgtgcgagagggccagcctgctgcgccaggtacgtccgccgagctgcccggtgcccttccccgaaacgtttaatggcgagagctcccggctccccgagtttatcgtgcagacggcgtcttacatgctcgtgaacgagaaccgattctgcaacgacgccatgaaggtggcattcctaatcagcctcctcaccggggaagccgaggagtgggtggtgccctacatcgagatggatagccccatcctaggtgattaccgggccttcctcgatgagatgaaacagtgctttggctgggatgacgacgaagacgacgacgacgaagaagaggaggatgattattaggccctcgaccctcgggcctcgggggggagggccctgcacgccgccaccccctccccgcagccctcaccccgccaggagccactgctctcccccttgccctccggtccccttacctacccgcgcccgtctgctctctctcttcatttctccgtagtgcttgtctttgttccaggaatagcgctccagttacctgctgctggggtcggggctggagcctcactcactcggaagtgcttggaagtgtcatctaccctggccatccccgggatccctcccctgctaatctgaactgtgtcctgaaccccagctattggccaggcccctgttacaaactgcgcagaccacccatagccctgctgctgccacctgccctgctgccaggcttacatcttcccagagaactatgctgccacttcacatccactcaccacatcccacctacagactaccacctttcgagatcaggaccaacctggaaaatgccagagttggctatgccttttcagacattgatttggacagctcaccaacccctgaaggggccgttcagcctggttagttttctacctactccgagtgtcctcccctgccccaccagattgctgcaggggcgcggtgtgcctggcagccaaattgttgacacttcttttttcctatgcactggttttacacagctgtcatttttctttcaaaattgcagcagtcccacagatgtgtgcatttggacaaatagtacttaaaaacaaaacaaacaagcactcagcccagctcctcaatactctgtatgggggatctcgcgagatcccccatacagagtagctacctaagaacagctaaaagagcacacccgtctatgtagcaaaatagtgggaagattatataggtagaggcgacacacctaccgccacaaaagccagtccaacttactagcagacaaccttagacaagacatttagccaaata

SEQ ID NO: 320453 - DNA, 332 bp, Homo sapiens
accgataccacagttcacagtgagataaagcagtagtagagaggtcttcgtagcacagagagtgagagaaacctccagtctagccagggcttcgagttcacagcccttgaaggactgcgtctgctaacaggttgtcacgttattctttcctgaagcaattggaattctgttcagtcattcaacaaacattgattggctgggttcggtggcttatgcctgtaatcccagtgctttgagaggccgaggagggaggattgcttgaagccaggaatttgagaccagcctgggcagcatagtgataactcatctctagaaaaaatataaataaataa

SEQ ID NO: 320454 - DNA, 764 bp, Homo sapiens
agagtctcgctctgtcgcccagcctggagtgcagtggcgcgatctcggctcactgcaagcttgggaggagtagtttcttaaccgctttcggccattggtcgcagggctaccggcctacagtcccagcaagcgccgggctcgggggtggtgcgcagcctcagagggaggagctgggccgtgtggacctctctgcttccaaacctacgctggcccctcagtctgtgccaccctggctaaggggattgagtccggagagggacttgaggggtaggtcggtgctgggcagtgaggagggtgtgatgctgcgaagtgcatctcgcctttgcccaaatcggacgggtctcagcctcactccatctcccgctgctcagctcggtttccctcaaaagcgtcgcgcctcctccagcccagggagccgcctgctctcctaagctgctgtggaactggcctgaggtcccagacgctgtccattgtgctgctgccctctacaccctccagccagagcgccagttcacccgcttttgggagaactctgccgcctgacctgtccgcggataaggtcacaactttgcaggggggtgacatgggctgtggcttcctggaaatgtcaccctcaccagcaacttttacatagttgtgaattatgaaacatgagggagggtaattattggtttacccaggcgatgttaagagcagaggagaaaaccctaatttccaggcatgtgtcctgagccagggacaggttagccagaccctgctccccc

SEQ ID NO: 320455 - DNA, 2251 bp, Homo sapiens
  misc_feature (479)..(480): n is a, c, g, or t
  misc_feature (494)..(494): n is a, c, g, or t
  misc_feature (549)..(549): n is a, c, g, or t
  misc_feature (566)..(566): n is a, c, g, or t
  misc_feature (571)..(571): n is a, c, g, or t
  misc_feature (993)..(993): n is a, c, g, or t
  misc_feature (1049)..(1049): n is a, c, g, or t
ggaatttgcattttcaccagcgttctcgggtcagagggtttgcctggcaccgcgtactgggaaactcgccaaaagcggtgcaggttggagacgccccaggccgcggtggagttgcgcgcggcttctaaagtggagtggagcaggcctgcaccctccccgccggggctgggacggcgcttccaggcggagaaagacctccgcgggccgcgcgcggccttccccctgcgaggatcgccattggcccgggttggctttggaaagcggcggtggctttgggccgggctcggcctcgggaacgccaggggcccctgggtgcggacgggcgcggccaggagggggttaaggcgcaggcggcggcggggcgggggcgggcctggcgggcgccctctccgggccctttgttaacaggcgcgtcccggccaggcggagacgcggccgccctgggcgggcgcgggcggcgggcggcggtgagggcggcnngcggggcggcgccngggggccgggccgagccgggcctgagccgggcccggaccgagctgggagaggggntccggcccgacgtgctnggcgnaaaatgttggagatctgcctgaagctggtgggctgcaaatccaagaaggggctgtcctcgtcctccagctgttatctggaagaagcccttcagcggccagtagcatctgactttgagcctcagggtctgagtgaagccgctcgttggaactccaaggaaaaccttctcgctggacccagtgaaaatgaccccaaccttttcgttgcactgtatgattttgtggccagtggagataacactctaagcataactaaaggtgaaaagctccgggtcttaggctataatcacaatggggaatggtgtgaagcccaaaccaaaaatggccaaggctgggtcccaagcaactacatcacgccagtcaacagtctggagaaacactcctggtaccatgggcctgtgtcccgcaatgccgctgagtatcngctgagcagcgggatcaatggcagcttcttggtgcgtgagagtgagagcagtcctngccagaggtccatctcgctgagatacgaagggagggtgtaccattacaggatcaacactgcttctgatggcaagctctacgtctcctccgagagccgcttcaacaccctggccgagttggttcatcatcattcaacggtggccgacgggctcatcaccacgctccattatccagccccaaagcgcaacaagcccactgtctatggtgtgtcccccaactacgacaagtgggagatggaacgcacggacatcaccatgaagcacaagctgggcgggggccagtacggggaggtgtacgagggcgtgtggaagaaatacagccctggcaggggaccagccgtcttccaccgccttcatccctctcatatcaacccgagtgtctcttcggaaaacccgccagcctccagagcggatcgccagcggcgccatcaccaagggcgtggtcctggacagcaccgaggcgctgtgcctcgccatctctaggaactccgagcagatggccagccacagcgcagtgctggaggccggcaaaaacctctacacgttctgcgtgagctatgtggattccatccagcaaatgaggaacaagtttgccttccgagaggccatcaacaaactggagaataatctccgggagcttcagatctgcccggcgacagcaggcagtggtccggcggccactcaggacttcagcaagctcctcagttcggtgaaggaaatcagtgacatagtgcagaggtagcagcagtcaggggtcaggtgtcaggcccgtcggagctgcctgcagcacatgcgggctcgcccatacccgtgacagtggctgacaagggactagtgagtcagcaccttggcccaggagctctgcgccaggcagaagctgagggccctgtggagtccagctctactacctacgtttgcaccgcctgccctcccgcaccttcctcctccccgctccgtctctgtcctcgaattttatctgtggagttcctgctccgtggactgcagtcggcatgccaggacccgccagccccgctcccacctagtgccccagactgagctctccaggccaggtgggaacggctgatgtggactgtctttttcatttttttctctctggagcccctcctcccccggctgggcctccttcttccacttctccaagaatggaagcctgaactgaggccttgtgtgtcaggccctctg

SEQ ID NO: 320456 - DNA, 4427 bp, Homo sapiens
  misc_feature (479)..(480): n is a, c, g, or t
  misc_feature (494)..(494): n is a, c, g, or t
  misc_feature (549)..(549): n is a, c, g, or t
  misc_feature (566)..(566): n is a, c, g, or t
  misc_feature (571)..(571): n is a, c, g, or t
  misc_feature (993)..(993): n is a, c, g, or t
  misc_feature (1049)..(1049): n is a, c, g, or t
  misc_feature (1468)..(1468): n is a, c, g, or t
  misc_feature (1636)..(1636): n is a, c, g, or t
  misc_feature (1908)..(1909): n is a, c, g, or t
  misc_feature (1949)..(1949): n is a, c, g, or t
  misc_feature (2133)..(2133): n is a, c, g, or t
  misc_feature (2730)..(2730): n is a, c, g, or t
  misc_feature (3160)..(3160): n is a, c, g, or t
  misc_feature (3254)..(3254): n is a, c, g, or t
ggaatttgcattttcaccagcgttctcgggtcagagggtttgcctggcaccgcgtactgggaaactcgccaaaagcggtgcaggttggagacgccccaggccgcggtggagttgcgcgcggcttctaaagtggagtggagcaggcctgcaccctccccgccggggctgggacggcgcttccaggcggagaaagacctccgcgggccgcgcgcggccttccccctgcgaggatcgccattggcccgggttggctttggaaagcggcggtggctttgggccgggctcggcctcgggaacgccaggggcccctgggtgcggacgggcgcggccaggagggggttaaggcgcaggcggcggcggggcgggggcgggcctggcgggcgccctctccgggccctttgttaacaggcgcgtcccggccaggcggagacgcggccgccctgggcgggcgcgggcggcgggcggcggtgagggcggcnngcggggcggcgccngggggccgggccgagccgggcctgagccgggcccggaccgagctgggagaggggntccggcccgacgtgctnggcgnaaaatgttggagatctgcctgaagctggtgggctgcaaatccaagaaggggctgtcctcgtcctccagctgttatctggaagaagcccttcagcggccagtagcatctgactttgagcctcagggtctgagtgaagccgctcgttggaactccaaggaaaaccttctcgctggacccagtgaaaatgaccccaaccttttcgttgcactgtatgattttgtggccagtggagataacactctaagcataactaaaggtgaaaagctccgggtcttaggctataatcacaatggggaatggtgtgaagcccaaaccaaaaatggccaaggctgggtcccaagcaactacatcacgccagtcaacagtctggagaaacactcctggtaccatgggcctgtgtcccgcaatgccgctgagtatcngctgagcagcgggatcaatggcagcttcttggtgcgtgagagtgagagcagtcctngccagaggtccatctcgctgagatacgaagggagggtgtaccattacaggatcaacactgcttctgatggcaagctctacgtctcctccgagagccgcttcaacaccctggccgagttggttcatcatcattcaacggtggccgacgggctcatcaccacgctccattatccagccccaaagcgcaacaagcccactgtctatggtgtgtcccccaactacgacaagtgggagatggaacgcacggacatcaccatgaagcacaagctgggcgggggccagtacggggaggtgtacgagggcgtgtggaagaaatacagcctgacggtggccgtgaagaccttgaaggaggacaccatggaggtggaagagttcttgaaagaagctgcagtcatgaaagagatcaaacaccctaacctngtgcagctccttggggtctgcacccgggagcccccgttctatatcatcactgagttcatgacctacgggaacctcctggactacctgagggagtgcaaccggcaggaggtgaacgccgtggtgctgctgtacatggccactcagatctcgtcagccatggagtacctngagaagaaaaacttcatccacagagatcttgctgcccgaaactgcctggtaggggagaaccacttggtgaaggtagctgattttggcctgagcaggttgatgacaggggacacctacacagcccatgctggagccaagttccccatcaaatggactgcacccgagagcctggcctacaacaagttctccatcaagtccgacgtctgggcatttggagtattgctttgggaaattgctacctatggcatgtccccttacccgggaattgaccnntcccaggtgtatgagctgctagagaaggactaccgcatgnagcgcccagaaggctgcccagagaaggtctatgaactcatgcgagcatgttggcagtggaatccctctgaccggccctcctttgctgaaatccaccaagcctttgaaacaatgttccaggaatccagtatctcagacgaagtggaaaaggagctggggaaacaaggcgtccgtggggctgtgantaccttgctgcaggccccagagctgcccaccaagacgaggacctccaggagagctgcagagcacagagacaccactgacgtgcctgagatgcctcactccaagggccagggagagagcgatcctctggaccatgagcctgccgtgtctccattgctccctcgaaaagagcgaggtcccccggagggcggcctgaatgaagatgagcgccttctccccaaagacaaaaagaccaacttgttcagcgccttgatcaagaagaagaagaagacagccccaacccctcccaaacgcagcagctccttccgggagatggacggccagccggagcgcagaggggccggcgaggaagagggccgagacatcagcaacggggcactggctttcacccccttggacacagctgacccagccaagtccccaaagcccagcaatggggctggggtccccaatggagccctccgggagtccgggggctcaggcttccggtctccccacctgtggaagaagtccagcacgctgaccagcagccgcctagccaccggcgaggaggagggcggtggcagctccagcaagcgcttcctgcgctcttgctccgnctcctgcgttccccatggggccaaggacacggagtggaggtcagtcacgctgcctcgggacttgcagtccacgggaagacagtttgactcgtccacatttggagggcacaaaagtgagaagccggctctgcctcggaagagggcaggggagaacaggtctgaccaggtgacccgaggcacagtaacgcctccccccaggctggtgaaaaagaatgaggaagctgctgatgaggtcttcaaagacatcatggagtccagcccgggctccagcccgcccaacctgactccaaaacccctccggcggcaggtcaccgtggcccctgcctcgggcctcccccacaaggaagaagctggaaaggcagtgccttagggacccctgctgcagctgagccagtgacccccaccagcaaagcaggctcaggtgcaccanggggcaccagcaagggccccgccgaggagtccagagtgaggaggcacaagcactcctctgagtcgccagggagggacaaggggaaattgtccangctcaaacctgccccgccgcccccaccagcagcctctgcagggaaggctggaggaaagccctcgcagagcccgagccaggaggcggccggggaggcagtcctgggcgcaaagacaaaagccacgagtctggttgatgctgtgaacagtgacgctgccaagcccagccagccgggagagggcctcaaaaagcccgtgctcccggccactccaaagccacagtccgccaagccgtcggggacccccatcagcccagcccctgttccctccacgttgccatcagcatcctcggccctggcaggggaccagccgtcttccaccgccttcatccctctcatatcaacccgagtgtctcttcggaaaacccgccagcctccagagcggatcgccagcggcgccatcaccaagggcgtggtcctggacagcaccgaggcgctgtgcctcgccatctctaggaactccgagcagatggccagccacagcgcagtgctggaggccggcaaaaacctctacacgttctgcgtgagctatgtggattccatccagcaaatgaggaacaagtttgccttccgagaggccatcaacaaactggagaataatctccgggagcttcagatctgcccggcgacagcaggcagtggtccggcggccactcaggacttcagcaagctcctcagttcggtgaaggaaatcagtgacatagtgcagaggtagcagcagtcaggggtcaggtgtcaggcccgtcggagctgcctgcagcacatgcgggctcgcccatacccgtgacagtggctgacaagggactagtgagtcagcaccttggcccaggagctctgcgccaggcagaagctgagggccctgtggagtccagctctactacctacgtttgcaccgcctgccctcccgcaccttcctcctccccgctccgtctctgtcctcgaattttatctgtggagttcctgctccgtggactgcagtcggcatgccaggacccgccagccccgctcccacctagtgccccagactgagctctccaggccaggtgggaacggctgatgtggactgtctttttcatttttttctctctggagcccctcctcccccggctgggcctccttcttccacttctccaagaatggaagcctgaactgaggccttgtgtgtcaggccctctg

SEQ ID NO: 320457 - DNA, 4142 bp, Homo sapiens
  misc_feature (479)..(480): n is a, c, g, or t
  misc_feature (494)..(494): n is a, c, g, or t
  misc_feature (549)..(549): n is a, c, g, or t
  misc_feature (566)..(566): n is a, c, g, or t
  misc_feature (571)..(571): n is a, c, g, or t
  misc_feature (993)..(993): n is a, c, g, or t
  misc_feature (1049)..(1049): n is a, c, g, or t
  misc_feature (1468)..(1468): n is a, c, g, or t
  misc_feature (1636)..(1636): n is a, c, g, or t
  misc_feature (1908)..(1909): n is a, c, g, or t
  misc_feature (1949)..(1949): n is a, c, g, or t
  misc_feature (2133)..(2133): n is a, c, g, or t
  misc_feature (2730)..(2730): n is a, c, g, or t
  misc_feature (3160)..(3160): n is a, c, g, or t
  misc_feature (3254)..(3254): n is a, c, g, or t
ggaatttgcattttcaccagcgttctcgggtcagagggtttgcctggcaccgcgtactgggaaactcgccaaaagcggtgcaggttggagacgccccaggccgcggtggagttgcgcgcggcttctaaagtggagtggagcaggcctgcaccctccccgccggggctgggacggcgcttccaggcggagaaagacctccgcgggccgcgcgcggccttccccctgcgaggatcgccattggcccgggttggctttggaaagcggcggtggctttgggccgggctcggcctcgggaacgccaggggcccctgggtgcggacgggcgcggccaggagggggttaaggcgcaggcggcggcggggcgggggcgggcctggcgggcgccctctccgggccctttgttaacaggcgcgtcccggccaggcggagacgcggccgccctgggcgggcgcgggcggcgggcggcggtgagggcggcnngcggggcggcgccngggggccgggccgagccgggcctgagccgggcccggaccgagctgggagaggggntccggcccgacgtgctnggcgnaaaatgttggagatctgcctgaagctggtgggctgcaaatccaagaaggggctgtcctcgtcctccagctgttatctggaagaagcccttcagcggccagtagcatctgactttgagcctcagggtctgagtgaagccgctcgttggaactccaaggaaaaccttctcgctggacccagtgaaaatgaccccaaccttttcgttgcactgtatgattttgtggccagtggagataacactctaagcataactaaaggtgaaaagctccgggtcttaggctataatcacaatggggaatggtgtgaagcccaaaccaaaaatggccaaggctgggtcccaagcaactacatcacgccagtcaacagtctggagaaacactcctggtaccatgggcctgtgtcccgcaatgccgctgagtatcngctgagcagcgggatcaatggcagcttcttggtgcgtgagagtgagagcagtcctngccagaggtccatctcgctgagatacgaagggagggtgtaccattacaggatcaacactgcttctgatggcaagctctacgtctcctccgagagccgcttcaacaccctggccgagttggttcatcatcattcaacggtggccgacgggctcatcaccacgctccattatccagccccaaagcgcaacaagcccactgtctatggtgtgtcccccaactacgacaagtgggagatggaacgcacggacatcaccatgaagcacaagctgggcgggggccagtacggggaggtgtacgagggcgtgtggaagaaatacagcctgacggtggccgtgaagaccttgaaggaggacaccatggaggtggaagagttcttgaaagaagctgcagtcatgaaagagatcaaacaccctaacctngtgcagctccttggggtctgcacccgggagcccccgttctatatcatcactgagttcatgacctacgggaacctcctggactacctgagggagtgcaaccggcaggaggtgaacgccgtggtgctgctgtacatggccactcagatctcgtcagccatggagtacctngagaagaaaaacttcatccacagagatcttgctgcccgaaactgcctggtaggggagaaccacttggtgaaggtagctgattttggcctgagcaggttgatgacaggggacacctacacagcccatgctggagccaagttccccatcaaatggactgcacccgagagcctggcctacaacaagttctccatcaagtccgacgtctgggcatttggagtattgctttgggaaattgctacctatggcatgtccccttacccgggaattgaccnntcccaggtgtatgagctgctagagaaggactaccgcatgnagcgcccagaaggctgcccagagaaggtctatgaactcatgcgagcatgttggcagtggaatccctctgaccggccctcctttgctgaaatccaccaagcctttgaaacaatgttccaggaatccagtatctcagacgaagtggaaaaggagctggggaaacaaggcgtccgtggggctgtgantaccttgctgcaggccccagagctgcccaccaagacgaggacctccaggagagctgcagagcacagagacaccactgacgtgcctgagatgcctcactccaagggccagggagagagcgatcctctggaccatgagcctgccgtgtctccattgctccctcgaaaagagcgaggtcccccggagggcggcctgaatgaagatgagcgccttctccccaaagacaaaaagaccaacttgttcagcgccttgatcaagaagaagaagaagacagccccaacccctcccaaacgcagcagctccttccgggagatggacggccagccggagcgcagaggggccggcgaggaagagggccgagacatcagcaacggggcactggctttcacccccttggacacagctgacccagccaagtccccaaagcccagcaatggggctggggtccccaatggagccctccgggagtccgggggctcaggcttccggtctccccacctgtggaagaagtccagcacgctgaccagcagccgcctagccaccggcgaggaggagggcggtggcagctccagcaagcgcttcctgcgctcttgctccgnctcctgcgttccccatggggccaaggacacggagtggaggtcagtcacgctgcctcgggacttgcagtccacgggaagacagtttgactcgtccacatttggagggcacaaaagtgagaagccggctctgcctcggaagagggcaggggagaacaggtctgaccaggtgacccgaggcacagtaacgcctccccccaggctggtgaaaaagaatgaggaagctgctgatgaggtcttcaaagacatcatggagtccagcccgggctccagcccgcccaacctgactccaaaacccctccggcggcaggtcaccgtggcccctgcctcgggcctcccccacaaggaagaagctggaaaggcagtgccttagggacccctgctgcagctgagccagtgacccccaccagcaaagcaggctcaggtgcaccanggggcaccagcaagggccccgccgaggagtccagagtgaggaggcacaagcactcctctgagtcgccagggagggacaaggggaaattgtccangctcaaacctgccccgccgcccccaccagcagcctctgcagggaaggctggaggaaagccctcgcagagcccgagccaggaggcggccggggaggcagtcctgggcgcaaagacaaaagccacgagtctggttgatgctgtgaacagtgacgctgccaagcccagccagccgggagagggcctcaaaaagcccgtgctcccggccactccaaagccacagtccgccaagccgtcggggacccccatcagcccagcccctgttccctccacgttgccatcagcatcctcggccctggcaggggaccagccgtcttccaccgccttcatccctctcatatcaacccgagtgtctcttcggaaaacccgccagcctccagagcggatcgccagcggcgccatcaccaagggcgtggtcctggacagcaccgaggcgctgtgcctcgccatctctaggaactccgagcagatggccagccacagcgcagtgctggaggccggcaaaaacctctacacgttctgcgtgagctatgtggattccatccagcaaatgaggaacaagtttgccttccgagaggccatcaacaaactggagaataatctccgggagcttcagatctgcccggcgacagcaggcagtggtccggcggccactcaggacttcagcaagctcctcagttcggtgaagcattctgggcggcatgcagagtggctgaggagatgacatttttccccaaagaggagagagttttctcagataaaggctgcaaaacggtgttcaccaagttagattattactacgatgattgacagtcatgattggcagccggagtcactgcctggagttggaaaagaacaacactcagtccttccacacttccacccccgtct

SEQ ID NO: 320458 - DNA, 420 bp, Homo sapiens
ccctcgggggagaagggtgtggactccaggagcaactgagccttttctgatcagccatggccaagaacaagcattgggaaacttgttccacagctgggtgagaggggtctgcatttggagggggtgctgggaggaaaggtggccacaaggtggctggccagggttagagctgaacttcaggaagacaagccatggttgtgacacctggggtgggaccaggggtcctgcagcagcatttccaaagggggcgcaggtgacctgagatccaaagatcgagtagggattgggcaggtgaaggggagaaacctggaaggaagagagggcgagtaccctgtggagtagagaaagcctgggctggcggggagcgggagaggacaggtaaggccagccacgtgggctgcaggctgctaagggaagcca

SEQ ID NO: 320459 - DNA, 304 bp, Homo sapiens
atgatgtttcctttcctgcccaatttatctggttaaaacgtctgatacactgttgaatagaagaggcaagggcacatgttcatgtcttgttcctgatattgggagaaagcatcccgtttttcaccactctggccaggacagcctatctgtgcaggaggcattgctggcaccccgtggggactgaggaccaaggaggagctgctcccccacacacgaaacggggtttcaccatgttagccaagatggtctcgatctcctgacctcgcgatccgcccgccttggcctcccagagtgctgggattat

SEQ ID NO: 320460 - DNA, 616 bp, Homo sapiens
atgtatcaatagttcattcctttttattgctgagtcatattccacgatatggacataacacaatttgtttatccattcacctgttgaagcacattaatttcctgtttggggctactacaaataaagctgctatgaacatccgtgtacagttctatgcatgaacataatacttcatttctctgaataaatgtccaagcgtgcatttattggacaatacaataagtgcaggtttaattttaatagaaactgccaactgttttccagactgtgccattttatattaccatgaacagtgcctcagtgatccagtttctctacatccttgtcaacaattggtgttattactattttcattttcaccatacttgatagggtgtagtgatatctcattatagctttgaattatatttccaggaaagctagatgttgcatatcttttcatgtacttagttgtcatctgcataccccttctgtaaaatgtctattcatatatttggttcattttctacttaaactgggtttttttaactgttgaattttaatatattctagatacaagtacttcatcacatatgcagtttgcaattatttgcttacagtgttttcattctcttaa

SEQ ID NO: 320461 - DNA, 578 bp, Homo sapiens
tattcggcacgggaggcggggccagcgaggcaagatggagttagtgcaggtcctgaaacgcgggctgcagcagatcaccggccacggcggtctccgaggctatctacgggtttttttcaggacaaatgatgcgaaggttggtacattagtgggggaagacaaatatggaaacaaatactatgaagacaacaagcaattttttggccgtcaccgatgggttgtatatactactgaaatgaatggcaaaaacacattctgggatgtggatggaagcatggtgcctcctgaatggcatcgttggcttcacagtatgactgatgatcctccaacaacaaaaccacttactgctcgtaaattcatttggacgaaccataaattcaacgtgactggcaccccagaacaatatgtaccttattctaccactagaaagaagattcaggagtggatcccaccttcaacaccttacaagtaaagacaatgaagaacagttgaaacatgcaaaatatggagcttttcatgtaattactcttttactgtttaccattcactataattcacaattaaaattgtgtgactaa

SEQ ID NO: 320462 - DNA, 845 bp, Homo sapiens
ataattcacaaatttccaaaaggatctagggtggttttaaaaaaatacttatgtggagacatagaattcaagtatgattgctacaaatgtgttttttccccagtctcaagaggaacaccttcttttctgaataccctgtacatctgggaacacactttcctatcctgtctgctactccctctgtggggagctggcagggaagcaaggattctcccctgtgggaaaggcctgagccccacccacagcagtgaatcatctcagtccttgctgcgggttgctgcttaaagtttgccacacacctcctggagcttaccttcacgaattcacccagggtgttattcctccaatagctctcttatataagatcacaaaaagtcttttcttaataaaaaggttgtcttctttggatattatgcatctatgctttaaaaaaaaaagtttttctttttaaatgttcatcttcccacccagccgtcaccgatgggttgtatatactactgaaatgaatggcaaaaacacattctgggatgtggatggaagcatggtgcctcctgaatggcatcgttggcttcacagtatgactgatgatcctccaacaacaaaaccacttactgctcgtaaattcatttggacgaaccataaattcaacgtgactggcaccccagaacaatatgtaccttattctaccactagaaagaagattcaggagtggatcccaccttcaacaccttacaagtaaagacaatgaagaacagttgaaacatgcaaaatatggagcttttcatgtaattactcttttactgtttaccattcactataattcacaattaaaattgtgtgactaa

SEQ ID NO: 320463 - DNA, 684 bp, Homo sapiens
gtcgacccacgcgtccggaaatctccaagtcataagacgaagaggacttcctgctcactgtaagagtcagaacaccccacaggcctgactcccttcctgtctggcttgggtggcctttacaagtaccctgtctaagctcgggagggacccgcccgtttctcagctactcccttgagcccatcaccggccacggcggtctccgaggctatctacgggtttttttcaggacaaatgatgcgaaggttggtacattagtgggggaagacaaatatggaaacaaatactatgaagacaacaagcaattttttggccgtcaccgatgggttgtatatactactgaaatgaatggcaaaaacacattctgggatgtggatggaagcatggtgcctcctgaatggcatcgttggcttcacagtatgactgatgatcctccaacaacaaaaccacttactgctcgtaaattcatttggacgaaccataaattcaacgtgactggcaccccagaacaatatgtaccttattctaccactagaaagaagattcaggagtggatcccaccttcaacaccttacaagtaaagacaatgaagaacagttgaaacatgcaaaatatggagcttttcatgtaattactcttttactgtttaccattcactataattcacaattaaaattgtgtgactaa

SEQ ID NO: 320464 - DNA, 619 bp, Homo sapiens
tattcggcacgggaggcggggccagcgaggcaagatggagttagtgcaggtcctgaaacgcgggctgcagcagatcaccggccacggcggtctccgaggctatctacgggtttttttcaggacaaatgatgcgaaggttggtacattagtgggggaagacaaatatggaaacaaatactatgaagacaacaagcaattttttggccgtcaccgatgggttgtatatactactgaaatgaatggcaaaaacacattctgggatgtggatggaagcatggtgcctcctgaatggcatcgttggcttcacagtatgactgatgatcctccaacaacaaaaccacttactgctcgtaaattcatttggacgaaccataaattcaacgtgactggcaccccagaacaatatgtaccttattctaccactagaaagaagattcaggagtggatcccaccttcaacaccttacaagtaaagacaatgaagaacagttgaaacatgcaaaatatggagcttttcatgtaattactcttttactgtttaccattcactataattcacaattaaaattgtgtgactaagaaaaaaaatattctcacttactaaaatccactaggtttag

SEQ ID NO: 320465 - DNA, 429 bp, Homo sapiens
catagaagaattcagctagtaactgatggagttgaggcttgaacccaagcaacaaaatagttccagggctacgtttttaaccgtccttccactatgctgtactgcctcttcataactgtttgggttttttcccctctttaaggcatcgttggcttcacagtatgactgatgatcctccaacaacaaaaccacttactgctcgtaaattcatttggacgaaccataaattcaacgtgactggcaccccagaacaatatgtaccttattctaccactagaaagaagattcaggagtggatcccaccttcaacaccttacaagtaaagacaatgaagaacagttgaaacatgcaaaatatggagcttttcatgtaattactcttttactgtttaccattcactataattcacaattaaaattgtgtgactaa

SEQ ID NO: 320466 - DNA, 490 bp, Homo sapiens
tattcggcacgggaggcggggccagcgaggcaagatggagttagtgcaggtcctgaaacgcgggctgcagcagatcaccggccacggcggtctccgaggctatctacgggtttttttcaggacaaatgatgcgaaggttggtacattagtgggggaagacaaatatggaaacaaatactatgaagacaacaagcaattttttggcatcgttggcttcacagtatgactgatgatcctccaacaacaaaaccacttactgctcgtaaattcatttggacgaaccataaattcaacgtgactggcaccccagaacaatatgtaccttattctaccactagaaagaagattcaggagtggatcccaccttcaacaccttacaagtaaagacaatgaagaacagttgaaacatgcaaaatatggagcttttcatgtaattactcttttactgtttaccattcactataattcacaattaaaattgtgtgactaa

SEQ ID NO: 320467 - DNA, 274 bp, Homo sapiens
tattcggcacgggaggcggggccagcgaggcaagatggagttagtgcaggtcctgaaacgcgggctgcagcagatcaccggccacggcggtctccgaggctatctacgggtttttttcagagaaagaagattcaggagtggatcccaccttcaacaccttacaagtaaagacaatgaagaacagttgaaacatgcaaaatatggagcttttcatgtaattactcttttactgtttaccattcactataattcacaattaaaattgtgtgactaa

SEQ ID NO: 320468 - DNA, 763 bp, Homo sapiens
  misc_feature (605)..(605): n is a, c, g, or t
tattcggcacgggaggcggggccagcgaggcaagatggagttagtgcaggtcctgaaacgcgggctgcagcagatcaccggccacggcggtctccgaggctatctacgggtttttttcaggacaaatgatgcgaaggttggtacattagtgggggaagacaaatatggaaacaaatactatgaagacaacaagcaattttttggccgtcaccgatgggttgtatatactactgaaatgaatggcaaaaacacattctgggatgtggatggaagcatggtgcctcctgaatggcatcgttggcttcacagtatgactgatgatcctccaacaacaaaaccacttactgctcgtaaattcatttggacgaaccataaattcaacgtgactggcaccccagaacaatatgtaccttattctaccactagaaagaagattcaggagtggatcccaccttcaacaccttacaagtaaagacaatgaagaacagttgaaacatgcaaaatatggagcttttcatgtaattactcttttactgtttaccattcactataattcacaattaaaattgtgtgactaaaaaaaaaaaaaaaaaaaactcgagggngggcccggacccaattcggcctatagtggagcgattacaaattactgggcggcggtttaaacgtcgtgactggaaaaacctgggttaccaacttaatcgcttttgagaatccccttttgcaagtggggaatacgagaagggccgaccgatgcctttcc

SEQ ID NO: 320469 - DNA, 651 bp, Homo sapiens
tattcggcacgggaggcggggccagcgaggcaagatggagttagtgcaggtcctgaaacgcgggctgcagcagatcaccggccacggcggtctccgaggctatctacgggtttttttcaggacaaatgatgcgaaggttggtacattagtgggggaagacaaatatggaaacaaatactatgaagacaacaagcaattttttgatgaagaaactgaggcccaaggaagtatctttaccaaagagacttaatcatgtaattaatggcagaacctggggccgtcaccgatgggttgtatatactactgaaatgaatggcaaaaacacattctgggatgtggatggaagcatggtgcctcctgaatggcatcgttggcttcacagtatgactgatgatcctccaacaacaaaaccacttactgctcgtaaattcatttggacgaaccataaattcaacgtgactggcaccccagaacaatatgtaccttattctaccactagaaagaagattcaggagtggatcccaccttcaacaccttacaagtaaagacaatgaagaacagttgaaacatgcaaaatatggagcttttcatgtaattactcttttactgtttaccattcactataattcacaattaaaattgtgtgactaa

SEQ ID NO: 320470 - DNA, 575 bp, Homo sapiens
ttatgtaaagtatgcctagggatggaggtcgatgaggactcggcatgatggtcgtgcagagatattacagacggtttctatttcctgagcgtctgcgatgttagtattagttagttttgtagtgagtgtataggaaaagggcatacaggactaggaagcagatcaggaaaatgattatgaggacaacaagcaattttttggccgtcaccgatgggttgtatatactactgaaatgaatggcaaaaacacattctgggatgtggatggaagcatggtgcctcctgaatggcatcgttggcttcacagtatgactgatgatcctccaacaacaaaaccacttactgctcgtaaattcatttggacgaaccataaattcaacgtgactggcaccccagaacaatatgtaccttattctaccactagaaagaagattcaggagtggatcccaccttcaacaccttacaagtaaagacaatgaagaacagttgaaacatgcaaaatatggagcttttcatgtaattactcttttactgtttaccattcactataattcacaattaaaattgtgtgactaa

SEQ ID NO: 320471 - DNA, 552 bp, Homo sapiens
cgcattcggtttcaaaataccggcacaatgggggcacccggtaggcgggtccaagcaaggcaaattggagttagtacaggtccttaaacgtttcgacaaatgatgcgaaggttggtacattagtgggggaagacaaatatggaaacaaatactatgaagacaacaagcaattttttggccgtcaccgatgggttgtatatactactgaaatgaatggcaaaaacacattctgggatgtggatggaagcatggtgcctcctgaatggcatcgttggcttcacagtatgactgatgatcctccaacaacaaaaccacttactgctcgtaaattcatttggacgaaccataaattcaacgtgactggcaccccagaacaatatgtaccttattctaccactagaaagaagattcaggagtggatcccaccttcaacaccttacaagtaaagacaatgaagaacagttgaaacatgcaaaatatggagcttttcatgtaattactcttttactgtttaccattcactataattcacaattaaaattgtgtgactaa

SEQ ID NO: 320472 - DNA, 314 bp, Homo sapiens
tcggtaccccttgaatttgaactgaatggcatcgttggcttcacagtatgactgatgatcctccaacaacaaaaccacttactgctcgtaaattcatttggacgaaccataaattcaacgtgactggcaccccagaacaatatgtaccttattctaccactagaaagaagattcaggagtggatcccaccttcaacaccttacaagtaaagacaatgaagaacagttgaaacatgcaaaatatggagcttttcatgtaattactcttttactgtttaccattcagttgcaaattcaagggggatcctcatagag

SEQ ID NO: 320473 - DNA, 577 bp, Homo sapiens
tattcggcacgggaggcggggccagcgaggcaagatggagttagtgcaggtcctgaaacgcgggctgcagcagatcaccggccacggcggtctccgaggctatctacgggtttttttcaggacaaatgatgcgaaggttggtacattagtgggggaagacaaatatggaaacaaatactatgaagacaacaagcaattttttggccgtcaccgatgggttgtatatactactgaaatgaatggcaaaaacacattctgggatgtggatggaagcatggtgcctcctgaatggcatcgttggcttcacagtatgactgatgatcctccaacaacaaaaccacttactgctcgtaaattcatttggacgaaccataaattcaacgtgactggcaccccagaacaatatgtaccttattctaccactagaaagaagattcaggagtggatcccaccttcaacaccttacaagtaaagacaatgaagaacagttgaaacatgcaaaatatggagcttttcatgtaattactcttttactgtttaccattcagttgcaaattcaagggggatcctcatagag

SEQ ID NO: 320474 - DNA, 603 bp, Homo sapiens
ccaccgtttgattcatttaacatttctgagcagcaaagctgcagtcctaggccccagggcaggagtgagatggtgacaatctgtgggtcaccccagaagcccttggatgtggactgctcctccctcacctcacacgaggcctgtctgtctgcctgccagtctgggagagctaacgtagaaatgggttgttgggtttgtttttaaactaactgtttgccttccagaaaatattttcagaacctggaagcttatccatggccaccgtcgccaagctccgcgagagctgcagggcccggctgctggcacaggggtgagcgtgcctgtcccctgcgttgctcgtctctacactgacgatgcccctttccagagttgacactggaccaactttcactgctttcctttttagtgttgtaaatacttgacatcactacactttagttgtgaattttttaaaagagcagtttaaaatcaggtcattctaccagcttttgatgattagctatgaagtcatactttttaaagaaaacttatttttacctgagagatcaataatatataaaatgtgagtgtgggtttgtatctaataaagtatgccaacacctg

SEQ ID NO: 320475 - DNA, 789 bp, Homo sapiens
ccaccgtttgattcatttaacatttctgagcagcaaagctgcagtcctaggccccagggcaggagtgagatggtgacaatctgtgggtcaccccagaagcccttggatgtggactgctcctccctcacctcacacgaggcctgtctgtctgcctgccagtctgggagagctaacgtagaaatgggttgttgggtttgtttttaaactaactgtttgccttccagaaaatattttcagaacctggaagcttatccatggccaccgtcgccaagctccgcgagagctgcagggcccggctgctggcacaggggtgagcgtgcctgtcccctgcgttgctcgtctctacactgacgatgcccctttccagagttgacactggaccaactttcactgctttcctttttagtgttgtaaatacttgacatcactacactttagttgtgaattttttaaaagagcagtttaaaatcaggtcattctaccagcttttgatgattagctatgaagtcatactttttaaagaaaacttatttttacctgagagatcaataatatataaaatgtgagtgtgggtttgtatctaataaagtatgccaacacctgtgtttgtgatcagtttctcagctgactggaaattaacatagtgagtggtcactgaggtcttacagcggcagtgtcaatattccattcctttctgtgacagagcgtgcagtttatgtgaggcttctgcacgtagtaggtgatttctctttagaaagatcattttctcccttcaacttttaacttctg

SEQ ID NO: 320476 - DNA, 1107 bp, Homo sapiens
cccggagccgggaggcgaacttgggacccgctggcctcgctcggatcgacccgtacggattcgagcggcctgaggacttcgacgacgccgcctacgagaagtttttctccagctacctggtcacgctcacccgcagggcgatcaaatggtcccggctgctgcagggcgggggcgtccccaggagccggacagcaaatatccaccaggagcccttaggaagacagcttcctcttcctccctggaaagactaaattcaacaaacttagtcctgttggattcctatttcattctccatctcgagaatagacgtctgcagggaagcagcttcagggccgttggcttctttgagacctccttcctggtggcttagaatattaacaccacctaagttaaatcgagaaaacatattttcaaagatacaccgaaaaactggggatttgcctaactttgtcagggtagacagatggacgtcagttctctggatgtagcttctttttaaaaatttcccaactgttttgacttgatattttatacttctccaaacattagtgatgctctgtgcgttagccctgcccttgggaaagtgtcagtctgtgaggacaagtaaacaattttctttcttctataaagaaacagtgtaaatccagataacaaacttatcaaaaagtcgcagaattctttgttccgtgaagcttccgggtgttgctccaactgccagagctgctcgggggccttgggtgcaggctcggtgccttctgttcactttacgatgaggaaaccaaggcacgctcagggtctggagcctgcaagtcatagcggagcagagtgtctgactccagagctggtgcatttagccatttcgacctttctcttaaatacaaccttgatattattgttattatcgagacagggtcttgctctgtcacccaggcaggaggacagtgggacgatcatagctcactgcagcctagaggagcaatcctcccgcctcagcctccagagtagctgggactacaggtgtgcaccaccatgcccagctaatttttaagggtttttttgtagagatggagtctcctgggattacaggcatgagccactgcacctggc

SEQ ID NO: 320477 - DNA, 583 bp, Homo sapiens
atttattcttaaaagttaactgtcttttaattttaaaaagtaacgtaaaagtatataagacatgtgaacttaaaaagcataatttatgtacatggtaaacactttaatcatactgagggctacaaagtgcaacagggagtttctctcccacccatggcccccatctcctatagagatgaccgcaggggactgtccttccgtccccctcaggagcagaagtccacgcttggttctgcagtttgctttaagagcaggggaagtccgtgggaagtcctgtggctgtgacctggaggttggttacagcggagaatctgaaagatgtatggttgtgcataaatttttgtttttacagaaaacacaactgcacagtcattctcccgtctttgcctttgccatttgggtctgtcctattgctgtccttttcttcgaccaggagctgctaacttgggttccatattttcctttttagggaaccactcagcacattgcccccactttccaatatggacttgggagggggttctgggaagagcagggaaaaggaaaagagcaatccggatgcaaaatcctccagatttttatt

SEQ ID NO: 320478 - DNA, 609 bp, Homo sapiens
atttattcttaaaagttaactgtcttttaattttaaaaagtaacgtaaaagtatataagacatgtgaacttaaaaagcataatttatgtacatggtaaacactttaatcatactgagggctacaaagtgcaacagggagtttctctcccacccatggcccccatctcctatagagatgaccgcaggggactgtccttccgtccccctcaggagcagaagtccacgcttggttctgcagtttgctttaagagcaggggaagtccgtgggaagtcctgtggctgtgacctggaggttggttacagcggagaatggtattttgcagccgttgtggagagaccacaggcggttgggttcctccagagctgggtgtacacccatctcagcgtcatggctggcggggactgctgtgagtccatcttggaacttgtgcagaaagcggctgtctgctggtgaccgcatggggtgcctggcgaacacctctaacagaggtagggccagtgggagcagaaaccagtggagttgtcaagccggcattatccttcctgctcggcttgtgtccagggttaacgcggaggtcagcttcagtgaggcctggcacttggtcagcg

SEQ ID NO: 320479 - DNA, 2087 bp, Homo sapiens
actttttcacatttttattgtcaattaaaatatccctacaaaatggagtagctttcaatatatagagattaactgcacgagttggacagtgacgtctgccactgaaaccgtgttctcccagctgtggcgtcccacctgaggtgctcacagctgagcccagccggcctccttgttctcagctgggcctctcactgctttgcccctttgctgctgctctgcacggctgccaggaagctttgcagagcagccatctgaccgcggctctgtttcttgaccacctgcattgaatggtgaagtgggcgtgggggcggttctgtagccagtctggtttgtgctctgttgagagggagaggagagcagaatttttaaaggagtatatgtaccagttttggtggagatggacgaagttctgggtctctttaatatttgatttaagaagagaactggtgagagtggaaagtgtggcaggaacgcgtgggccccgcaggcccctggtccagctcacacgctgtccgtcctctcggccttcagtgaagcgctatgtccggaaaggggtcccgctggagcaccgtgcccgcgtctggatggtgctgagtggggcccaggcgcagatggaccagaatcccggctactaccaccagcttctccagggagagagaaaccccaggctggaggacgccatcaggacagacctgaaccggaccttccccgacaacgtgaagttccggaagaccacggacccctgcttacagaggaccctgtacaatgtgctgctggcatatgggcaccataaccagggagtgggctactgccagggaatgaattttatagcaggatatctgattcttataacaaataatgaagaagaatctttttggctgttagatgctcttgttggaagaatactaccagattactacagcccggccatgctgggcctgaagaccgaccaggaggtcctcggggagctggtgcgggcgaagctgccggctgtgggggccctgatggagcgtctcggtgtgctgtggacgctgctggtgtcccgctggttcatctgcctgtttgtggacatcttgcccgtggagacagtgcttcggatctgggactgtttgtttaacgaaggctcgaagattatcttccgggtggccctgaccttaattaagcagcaccaggagttgattttggaagccaccagcgttccagacatttgcgataagtttaagcagataaccaaagggagtttcgtgatggagtgtcacacgtttatgcaggtgtgtggggctgcacgtggctcagtcccctcccagggggccccgcctcacctgcagcccgggggctgctctgaccacccggagggtgcacaggacgggcaccagtgggcatagggcacaggatgagcctccagctctgtcctgcatctgccccctgcgcctggcctccgagggctttcctgtctatggcggccctgtcttcttggccctggcactgcggacgctgctcctggtcctaatggctgtactcatctgctgtgtgtggtgccagaagtgtggcttcccgaggcccggcctccccactgggtcctggacctggcgcaggccgtatagactcaggtcctgatgagggcgttgtgggagctgtacctgacaggccttctgaggaagccaagacgccaggagaggctcaggcctgggagtcagtagtttcctaagagggagtggaggctcggggccactctgggtgcagcatggcaaacgtgggcggtatttcagcagctgggccttcatcaaagagaagaccatgttggccgggcgcggtggctcacgcctgcagtcccagcactttgggaggccaaggcgtgtggatcacctgaggtcaggagttcaagaccagcctggccaacacggtgaaaccccgtctctactaaaaaatacaaaaattagccaggtgtggtggctcacgcttatgtagtcccagttactcgggaggctgaggcacgagaatcacttgaacctgggaggcggaggttgcagtgagccgagatcgcgccactgcactccagcctgggcaacagagtgagactctgtctc

SEQ ID NO: 320480 - DNA, 1363 bp, Homo sapiens
cccggagccgggaggcgaacttgggacccgctggcctcgctcggtgcgcgcctccctccccgcatgcagcccgccgagcgctcgcgggtccccaggatcgacccgtacggattcgagcggcctgaggacttcgacgacgccgcctacgagaagtttttctccagctacctggtcacgctcacccgcagggcgatcaaatggtcccggctgctgcagggcgggggcgtccccaggagccggacagtgaagcgctatgtccggaaaggggtcccgctggagcaccgtgcccgcgtctggatggtgctgagtggggcccaggcgcagatggaccagaatcccggctactaccaccagcttctccagggagagagaaaccccaggctggaggacgccatcaggacagacctgaaccggaccttccccgacaacgtgaagttccggaagaccacggacccctgcttacagaggaccctgtacaatgtgctgctggcatatgggcaccataaccagggagtgggctactgccagggaatgaattttatagcaggatatctgattcttataacaaataatgaagaagaatctttttggctgttagatgctcttgttggaagaatactaccagattactacagcccggccatgctgggcctgaagaccgaccaggaggtcctcggggagctggtgcgggcgaagctgccggctgtgggggccctgatggagcgtctcggtgtgctgtggacgctgctggtgtcccgctggttcatctgcctgtttgtggacatcttgcccgtggagacagtgcttcggatctgggactgtttgtttaacgaaggctcgaagattatcttccgggtggccctgaccttaattaagcagcaccaggagttgattttggaagccaccagcgttccagacatttgcgataagtttaagcagataaccaaagggagtttcgtgatggagtgtcacacgtttatgcagaaaatattttcagaacctggaagcttatccatggccaccgtcgccaagctccgcgagagctgcagggcccggctgctggcacaggggtgagcgtgcctgtcccctgcgttgctcgtctctacactgacgatgcccctttccagagttgacactggaccaactttcactgctttcctttttagtgttgtaaatacttgacatcactacactttagttgtgaattttttaaaagagcagtttaaaatcaggtcattctaccagcttttgatgattagctatgaagtcatactttttaaagaaaacttatttttacctgagagatcaataatatataaaatgtgagtgtgggtttgtatctaataaagtatgccaacacctg

SEQ ID NO: 320481 - DNA, 1145 bp, Homo sapiens
actttttcacatttttattgtcaattaaaatatccctacaaaatggagtagctttcaatatatagagattaactgcacgagttggacagtgacgtctgccactgaaaccgtgttctcccagctgtggcgtcccacctgaggtgctcacagctgagcccagccggcctccttgttctcagctgggcctctcactgctttgcccctttgctgctgctctgcacggctgccaggaagctttgcagagcagccatctgaccgcggctctgtttcttgaccacctgcattgaatggtgaagtgggcgtgggggcggttctgtagccagtctggtttgtgctctgttgagagggagaggagagcagaatttttaaaggagtatatgtaccagttttggtggagatggacgaagttctgggtctctttaatatttgatttaagaagagaactggtgagagtggaaagtgtggcaggaacgcgtgggccccgcaggcccctggtccagctcacacgctgtccgtcctctcggccttcagtgaagcgctatgtccggaaaggggtcccgctggagcaccgtgcccgcgtctggatggtgctgagtggggcccaggcgcagatggaccagaatcccggctactaccaccagcttctccagggagagagaaaccccaggctggaggacgccatcaggacaggtgaggcggtgggggtcgagctctggtgcagggcccgggggccggaaggaaccggtttccacccagtgtctagcctcagcgtccaggggtgagcggtgcgcctgctgcttttaacttgaagttacgtcttcctccatgaaagaatcaaaactgaagcggtattttgcagccgttgtggagagaccacaggcggttgggttcctccagagctgggtgtacacccatctcagcgtcatggctggcggggactgctgtgagtccatcttggaacttgtgcagaaagcggctgtctgctggtgaccgcatggggtgcctggcgaacacctctaacagaggtagggccagtgggagcagaaaccagtggagttgtcaagccggcattatccttcctgctcggcttgtgtccagggttaacgcggaggtcagcttcagtgaggcctggcacttggtcagcg

SEQ ID NO: 320482 - DNA, 1800 bp, Homo sapiens
cccggagccgggaggcgaacttgggacccgctggcctcgctcggtgcgcgcctccctccccgcatgcagcccgccgagcgctcgcgggtccccaggatcgacccgtacggattcgagcggcctgaggacttcgacgacgccgcctacgagaagtttttctccagctacctggtcacgctcacccgcagggcgatcaaatggtcccggctgctgcagggcgggggcgtccccaggagccggacagtgaagcgctatgtccggaaaggggtcccgctggagcaccgtgcccgcgtctggatggtgctgagtggggcccaggcgcagatggaccagaatcccggctactaccaccagcttctccagggagagagaaaccccaggctggaggacgccatcaggacagacctgaaccggaccttccccgacaacgtgaagttccggaagaccacggacccctgcttacagaggaccctgtacaatgtgctgctggcatatgggcaccataaccagggagtgggctactgccagggaatgaattttatagcaggatatctgattcttataacaaataatgaagaagaatctttttggctgttagatgctcttgttggaagaatactaccagattactacagcccggccatgctgggcctgaagaccgaccaggaggtcctcggggagctggtgcgggcgaagctgccggctgtgggggccctgatggagcgtctcggtgtgctgtggacgctgctggtgtcccgctggttcatctgcctgtttgtggacatcttgcccgtggagacagtgcttcggatctgggactgtttgtttaacgaaggctcgaagattatcttccgggtggccctgaccttaattaagcagcaccaggagttgattttggaagccaccagcgttccagacatttgcgataagtttaagcagataaccaaagggagtttcgtgatggagtgtcacacgtttatgcaggtgtgtggggctgcacgtggctcagtcccctcccagggggccccgcctcacctgcagcccgggggctgctctgaccacccggagggtgcacaggacgggcaccagtgggcatagggcacaggatgagcctccagctctgtcctgcatctgccccctgcgcctggcctccgagggctttcctgtctatggcggccctgtcttcttggccctggcactgcggacgctgctcctggtcctaatggctgtactcatctgctgtgtgtggtgccagaagtgtggcttcccgaggcccggcctccccactgggtcctggacctggcgcaggccgtatagactcaggtcctgatgagggcgttgtgggagctgtacctgacaggccttctgaggaagccaagacgccaggagaggctcaggcctgggagtcagtagtttcctaagagggagtggaggctcggggccactctgggtgcagcatggcaaacgtgggcggtatttcagcagctgggccttcatcaaagagaagaccatgttggccgggcgcggtggctcacgcctgcagtcccagcactttgggaggccaaggcgtgtggatcacctgaggtcaggagttcaagaccagcctggccaacacggtgaaaccccgtctctactaaaaaatacaaaaattagccaggtgtggtggctcacgcttatgtagtcccagttactcgggaggctgaggcacgagaatcacttgaacctgggaggcggaggttgcagtgagccgagatcgcgccactgcactccagcctgggcaacagagtgagactctgtctc

SEQ ID NO: 320483 - DNA, 1100 bp, Homo sapiens
tagaggatcccccgtattggtggtgctaccctctatactaatcttcctacacatctccttaattataacattcacagccacagaactaatcatattttatatcttcttcgaaaccacacttatccccaccttggctatcatcacccgatgaggcaaccagccagaacgcctgaacgcaagcaccaccaatactgtattggtggtgctgcctgtattggtggtgctggcatatgggcaccataaccagggagtgggctactgccagggaatgaattttatagcaggatatctgattcttataacaaataatgaagaagaatctttttggctgttagatgctcttgttggaagaatactaccagattactacagcccggccatgctgggcctgaagaccgaccaggaggtcctcggggagctggtgcgggcgaagctgccggctgtgggggccctgatggagcgtctcggtgtgctgtggacgctgctggtgtcccgctggttcatctgcctgtttgtggacatcttgcccgtggagacagtgcttcggatctgggactgtttgtttaacgaaggctcgaagattatcttccgggtggccctgaccttaattaagcagcaccaggagttgattttggaagccaccagcgttccagacatttgcgataagtttaagcagataaccaaagggagtttcgtgatggagtgtcacacgtttatgcagaaaatattttcagaacctggaagcttatccatggccaccgtcgccaagctccgcgagagctgcagggcccggctgctggcacaggggtgagcgtgcctgtcccctgcgttgctcgtctctacactgacgatgcccctttccagagttgacactggaccaactttcactgctttcctttttagtgttgtaaatacttgacatcactacactttagttgtgaattttttaaaagagcagtttaaaatcaggtcattctaccagcttttgatgattagctatgaagtcatactttttaaagaaaacttatttttacctgagagatcaataatatataaaatgtgagtgtgggtttgtatctaataaagtatgccaacacctg

SEQ ID NO: 320484 - DNA, 1549 bp, Homo sapiens
cccggagccgggaggcgaacttgggacccgctggcctcgctcggtgcgcgcctccctccccgcatgcagcccgccgagcgctcgcgggtccccaggatcgacccgtacggattcgagcggcctgaggacttcgacgacgccgcctacgagaagtttttctccagctacctggtcacgctcacccgcagggcgatcaaatggtcccggctgctgcagggcgggggcgtccccaggagccggacagtgaagcgctatgtccggaaaggggtcccgctggagcaccgtgcccgcgtctggatggtgctgagtggggcccaggcgcagatggaccagaatcccggctactaccaccagcttctccagggagagagaaaccccaggctggaggacgccatcaggacagacctgaaccggaccttccccgacaacgtgaagttccggaagaccacggacccctgcttacagaggaccctgtacaatgtgctgctggcatatgggcaccataaccagggagtgggctactgccagggaatgaattttatagcaggatatctgattcttataacaaataatgaagaagaatctttttggctgttagatgctcttgttggaagaatactaccagattactacagcccggccatgctgggcctgaagaccgaccaggaggtcctcggggagctggtgcgggcgaagctgccggctgtgggggccctgatggagcgtctcggtgtgctgtggacgctgctggtgtcccgctggttcatctgcctgtttgtggacatcttgcccgtggagacagtgcttcggatctgggactgtttgtttaacgaaggctcgaagattatcttccgggtggccctgaccttaattaagcagcaccaggagttgattttggaagccaccagcgttccagacatttgcgataagtttaagcagataaccaaagggagtttcgtgatggagtgtcacacgtttatgcagaaaatattttcagaacctggaagcttatccatggccaccgtcgccaagctccgcgagagctgcagggcccggctgctggcacaggggtgagcgtgcctgtcccctgcgttgctcgtctctacactgacgatgcccctttccagagttgacactggaccaactttcactgctttcctttttagtgttgtaaatacttgacatcactacactttagttgtgaattttttaaaagagcagtttaaaatcaggtcattctaccagcttttgatgattagctatgaagtcatactttttaaagaaaacttatttttacctgagagatcaataatatataaaatgtgagtgtgggtttgtatctaataaagtatgccaacacctgtgtttgtgatcagtttctcagctgactggaaattaacatagtgagtggtcactgaggtcttacagcggcagtgtcaatattccattcctttctgtgacagagcgtgcagtttatgtgaggcttctgcacgtagtaggtgatttctctttagaaagatcattttctcccttcaacttttaacttctg

SEQ ID NO: 320485 - DNA, 559 bp, Homo sapiens
gtagggagagagtgaaagcaactcttagacattaatgattgataagtggctgctcagtgtactatttttttcaactctttgtaggcttgcaatcttttaaaaagttgaggaaaacagtccgggtgcagtgcctcacgcctgtaatcccaacattttggcaggctggggtgggaagattgcttgaggccaggagttggagaacggctcaggcaacataagaccccatccctacaacaaataaaaattagctgagcatggtgccatgcacctgtagttgtagctactcaggaggctgagcccaagagttcaaggctgcggtgagctatggtcgtgccaccacactccagcctgggcaataaagtgagaaaccctgtctgtttggaaaaaaaagttgaggaaaacaagtaaacaagaacagcaaaaatctgttagaaaatgtaataatgggccaggtgtggtggctcatgcctgtaatcccagcactttgggaggccgagatgggtggatcacctgaggtcaggagttcaagatcagcttggccaacatggtgaaaccccat

SEQ ID NO: 320486 - DNA, 800 bp, Homo sapiens
ggcagctgttgggagcagggtgcagtgaggatggagtgagagtgggcagtttcttgtgcagatttgcctttctttcatcctggggctgacttgcagctccacacccatccatctctcaaatttcacagagggtaaaataggcatttggagagaaagaactctggcctgattcctttctctcccacaaatgtcctttattcataaaacaggaataataattcctgtatctcccaactacatggaagctgcagccctcacagaagaagatgatctgagaaattctttgatttcctcagtacagttatacccatgcatcataatactttaagcctggaaggcatcttaaaaataatgcaacagtcaaacctaattttacagagaaactgacatgaaatcacgcagctaatcatgataaagctgggtggaaaacttatcttgatgggcagtacaggaagatgcagtagaccttaagatgtcctgaaagtttcttatctcaggggaaactcccaggtaggctttatgtcagggacacagaaaaatgctccctgaaagtcaaaatattcgggctagacagacaaattcctgtaagtgtggtttgtctgggaaccacagatgtcactaatcctggtttgctccagagttctttttgttcactcctaccccccatcgatatcgcaatgggtatcgcaatgggtatcgcaatgggtatcgcaatgggcattcggcatatagaagttcccgggctagggtttgaattggagctgcagctgatggcctacatataccatagccacaggatc

SEQ ID NO: 320487 - DNA, 1699 bp, Homo sapiens
ggcagctgttgggagcagggtgcagtgaggatggagtgagagtgggcagtttcttgtgcagatttgcctttctttcatcctggggctgacttgcagctccacacccatccatctctcaaatttcacagagggtaaaataggcatttggagagaaagaactctggcctgattcctttctctcccacaaatgtcctttattcataaaacaggaataataattcctgtatctcccaactacatggaagctgcagccctcacagaagaagatgatctgagaaattctttgatttcctcagtacagttatacccatgcatcataatactttaagcctggaaggcatcttaaaaataatgcaacagtcaaacctaattttacagagaaactgacatgaaatcacgcagctaatcatgataaagctgggtggaaaacttatcttgatgggcagtacaggaagatgcagtagaccttaagatgtcctgaaagtttcttatctcaggggaaactcccaggtaggctttatgtcagggacacagaaaaatgctccctgaaagtcaaaatattcgggctagacagacaaattcctgtaagtgtggtttgtctgggaaccacagatgtcactaatcctggtttgctccagagttctttttgttcactcctaccccccatcaccatttgattgatctccttaccctgtaatttccccttcttgtcgcttacctgcagtatctttcccacccaggcatgccttattctttctaaaggaaagtatgaatggagaggggaaagcttgggaaactgatagatttccttggatgccaaaacacctccatagcctgtctgcccggccctatgtggaaacagcattgagtttcaagtcctttatgcctccacccagggatagccacttggaatccacatggcaattgtgaaacaagcaggaaatgcgtaattgtcagaattttgtggggaaaggactagggaataaggaaaacaaagatcttccttgtgttttagagctgtcagctagaggagcacctgcttgagtctgatgccatctaatggtcccagaagaaactgggttttgaacctagagttccatggactcttaggaattagactcctactactactaagcattcactggtgcttactatgtgctattgctgtgccaagtatctgaaacctgtcttcttaccttatttttcaagataattctatgtggcaggtattactatctcaattctaagagtgagaaaatggagttttagaaacatttactaacttgcctgggtcacatagctaaggaagaggtggacttgcccagctttgcataaaactcctcaaaagagttgcctatactccctgactccacttatcttcctactatcctctttttaaaatatattatttatttatttaaataagcaatatatgaatgtggtttgaaattcaaaagacacaaagaagtatacagaggaaagcctcactctcaatccttctcaaggtttgctaattcctcttgcataggcaatccgttcttccagctttgtgtttatctttccagagaagtttactgtgtattaagcaaatatgtatatctttattcttgctcagtattttcgcaaacagcagctgtctaagttcactgttctgaactttattttttaaattaaaaatatatggctatgtagtattcta

SEQ ID NO: 320488 - DNA, 1847 bp, Homo sapiens
ggcagctgttgggagcagggtgcagtgaggatggagtgagagtgggcagtttcttgtgcagatttgcctttctttcatcctggggctgacttgcagctccacacccatccatctctcaaatttcacagagggtaaaataggcatttggagagaaagaactctggcctgattcctttctctcccacaaatgtcctttattcataaaacaggaataataattcctgtatctcccaactacatggaagctgcagccctcacagaagaagatgatctgagaaattctttgatttcctcagtacagttatacccatgcatcataatactttaagcctggaaggcatcttaaaaataatgcaacagtcaaacctaattttacagagaaactgacatgaaatcacgcagctaatcatgataaagctgggtggaaaacttatcttgatgggcagtacaggaagatgcagtagaccttaagatgtcctgaaagtttcttatctcaggggaaactcccaggtaggctttatgtcagggacacagaaaaatgctccctgaaagtcaaaatattcgggctagacagacaaattcctgtaagtgtggtttgtctgggaaccacagatgtcactaatcctggtttgctccagagttctttttgttcactcctaccccccatcaccatttgattgatctccttaccctgtaatttccccttcttgtcgcttacctgcagtatctttcccacccaggcatgccttattctttctaaaggaaagtatgaatggagaggggaaagcttgggaaactgatagatttccttggatgccaaaacacctccatagcctgtctgcccggccctatgtggaaacagcattgagtttcaagtcctttatgcctccacccagggatagccacttggaatccacatggcaattgtgaaacaagcaggaaatgcgtaattgtcagaattttgtggggaaaggactagggaataaggaaaacaaagatcttccttgtgttttagagctgtcagctagaggagcacctgcttgagtctgatgccatctaatggtcccagaagaaactgggttttgaacctagagttccatggactcttaggaattagactcctactactactaagcattcactggtgcttactatgtgctattgctgtgccaagtatctgaaacctgtcttcttaccttatttttcaagataattctatgtggcaggtattactatctcaattctaagagtgagaaaatggagttttagaaacatttactaacttgcctgggtcacatagctaaggaagaggtggacttgcccagctttgcataaaactcctcaaaagagttgcctatactccctgactccacttatcttcctactatcctctttttaaaatatattatttatttatttaaataagcaatatatgaatgtggtttgaaattcaaaagacacaaagaagtatacagaggaaagcctcactctcaatccttctcaaggtttgctaattcctcttgcataggcaatccgttcttccagctttgtgtttatctttccagagaagtttactgtgtattaagcaaatatgtatatctttattcttgctcagtattttcgcaaacagcagctgtctaagttcactgttctgaactttattttttaaattaaaaatatatggctatgtagtattctattttatggaagttccatatttcatttatcctgtttccttctactgatggctagttaggttattggaagtcttttgctgttgctagttagtcttgtatagacattgtaatgcacatgtgcaaaaatacaagtatgatacaatcttaaag

SEQ ID NO: 320489 - DNA, 667 bp, Homo sapiens
aaataaacactggggtgtttttgaaaaaccctagaaaagtttcccccctggggtctctctaaagggaatattgagaccttgacgaattaccattaaaaagccattccccgtggtgcttactatgtgctattgctgtgccaagtatctgaaacctgtcttcttaccttatttttcaagataattctatgtggcaggtattactatctcaattctaagagtgagaaaatggagttttagaaacatttactaacttgcctgggtcacatagctaaggaagaggtggacttgcccagctttgcataaaactcctcaaaagagttgcctatactccctgactccacttatcttcctactatcctctttttaaaatatattatttatttatttaaataagcaatatatgaatgtggtttgaaattcaaaagacacaaagaagtatacagaggaaagcctcactctcaatccttctcaaggtttgctaattcctcttgcataggcaatccgttcttccagctttgtgtttatctttccagagaagtttactgtgtattaagcaaatatgtatatctttattcttgctcagtattttcgcaaacagcagctgtctaagttcactgttctgaactttattttttaaattaaaaatatatggctatgtagtattcta

SEQ ID NO: 320490 - DNA, 193 bp, Homo sapiens
gggtttttaaaagttcctcaggggattctaatgcactaccaagattgagaactactgctctcagataggattcatttattcacttatttctaccatttaatcagttaatccttctttcagagacatggtagaacacataacttctataattctacgacattcctctcttccttctctctttctttcctctccc

SEQ ID NO: 320491 - DNA, 567 bp, Homo sapiens
gagtgcaatggcacgatctcggctcactgcaacctccttctcccaggttcaagcaattctcctgcctcagcctcctgagtagctgggattacaggtgcatgccgccacacctggctaattttttgtatctttggtggagatggggtttcaccatgttggccaggctggtctcgaactcctgacttcgttatccacccacctcaacctcccaaagtgctgggattacacgcatgagccaccgttcctggccgatattttattttcttaaaaggtcattatcagatgccacaagagtatttctataaactatgacccaagtatagcctaatgttaatagcttaaaataggttttatttaccttttttgccctttaaaagcaaggaattattttttaatggaaagaacatagactttgatgatcagttcacatccttgctttaccccttgaaaaatgtgcaacctggaaagacagcttaacattcctgagtcacatttgtccaaataatacaaacaatggcaacaagacttcagcactaatgtctgatgttttttgtatgattactctgt

SEQ ID NO: 320492 - DNA, 1618 bp, Homo sapiens
ggcggggcctcccaattaaggggatgagggtcaggaagggaacctgggacgctgccaactccatcccccagggattgtgaagggggttccttctggctgtgacagtgctgaacgaggccagagagtgcagctgcctggaggcacaagcctcctcctgatccagggggctccagggagaccaaagcagctgtcaagatgagagaaattgaaaaagaaaatggaaaactctccagcctggctctcagcttctgcatctccatgcaagaccagagacccacatcactccctcactccacccagttccactccaacaatacctgggccctgccaggagtgagaaaacggtcctcttcctgtggataggttgctctctcctcttccagatcagggtattcattggtgctggggaatccacagccctcttcgccaagcaccactggctcagatgcagccccagagctgccccactgggccttcttcagtctgtggagactttaggctgaggagagaagtgcctggaggccaggcttcctgtctctccattcttcacctttctgttctgaaatacttccaagtgctgggattacaggtgtgagccattgtgcccggcctaatctcaacgttttaagaaagtttatgaatttgtgttggactgcttcaaagccatcctaggccgcagttggacaagcttgctttatacctcatagttagagaaggtaatatttagcaagcagagttgttaaagaggaaggccttggctactcaggttatatgacagataggattcatttaggtcaatgcaaggatccaggggagagaacctctgtttacttcatttgtctccccatctcaaaaggactaatatccttgtaaataggagtgtgcagagctgtttgagaacactgctcgtcacttccaaaccccacaggctgaatgatgattgccctcctgatctctaagaaatggagtatgttagggcttaggcctggggccctttatcttctctgtcttcatctcttcttaggtgatctcacccagtaccatgctgtcaataagctgatgactcccaaatctatatatccagccctggttcctctctgggctccactcaacatctcctccccaaccttcctcctctcaatgaaaagcactcaaatgcccagttgctaagaccaaaaacatggtatgtctcactttccctcacctcccacatctaatccatcagcagttcctgtcagttttacatctaaaatactgtgtacctgaatttgaccactcctcatcattcccactcctaccaccatatatttcaggtcatcttccccttcctggactgttgcaatggtctcttccccccgtctctgcttccattcccatcccccaacaatatattctgcacagaactgtgagagatgatcatacgaaataatataaggtttgagatgtacttcaaaagaatttgagaaatagggggctagatgggtatagagatgaaaagattatccatacaatgataattattgaagctgactgaaaagggtacatggggttcatgatactattttctctactgtgtttgtttgaaattttccataataaaaaaagttgaaggaaaaaa

SEQ ID NO: 320493 - DNA, 1074 bp, Homo sapiens
gcttctttaataatctctcccgacctccaagtgctgggattacaggtgtgagccattgtgcccggcctaatctcaacgttttaagaaagtttatgaatttgtgttggactgcttcaaagccatcctaggccgcagttggacaagcttgctttatacctcatagttagagaaggtaatatttagcaagcagagttgttaaagaggaaggccttggctactcaggttatatgacagataggattcatttaggtcaatgcaaggatccaggggagagaacctctgtttacttcatttgtctccccatctcaaaaggactaatatccttgtaaataggagtgtgcagagctgtttgagaacactgctcgtcacttccaaaccccacaggctgaatgatgattgccctcctgatctctaagaaatggagtatgttagggcttaggcctggggccctttatcttctctgtcttcatctcttcttaggtgatctcacccagtaccatgctgtcaataagctgatgactcccaaatctatatatccagccctggttcctctctgggctccactcaacatctcctccccaaccttcctcctctcaatgaaaagcactcaaatgcccagttgctaagaccaaaaacatggtatgtctcactttccctcacctcccacatctaatccatcagcagttcctgtcagttttacatctaaaatactgtgtacctgaatttgaccactcctcatcattcccactcctaccaccatatatttcaggtcatcttccccttcctggactgttgcaatggtctcttccccccgtctctgcttccattcccatcccccaacaatatattctgcacagaactgtgagagatgatcatacgaaataatataaggtttgagatgtacttcaaaagaatttgagaaatagggggctagatgggtatagagatgaaaagattatccatacaatgataattattgaagctgactgaaaagggtacatggggttcatgatactattttctctactgtgtttgtttgaaattttccataataaaaaaagttgaaggaaaaaa

SEQ ID NO: 320494 - DNA, 999 bp, Homo sapiens
ggcggggcctcccaattaaggggatgagggtcaggaagggaacctgggacgctgccaactccatcccccagggattgtgaagggggttccttctggctgtgacagtgctgaacgaggccagagagtgcagctgcctggaggcacaagcctcctcctgatccagggggctccagggagaccaaagcagctgtcaagatgagagaaattgaaaaagaaaatggaaaactctccagcctggctctcagcttctgcatctccatgcaagaccagagacccacatcactccctcactccacccagttccactccaacaatacctgggccctgccaggagtgagaaaacggtcctcttcctgtggataggttgctctctcctcttccagatcagggtattcattggtgctggggaatccacagccctcttcgccaagcaccactggctcagatgcagccccagagctgccccactgggccttcttcagtctgtggagactttaggctgaggagagaagtgcctggaggccaggcttcctgtctctccattcttcacctttctgttctgaaatacttcctgctgggactccagggagttgtcatttgacctttaaccctccactcccaattttctgctcccctcagactgaagcatattgtctaggaacccagaggtgaccccaacctccccactgtcctccagttctatggtttgctttcctgtcttcagtgatctagtttccactccttccagctcatgtggctcatcctccttactgcagttccctccttctttccatattacagaaatctgtttcaatcacaccaaagcccacagcttccttccaagcaacctcccctcaaagctcccctcaaacctcccctcaaagctgtcaaccccttccttagctcaaactgttctgcccccaaatcctgcatgactcccagaacccagatgtctcccttccttactcgttgatgatgctctgacgccttcttaggtcc

SEQ ID NO: 320495 - DNA, 457 bp, Homo sapiens
caactcgggctccacttgcttgctttttaataacagagcagagagaatacaaggccaggagcggggcctggaggaaaacaggacttggggtgctcctgtgagagcggtgggttgagatgggagcccacgggggctgttaatgcctagttcagaggatgggaaaggcagttggagagacgaaggaaggggaaacgccttcatgtcagcaatgagggtgactctagtgacggaactagtcttgggtccctggggcaccactagcctctcggcatcggtggtttctccttactcttcagacgctgccaactccatcccccagggattgtgaagggggttccttctggctgtgacagtgctgaacgaggccagagagtgcagctgcctggaggcacaagcctcctcctgatccagggggctccagggagaccaaagcagctgtcaagatgagagaaattga

SEQ ID NO: 320496 - DNA, 1121 bp, Homo sapiens
ctcaaaaaaaaaaaaaaaaaaaaaaaaaaattatttgttctgtctcaggtcttagggaccccttacctcagctaatgtctctgtcccctaaatgcacatcggtgggcagggcaaacccgtaggtgcccttatccctcccaaggctgcactgcaaagctcctgtgtttccattgcccactttcttctccctctcctttcttttctgattataccaaacaggaatgactcgtgtacttgagtcaaaatcctgatggcattgggaaaagtaaactgaaggaatttttgtacacttataccagctaagatgttctgactgcaacgacagaaaactccagctcaactggcttaaacaagaacagggctctctcacgtgagaagccaagagttagaacaactccaggcccagaatggtcggagctcaagctgcagttctcttagctcagtcttcctcgtactgtgggcttttattggagactagctctcctcatggtggcaagatggctgcaggagttcaggtatctcatccagaagcaagaaaagggcatgtcttgcttgcgtctctaggcgtaagggaactggtccagatgtccccgccccacatcccttcagatcccaattggccagaatatggcacgtgcccatgtttcaaccaatcatgggcaaggacatgggaccagcatgattggcctagacccctggagcctggggctgggcccagcatcccctgaatacacggccatctggaggagaaggtaactgaatttcactggggatctgtgataaaagggagcatgggtgttggggagacacctgttccagttgggtttcctatgaggtccaggacagggcttggtgggcactcggaagccagtgtctgaagtgctcagcatcctcctcttcctcggtggtgggtgtccaccgcccaggccccacccctggccttggacacttcatggaaacactgctgatttgctgtggtgttgggtggctcctatctattccccgtaagtgctggcctctgttgacaccatttctgctacctcatctgagattgttctcatcagctcacagagattcatttcagtgaatgaaccaaatctaagctaaaaagcataaaggag

SEQ ID NO: 320497 - DNA, 446 bp, Homo sapiens
ccctggcaaaggcgaagataacaactcaatttagcctgatattctaatgtgcccttgagaaagtgccctcataattaaggatttgcacaatttctattgggatgggggaggaatcgtgtgccacattatttatcaatatcaaaagagtcactttggaattcagcagtctggagtgcctgcaaacaacagatattctcacccaatgctaatctcgagccacatttagccaaaatgcaagaggtttttattggcacatgtggtgcccttgggtggcattgattaccatcgggtttctaaaggattatttgacagggcttagcacaatcagctcatgaactgccctcctctgctccacctctcccttttgcatcttgttggtacagcttcctgagaaacgctggttgtctgctgccaattcagctcatccagttgcagagggaacaagc

SEQ ID NO: 320498 - DNA, 754 bp, Homo sapiens
  misc_feature (33)..(33): n is a, c, g, or t
gagagagagagagagagagagagagagagaganagagagagagagagagagagagagagagtattggtgcgtttcttaaccctttccagagtcctcctttgcctgatcctccaacagctgtcacaacttgtgttgagcaagcagtagcatttgcttcctcccaacaagcagctgggttaggaaaaccatgggtaaggacggactcacttctctttttagttgaggccttctagttaccacattactctgcctctgtatataggtggttttctttaagtggggtgggaaggggagcacaatttcccttcatactccttttaagcagtgagttatggtggtggtctcatgaagaaaagaccttttggcccaatctctgccatatcagtgaacctttagaaactcaaaaactgagaaatttactacagtagttagaattatatcacttcactgttctctacttgcaagcctcaaagagagaaagtttcgttatattaaaacacttaggtaacttttcggtctttcccatttctacctaagtcagctttcatctttgtggatggtgtctcctttactaaataagaaaataacaaagcccttattctctttttttcttgtcctcattcttgccttgagttccagttcctctttggtgtacagacttcttggtacccagtcacctctgtcttcagcaccctcataagtcgtcactaatacacagttttgtacatgtaacattaaaggcataaatgactca

SEQ ID NO: 320499 - DNA, 617 bp, Homo sapiens
cggtggatggtgtctcctttactaaataagaaagctgggttaggaaaaccatgggtaaggacggactcacttctctttttagttgaggccttctagttaccacattactctgcctctgtatataggtggttttctttaagtggggtgggaaggggagcacaatttcccttcatactccttttaagcagtgagttatggtggtggtctcatgaagaaaagaccttttggcccaatctctgccatatcagtgaacctttagaaactcaaaaactgagaaatttactacagtagttagaattatatcacttcactgttctctacttgcaagcctcaaagagagaaagtttcgttatattaaaacacttaggtaacttttcggtctttcccatttctacctaagtcagctttcatctttgtggatggtgtctcctttactaaataagaaaataacaaagcccttattctctttttttcttgtcctcattcttgccttgagttccagttcctctttggtgtacagacttcttggtacccagtcacctctgtcttcagcaccctcataagtcgtcactaatacacagttttgtacatgtaacattaaaggcataaatgactca

SEQ ID NO: 320500 - DNA, 987 bp, Homo sapiens
ttttttttttttcctgattcttcatcattcaacttgagattattctaatcttgatttgattctcatgctcctttcaaaagagcatactagtttggggtggttggttattttcttaaccttagcaagccagcttatttcctatggaagcagaactggaaacagcagatgtccaccatgcttatacaggacactacacactgtctcgacaagccatgttctttcctccctcttcgtgagcactttctctggtgatgagttagtatggactacttgaacctcaaaactgggcctctcacccaaagccaaatgaagtagcgtatgccaggatgatgtttcttttgggccgttggcagtgagactgctaagcaggctgccttaggttttgctgtggcaatgctagcagattgttccctctttcaaaggggcaaaaatatcattttggtatgataactgactttctatttacagtttctggcccccaaagacaaaccaagtggagacacagcagctgtatttgaagaaggtggtgatgtggacgatttagtaagtacttttaatatgcacctggtgttctgtgattgaagtcacctgagctgtaaatacagccacaaaggctgattatcttacacttgttgcttatttgtgttttaatttccaatacaccagaagcttcctacaccattatatattgccattataaattcaatcagataggtaatttcataatagaaattcctgtgtttcatggtgtcggctatattgttcattcagattaatcctctcccttgaagggctgaaaaagagctagggaggctattccattagtagcaaaatgttgtaattcactgaaattgctgttaaccaaaaataagtaatacaacatgcagtttgtgtgggttgacaaatgaaacagcccttaaaagggctacttcttaaatgttctcaattaacttaatgtaaacaaaatagaccgataggcatttgagg

SEQ ID NO: 320501 - DNA, 3450 bp, Homo sapiens
  misc_feature (9)..(9): n is a, c, g, or t
cccgccgcncgacacgctgcgagaagacgacgaaggggggcacgccccgccccagcctagcaggaaacgaagcggctctttccgctatctgccgcttgtccaccggaagcgagttgcgacacggcaggttcccgcccggaagaagcgaccaaagcgcctgaggaccggcaacatggtgcggtcggggaataaggcagctgttgtgctgtgtatggacgtgggctttaccatgagtaactccattcctggtatagaatccccatttgaacaagcaaagaaggtgataaccatgtttgtacagcgacaggtgtttgctgagaacaaggatgagattgctttagtcctgtttggtacagatggcactgacaatcccctttctggtggggatcagtatcagaacatcacagtgcacagacatctgatgctaccagattttgatttgctggaggacattgaaagcaaaatccaaccaggttctcaacaggctgacttcctggatgcactaatcgtgagcatggatgtgattcaacatgaaacaataggaaagaagtttgagaagaggcatattgaaatattcactgacctcagcagccgattcagcaaaagtcagctggatattataattcatagcttgaagaaatgtgacatctccctgcaattcttcttgcctttctcacttggcaaggaagatggaagtggggacagaggagatggcccctttcgcttaggtggccatgggccttcctttccactaaaaggaattaccgaacagcaaaaagaaggtcttgagatagtgaaaatggtgatgatatctttagaaggtgaagatgggttggatgaaatttattcattcagtgagagtctgagaaaactgtgcgtcttcaagaaaattgagaggcattccattcactggccctgccgactgaccattggctccaatttgtctataaggattgcagcctataaatcgattctacaggagagagttaaaaagacttggacagttgtggatgcaaaaaccctaaaaaaagaagatatacaaaaagaaacagtttattgcttaaatgatgatgatgaaactgaagttttaaaagaggatattattcaagggttccgctatggaagtgatatagttcctttctctaaagtggatgaggaacaaatgaaatataaatcggaggggaagtgcttctctgttttgggattttgtaaatcttctcaggttcagagaagattcttcatgggaaatcaagttctaaaggtctttgcagcaagagatgatgaggcagctgcagttgcactttcctccctgattcatgctttggatgacttagacatggtggccatagttcgatatgcttatgacaaaagagctaatcctcaagtcggcgtggcttttcctcatatcaagcataactatgagtgtttagtgtatgtgcagctgcctttcatggaagacttgcggcaatacatgttttcatccttgaaaaacagtaagaaatatgctcccaccgaggcacagttgaatgctgttgatgctttgattgactccatgagcttggcaaagaaagatgagaagacagacacccttgaagacttgtttccaaccaccaaaatcccaaatcctcgatttcagagattatttcagtgtctgctgcacagagctttacatccccgggagcctctacccccaattcagcagcatatttggaatatgctgaatcctcccgctgaggtgacaacgaaaagtcagattcctctctctaaaataaagaccctttttcctctgattgaagccaagaaaaaggatcaagtgactgctcaggaaattttccaagacaaccatgaagatggacctacagctaaaaaattaaagactgagcaagggggagcccacttcagcgtctccagtctggctgaaggcagtgtcacctctgttggaagtgtgaatcctgctgaaaacttccgtgttctagtgaaacagaagaaggccagctttgaggaagcgagtaaccagctcataaatcacatcgaacagtttttggatactaatgaaacaccgtattttatgaagagcatagactgcatccgagccttccgggaagaagccattaagttttcagaagagcagcgctttaacaacttcctgaaagcccttcaagagaaagtggaaattaaacaattaaatcatttctgggaaattgttgtccaggatggaattactctgatcaccaaagaggaagcctctggaagttctgtcacagctgaggaagccaaaaagtttctggcccccaaagacaaaccaagtggagacacagcagctgtatttgaagaaggtggtgatgtggacgatttattggacatgatataggtcgtggatgtatggggaatctaagagagctgccatcgctgtgatgctgggagttctaacaaaacaagttggatgcggccattcaaggggagccaaaatctcaagaaattcccagcaggttacctggaggcggatcatctaattctctgtggaatgaatacacacatatatattacaagggataatttagaccccatacaagtttataaagagtcattgttattttctggttggtgtattattttttctgtggtcttactgatctttgtatattacatacatgctttgaagtttctggaaagtagatcttttcttgacctagtatatcagtgacagttgcagcccttgtgatgtgattagtgtctcatgtggaaccatggcatggttattgatgagtttcttaaccctttccagagtcctcctttgcctgatcctccaacagctgtcacaacttgtgttgagcaagcagtagcatttgcttcctcccaacaagcagctgggttaggaaaaccatgggtaaggacggactcacttctctttttagttgaggccttctagttaccacattactctgcctctgtatataggtggttttctttaagtggggtgggaaggggagcacaatttcccttcatactccttttaagcagtgagttatggtggtggtctcatgaagaaaagaccttttggcccaatctctgccatatcagtgaacctttagaaactcaaaaactgagaaatttactacagtagttagaattatatcacttcactgttctctacttgcaagcctcaaagagagaaagtttcgttatattaaaacacttaggtaacttttcggtctttcccatttctacctaagtcagctttcatctttgtggatggtgtctcctttactaaataagaaaataacaaagcccttattctctttttttcttgtcctcattcttgccttgagttccagttcctctttggtgtacagacttcttggtacccagtcacctctgtcttcagcaccctcataagtcgtcactaatacacagttttgtacatgtaacattaaaggcataaatgactca

SEQ ID NO: 320502 - DNA, 3496 bp, Homo sapiens
  misc_feature (3449)..(3449): n is a, c, g, or t
atgctcagagttccggggcacggtttccccgcccctttcaggcctagcaggaaacgaagcggctctttccgctatctgccgcttgtccaccggaagcgagttgcgacacggcaggttcccgcccggaagaagcgaccaaagcgcctgaggaccggcaacatggtgcggtcggggaataaggcagctgttgtgctgtgtatggacgtgggctttaccatgagtaactccattcctggtatagaatccccatttgaacaagcaaagaaggtgataaccatgtttgtacagcgacaggtgtttgctgagaacaaggatgagattgctttagtcctgtttggtacagatggcactgacaatcccctttctggtggggatcagtatcagaacatcacagtgcacagacatctgatgctaccagattttgatttgctggaggacattgaaagcaaaatccaaccaggttctcaacaggctgacttcctggatgcactaatcgtgagcatggatgtgattcaacatgaaacaataggaaagaagtttgagaagaggcatattgaaatattcactgacctcagcagccgattcagcaaaagtcagctggatattataattcatagcttgaagaaatgtgacatctccctgcaattcttcttgcctttctcacttggcaaggaagatggaagtggggacagaggagatggcccctttcgcttaggtggccatgggccttcctttccactaaaaggaattaccgaacagcaaaaagaaggtcttgagatagtgaaaatggtgatgatatctttagaaggtgaagatgggttggatgaaatttattcattcagtgagagtctgagaaaactgtgcgtcttcaagaaaattgagaggcattccattcactggccctgccgactgaccattggctccaatttgtctataaggattgcagcctataaatcgattctacaggagagagttaaaaagacttggacagttgtggatgcaaaaaccctaaaaaaagaagatatacaaaaagaaacagtttattgcttaaatgatgatgatgaaactgaagttttaaaagaggatattattcaagggttccgctatggaagtgatatagttcctttctctaaagtggatgaggaacaaatgaaatataaatcggaggggaagtgcttctctgttttgggattttgtaaatcttctcaggttcagagaagattcttcatgggaaatcaagttctaaaggtctttgcagcaagagatgatgaggcagctgcagttgcactttcctccctgattcatgctttggatgacttagacatggtggccatagttcgatatgcttatgacaaaagagctaatcctcaagtcggcgtggcttttcctcatatcaagcataactatgagtgtttagtgtatgtgcagctgcctttcatggaagacttgcggcaatacatgttttcatccttgaaaaacagtaagaaatatgctcccaccgaggcacagttgaatgctgttgatgctttgattgactccatgagcttggcaaagaaagatgagaagacagacacccttgaagacttgtttccaaccaccaaaatcccaaatcctcgatttcagagattatttcagtgtctgctgcacagagctttacatccccgggagcctctacccccaattcagcagcatatttggaatatgctgaatcctcccgctgaggtgacaacgaaaagtcagattcctctctctaaaataaagaccctttttcctctgattgaagccaagaaaaaggatcaagtgactgctcaggaaattttccaagacaaccatgaagatggacctacagctaaaaaattaaagactgagcaagggggagcccacttcagcgtctccagtctggctgaaggcagtgtcacctctgttggaagtgtgaatcctgctgaaaacttccgtgttctagtgaaacagaagaaggccagctttgaggaagcgagtaaccagctcataaatcacatcgaacagtttttggatactaatgaaacaccgtattttatgaagagcatagactgcatccgagccttccgggaagaagccattaagttttcagaagagcagcgctttaacaacttcctgaaagcccttcaagagaaagtggaaattaaacaattaaatcatttctgggaaattgttgtccaggatggaattactctgatcaccaaagaggaagcctctggaagttctgtcacagctgaggaagccaaaaagtttctggcccccaaagacaaaccaagtggagacacagcagctgtatttgaagaaggtggtgatgtggacgatttattggacatgatataggtcgtggatgtatggggaatctaagagagctgccatcgctgtgatgctgggagttctaacaaaacaagttggatgcggccattcaaggggagccaaaatctcaagaaattcccagcaggttacctggaggcggatcatctaattctctgtggaatgaatacacacatatatattacaagggataatttagaccccatacaagtttataaagagtcattgttattttctggttggtgtattattttttctgtggtcttactgatctttgtatattacatacatgctttgaagtttctggaaagtagatcttttcttgacctagtatatcagtgacagttgcagcccttgtgatgtgattagtgtctcatgtggaaccatggcatggttattgatgagtttcttaaccctttccagagtcctcctttgcctgatcctccaacagctgtcacaacttgtgttgagcaagcagtagcatttgcttcctcccaacaagcagctgggttaggaaaaccatgggtaaggacggactcacttctctttttagttgaggccttctagttaccacattactctgcctctgtatataggtggttttctttaagtggggtgggaaggggagcacaatttcccttcatactccttttaagcagtgagttatggtggtggtctcatgaagaaaagaccttttggcccaatctctgccatatcagtgaacctttagaaactcaaaaactgagaaatttactacagtagttagaattatatcacttcactgttctctacttgcaagcctcaaagagagaaagtttcgttatattaaaacacttaggtaacttttcggtctttcccatttctacctaagtcagctttcatctttgtggatggtgtctcctttactaaataagaaaataacaaagcccttattctctttttttcttgtcctcattcttgccttgagttccagttcctctttggtgtacagacttcttggtacccagtcacctctgtcttcagcaccctcataagtcgtcactaatacacagttttgtacatgtaacattaaaggcataaatgactcaaaaaaaaaaaanaccacaaacaaaaaaaaaaattggtcggcgctgcacctcaaaaagta

SEQ ID NO: 320503 - DNA, 4036 bp, Homo sapiens
atgctcagagttccggggcacggtttccccgcccctttcaggcctagcaggaaacgaagcggctctttccgctatctgccgcttgtccaccggaagcgagttgcgacacggcaggttcccgcccggaagaagcgaccaaagcgcctgaggaccggcaacatggtgcggtcggggaataaggcagctgttgtgctgtgtatggacgtgggctttaccatgagtaactccattcctggtatagaatccccatttgaacaagcaaagaaggtgataaccatgtttgtacagcgacaggtgtttgctgagaacaaggatgagattgctttagtcctgtttggtacagatggcactgacaatcccctttctggtggggatcagtatcagaacatcacagtgcacagacatctgatgctaccagattttgatttgctggaggacattgaaagcaaaatccaaccaggttctcaacaggctgacttcctggatgcactaatcgtgagcatggatgtgattcaacatgaaacaataggaaagaagtttgagaagaggcatattgaaatattcactgacctcagcagccgattcagcaaaagtcagctggatattataattcatagcttgaagaaatgtgacatctccctgcaattcttcttgcctttctcacttggcaaggaagatggaagtggggacagaggagatggcccctttcgcttaggtggccatgggccttcctttccactaaaaggaattaccgaacagcaaaaagaaggtcttgagatagtgaaaatggtgatgatatctttagaaggtgaagatgggttggatgaaatttattcattcagtgagagtctgagaaaactgtgcgtcttcaagaaaattgagaggcattccattcactggccctgccgactgaccattggctccaatttgtctataaggattgcagcctataaatcgattctacaggagagagttaaaaagacttggacagttgtggatgcaaaaaccctaaaaaaagaagatatacaaaaagaaacagtttattgcttaaatgatgatgatgaaactgaagttttaaaagaggatattattcaagggttccgctatggaagtgatatagttcctttctctaaagtggatgaggaacaaatgaaatataaatcggaggggaagtgcttctctgttttgggattttgtaaatcttctcaggttcagagaagattcttcatgggaaatcaagttctaaaggtctttgcagcaagagatgatgaggcagctgcagttgcactttcctccctgattcatgctttggatgacttagacatggtggccatagttcgatatgcttatgacaaaagagctaatcctcaagtcggcgtggcttttcctcatatcaagcataactatgagtgtttagtgtatgtgcagctgcctttcatggaagacttgcggcaatacatgttttcatccttgaaaaacagtaagaaatatgctcccaccgaggcacagttgaatgctgttgatgctttgattgactccatgagcttggcaaagaaagatgagaagacagacacccttgaagacttgtttccaaccaccaaaatcccaaatcctcgatttcagagattatttcagtgtctgctgcacagagctttacatccccgggagcctctacccccaattcagcagcatatttggaatatgctgaatcctcccgctgaggtgacaacgaaaagtcagattcctctctctaaaataaagaccctttttcctctgattgaagccaagaaaaaggatcaagtgactgctcaggaaattttccaagacaaccatgaagatggacctacagctaaaaaattaaagactgagcaagggggagcccacttcagcgtctccagtctggctgaaggcagtgtcacctctgttggaagtgtgaatcctgctgaaaacttccgtgttctagtgaaacagaagaaggccagctttgaggaagcgagtaaccagctcataaatcacatcgaacagtttttggatactaatgaaacaccgtattttatgaagagcatagactgcatccgagccttccgggaagaagccattaagttttcagaagagcagcgctttaacaacttcctgaaagcccttcaagagaaagtggaaattaaacaattaaatcatttctgggaaattgttgtccaggatggaattactctgatcaccaaagaggaagcctctggaagttctgtcacagctgaggaagccaaaaagtttctggcccccaaagacaaaccaagtggagacacagcagctgtatttgaagaaggtggtgatgtggacgatttattggacatgatataggtcgtggatgtatggggaatctaagagagctgccatcgctgtgatgctgggagttctaacaaaacaagttggatgcggccattcaaggggagccaaaatctcaagaaattcccagcaggttacctggaggcggatcatctaattctctgtggaatgaatacacacatatatattacaagggataatttagaccccatacaagtttataaagagtcattgttattttctggttggtgtattattttttctgtggtcttactgatctttgtatattacatacatgctttgaagtttctggaaagtagatcttttcttgacctagtatatcagtgacagttgcagcccttgtgatgtgattagtgtctcatgtggaaccatggcatggttattgatgagtttcttaaccctttccagagtcctcctttgcctgatcctccaacagctgtcacaacttgtgttgagcaagcagtagcatttgcttcctcccaacaagcagctgggttaggaaaaccatgggtaaggacggactcacttctctttttagttgaggccttctagttaccacattactctgcctctgtatataggtggttttctttaagtggggtgggaaggggagcacaatttcccttcatactccttttaagcagtgagttatggtggtggtctcatgaagaaaagaccttttggcccaatctctgccatatcagtgaacctttagaaactcaaaaactgagaaatttactacagtagttagaattatatcacttcactgttctctacttgcaagcctcaaagagagaaagtttcgttatattaaaacacttaggtaacttttcggtctttcccatttctacctaagtcagctttcatctttgtggatggtgtctcctttactaaataagaaaataacaaagcccttattctctttttttcttgtcctcattcttgccttgagttccagttcctctttggtgtacagacttcttggtacccagtcacctctgtcttcagcaccctcataagtcgtcactaatacacagttttgtacatgtaacattaaaggcataaatgactcatctctctgtgaattgctgctaattattgtctgcaaaagacttcttcagtgctctgctgagaattgaacacccttatccattgattgaaaatggatctgcaagatagaacatcattcatttagctgaggagagaaaggagtgctttactttgggcttctaggacatcctctcaatactatacacacttgcatcaaacttgacatacaggtgctcatttaaagtaaccccaacagaggatgacatatagtttctggttagatagttaaagcccaggggttgtttgtgacttggacaaaactgagacattcttagaaccacagagagtggaaactttgatctctgaaatcttcattattctcatcagatcctcccagcaatatgaatcagctcagtaagtatggctccatcagcagcccctgtctttggcagtttggggaatttcttttgggaaacgtcagtctttttgtcatgccaggaaaagtttaaatcaagttagtcctttagatcttctgatactttttgacttagtttgaatgcagcaggattatttgtgcttctctaaccctgttttacctaaatctcaatacctcaaggaagaa

SEQ ID NO: 320504 - DNA, 3819 bp, Homo sapiens
atgctcagagttccggggcacggtttccccgcccctttcaggcctagcaggaaacgaagcggctctttccgctatctgccgcttgtccaccggaagcgagttgcgacacggcaggttcccgcccggaagaagcgaccaaagcgcctgaggaccggcaacatggtgcggtcggggaataaggcagctgttgtgctgtgtatggacgtgggctttaccatgagtaactccattcctggtatagaatccccatttgaacaagcaaagaaggtgataaccatgtttgtacagcgacaggtgtttgctgagaacaaggatgagattgctttagtcctgtttggtacagatggcactgacaatcccctttctggtggggatcagtatcagaacatcacagtgcacagacatctgatgctaccagattttgatttgctggaggacattgaaagcaaaatccaaccaggttctcaacaggctgacttcctggatgcactaatcgtgagcatggatgtgattcaacatgaaacaataggaaagaagtttgagaagaggcatattgaaatattcactgacctcagcagccgattcagcaaaagtcagctggatattataattcatagcttgaagaaatgtgacatctccctgcaattcttcttgcctttctcacttggcaaggaagatggaagtggggacagaggagatggcccctttcgcttaggtggccatgggccttcctttccactaaaaggaattaccgaacagcaaaaagaaggtcttgagatagtgaaaatggtgatgatatctttagaaggtgaagatgggttggatgaaatttattcattcagtgagagtctgagaaaactgtgcgtcttcaagaaaattgagaggcattccattcactggccctgccgactgaccattggctccaatttgtctataaggattgcagcctataaatcgattctacaggagagagttaaaaagacttggacagttgtggatgcaaaaaccctaaaaaaagaagatatacaaaaagaaacagtttattgcttaaatgatgatgatgaaactgaagttttaaaagaggatattattcaagggttccgctatggaagtgatatagttcctttctctaaagtggatgaggaacaaatgaaatataaatcggaggggaagtgcttctctgttttgggattttgtaaatcttctcaggttcagagaagattcttcatgggaaatcaagttctaaaggtctttgcagcaagagatgatgaggcagctgcagttgcactttcctccctgattcatgctttggatgacttagacatggtggccatagttcgatatgcttatgacaaaagagctaatcctcaagtcggcgtggcttttcctcatatcaagcataactatgagtgtttagtgtatgtgcagctgcctttcatggaagacttgcggcaatacatgttttcatccttgaaaaacagtaagaaatatgctcccaccgaggcacagttgaatgctgttgatgctttgattgactccatgagcttggcaaagaaagatgagaagacagacacccttgaagacttgtttccaaccaccaaaatcccaaatcctcgatttcagagattatttcagtgtctgctgcacagagctttacatccccgggagcctctacccccaattcagcagcatatttggaatatgctgaatcctcccgctgaggtgacaacgaaaagtcagattcctctctctaaaataaagaccctttttcctctgattgaagccaagaaaaaggatcaagtgactgctcaggaaattttccaagacaaccatgaagatggacctacagctaaaaaattaaagactgagcaagggggagcccacttcagcgtctccagtctggctgaaggcagtgtcacctctgttggaagtgtgaatcctgctgaaaacttccgtgttctagtgaaacagaagaaggccagctttgaggaagcgagtaaccagctcataaatcacatcgaacagtttttggatactaatgaaacaccgtattttatgaagagcatagactgcatccgagccttccgggaagaagccattaagttttcagaagagcagcgctttaacaacttcctgaaagcccttcaagagaaagtggaaattaaacaattaaatcatttctgggaaattgttgtccaggatggaattactctgatcaccaaagaggaagcctctggaagttctgtcacagctgaggaagccaaaaagtttctggcccccaaagacaaaccaagtggagacacagcagctgtatttgaagaaggtggtgatgtggacgatttattggacatgatataggtcgtggatgtatggggaatctaagagagctgccatcgctgtgatgctgggagttctaacaaaacaagttggatgcggccattcaaggggagccaaaatctcaagaaattcccagcaggttacctggaggcggatcatctaattctctgtggaatgaatacacacatatatattacaagggataatttagaccccatacaagtttataaagagtcattgttattttctggttggtgtattattttttctgtggtcttactgatctttgtatattacatacatgctttgaagtttctggaaagtagatcttttcttgacctagtatatcagtgacagttgcagcccttgtgatgtgattagtgtctcatgtggaaccatggcatggttattgatgagtttcttaaccctttccagagtcctcctttgcctgatcctccaacagctgtcacaacttgtgttgagcaagcagtagcatttgcttcctcccaacaagcagctgggttaggaaaaccatgggtaaggacggactcacttctctttttagttgaggccttctagttaccacattactctgcctctgtatataggtggttttctttaagtggggtgggaaggggagcacaatttcccttcatactccttttaagcagtgagttatggtggtggtctcatgaagaaaagaccttttggcccaatctctgccatatcagtgaacctttagaaactcaaaaactgagaaatttactacagtagttagaattatatcacttcactgttctctacttgcaagcctcaaagagagaaagtttcgttatattaaaacacttaggtaacttttcggtctttcccatttctacctaagtcagctttcatctttgtggatggtgtctcctttactaaataagaaaataacaaagcccttattctctttttttcttgtcctcattcttgccttgagttccagttcctctttggtgtacagacttcttggtacccagtcacctctgtcttcagcaccctcataagtcgtcactaatacacagttttgtacatgtaacattaaaggcataaatgactcaaaaaaaaaaaacaaaaaaaagaaaaaaaaaaaaaaaaaaaaaaaaaaaaaaaaaaaaaaaaaaaaaaaaaaaaaaaaaaaaaaaaaaaaaaaaaaaaaaaaaaaaaaaaaaaaaaggggggggggggcggccgaagcatacccacccccaccggggcgagccccaaaacaccaacccacgagccgcttgacagacaggagaggccacagccaacacagagctacacataacaaatacaaggacccggcccgaccacgcacaacatgacaagtggcgggtacaacaacacgcctcagcgagcttcagggaaagaaccactcggtggggaagagaacgaggcacaccaaaacaaaaaagagcgtgggcagaaaaaaccggagaa

SEQ ID NO: 320505 - DNA, 3472 bp, Homo sapiens
  misc_feature (3424)..(3424): n is a, c, g, or t
atgctcagagttccggggcacggtttccccgcccctttcaggcctagcaggaaacgaagcggctctttccgctatctgccgcttgtccaccggaagcgagttgcgacacggcaggttcccgcccggaagaagcgaccaaagcgcctgaggaccggcaacatggtgcggtcggggaataaggcagctgttgtgctgtgtatggacgtgggctttaccatgagtaactccattcctggtatagaatccccatttgaacaagcaaagaaggtgataaccatgtttgtacagcgacaggtgtttgctgagaacaaggatgagattgctttagtcctgtttggtacagatggcactgacaatcccctttctggtggggatcagtatcagaacatcacagtgcacagacatctgatgctaccagattttgatttgctggaggacattgaaagcaaaatccaaccaggttctcaacaggctgacttcctggatgcactaatcgtgagcatggatgtgattcaacatgaaacaataggaaagaagtttgagaagaggcatattgaaatattcactgacctcagcagccgattcagcaaaagtcagctggatattataattcatagcttgaagaaatgtgacatctccctgcaattcttcttgcctttctcacttggcaaggaagatggaagtggggacagaggagatggcccctttcgcttaggtggccatgggccttcctttccactaaaaggaattaccgaacagcaaaaagaaggtcttgagatagtgaaaatggtgatgatatctttagaaggtgaagatgggttggatgaaatttattcattcagtgagagtctgagaaaactgtgcgtcttcaagaaaattgagaggcattccattcactggccctgccgactgaccattggctccaatttgtctataaggattgcagcctataaatcgattctacaggagagagttaaaaagacttggacagttgtggatgcaaaaaccctaaaaaaagaagatatacaaaaagaaacagtttattgcttaaatgatgatgatgaaactgaagttttaaaagaggatattattcaagggttccgctatggaagtgatatagttcctttctctaaagtggatgaggaacaaatgaaatataaatcggaggggaagtgcttctctgttttgggattttgtaaatcttctcaggttcagagaagattcttcatgggaaatcaagttctaaaggtctttgcagcaagagatgatgaggcagctgcagttgcactttcctccctgattcatgctttggatgacttagacatggtggccatagttcgatatgcttatgacaaaagagctaatcctcaagtcggcgtggcttttcctcatatcaagcataactatgagtgtttagtgtatgtgcagctgcctttcatggaagacttgcggcaatacatgttttcatccttgaaaaacagtaagaaatatgctcccaccgaggcacagttgaatgctgttgatgctttgattgactccatgagcttggcaaagaaagatgagaagacagacacccttgaagacttgtttccaaccaccaaaatcccaaatcctcgatttcagagattatttcagtgtctgctgcacagagctttacatccccgggagcctctacccccaattcagcagcatatttggaatatgctgaatcctcccgctgaggtgacaacgaaaagtcagattcctctctctaaaataaagaccctttttcctctgattgaagccaagaaaaaggatcaagtgactgctcaggaaattttccaagacaaccatgaagatggacctacagctaaaaaattaaagactgagcaagggggagcccacttcagcgtctccagtctggctgaaggcagtgtcacctctgttggaagtgtgaatcctgctgaaaacttccgtgttctagtgaaacagaagaaggccagctttgaggaagcgagtaaccagctcataaatcacatcgaacagtttttggatactaatgaaacaccgtattttatgaagagcatagactgcatccgagccttccgggaagaagccattaagttttcagaagagcagcgctttaacaacttcctgaaagcccttcaagagaaagtggaaattaaacaattaaatcatttctgggaaattgttgtccaggatggaattactctgatcaccaaagaggaagcctctggaagttctgtcacagctgaggaagccaaaaagtttctggcccccaaagacaaaccaagtggagacacagcagctgtatttgaagaaggtggtgatgtggacgatttattggacatgatataggtcgtggatgtatggggaatctaagagagctgccatcgctgtgatgctgggagttctaacaaaacaagttggatgcggccattcaaggggagccaaaatctcaagaaattcccagcaggttacctggaggcggatcatctaattctctgtggaatgaatacacacatatatattacaagggataatttagaccccatacaagtttataaagagtcattgttattttctggttggtgtattattttttctgtggtcttactgatctttgtatattacatacatgctttgaagtttctggaaagtagatcttttcttgacctagtatatcagtgacagttgcagcccttgtgatgtgattagtgtctcatgtggaaccatggcatggttattgatgagtttcttaaccctttccagagtcctcctttgcctgatcctccaacagctgtcacaacttgtgttgagcaagcagtagcatttgcttcctcccaacaagcagctgggttaggaaaaccatgggtaaggacggactcacttctctttttagttgaggccttctagttaccacattactctgcctctgtatataggtggttttctttaagtggggtgggaaggggagcacaatttcccttcatactccttttaagcagtgagttatggtggtggtctcatgaagaaaagaccttttggcccaatctctgccatatcagtgaacctttagaaactcaaaaactgagaaatttactacagtagttagaattatatcacttcactgttctctacttgcaagcctcaaagagagaaagtttcgttatattaaaacacttaggtaacttttcggtctttcccatttctacctaagtcagctttcatctttgtggatggtgtctcctttactaaataagaaaataacaaagcccttattctctttttttttgagtcatttatgcctttaatgttacatgtacaaaactgtgtattagtgacgacttatgagggtgctgaagacagaggtgactgggtaccaagaagtctgtacaccaaagaggaactggaactcaaggcnagaatgaggacaagaaaaaaagtcgacgcggccgcgaatttagtagta

SEQ ID NO: 320506 - DNA, 2989 bp, Homo sapiens
atgctcagagttccggggcacggtttccccgcccctttcaggcctagcaggaaacgaagcggctctttccgctatctgccgcttgtccaccggaagcgagttgcgacacggcaggttcccgcccggaagaagcgaccaaagcgcctgaggaccggcaacatggtgcggtcggggaataaggcagctgttgtgctgtgtatggacgtgggctttaccatgagtaactccattcctggtatagaatccccatttgaacaagcaaagaaggtgataaccatgtttgtacagcgacaggtgtttgctgagaacaaggatgagattgctttagtcctgtttggtacagatggcactgacaatcccctttctggtggggatcagtatcagaacatcacagtgcacagacatctgatgctaccagattttgatttgctggaggacattgaaagcaaaatccaaccaggttctcaacaggctgacttcctggatgcactaatcgtgagcatggatgtgattcaacatgaaacaataggaaagaagtttgagaagaggcatattgaaatattcactgacctcagcagccgattcagcaaaagtcagctggatattataattcatagcttgaagaaatgtgacatctccctgcaattcttcttgcctttctcacttggcaaggaagatggaagtggggacagaggagatggcccctttcgcttaggtggccatgggccttcctttccactaaaaggaattaccgaacagcaaaaagaaggtcttgagatagtgaaaatggtgatgatatctttagaaggtgaagatgggttggatgaaatttattcattcagtgagagtctgagaaaactgtgcgtcttcaagaaaattgagaggcattccattcactggccctgccgactgaccattggctccaatttgtctataaggattgcagcctataaatcgattctacaggagagagttaaaaagacttggacagttgtggatgcaaaaaccctaaaaaaagaagatatacaaaaagaaacagtttattgcttaaatgatgatgatgaaactgaagttttaaaagaggatattattcaagggttccgctatggaagtgatatagttcctttctctaaagtggatgaggaacaaatgaaatataaatcggaggggaagtgcttctctgttttgggattttgtaaatcttctcaggttcagagaagattcttcatgggaaatcaagttctaaaggtctttgcagcaagagatgatgaggcagctgcagttgcactttcctccctgattcatgctttggatgacttagacatggtggccatagttcgatatgcttatgacaaaagagctaatcctcaagtcggcgtggcttttcctcatatcaagcataactatgagtgtttagtgtatgtgcagctgcctttcatggaagacttgcggcaatacatgttttcatccttgaaaaacagtaagaaatatgctcccaccgaggcacagttgaatgctgttgatgctttgattgactccatgagcttggcaaagaaagatgagaagacagacacccttgaagacttgtttccaaccaccaaaatcccaaatcctcgatttcagagattatttcagtgtctgctgcacagagctttacatccccgggagcctctacccccaattcagcagcatatttggaatatgctgaatcctcccgctgaggtgacaacgaaaagtcagattcctctctctaaaataaagaccctttttcctctgattgaagccaagaaaaaggatcaagtgactgctcaggaaattttccaagacaaccatgaagatggacctacagctaaaaaattaaagactgagcaagggggagcccacttcagcgtctccagtctggctgaaggcagtgtcacctctgttggaagtgtgaatcctgctgaaaacttccgtgttctagtgaaacagaagaaggccagctttgaggaagcgagtaaccagctcataaatcacatcgaacagtttttggatactaatgaaacaccgtattttatgaagagcatagactgcatccgagccttccgggaagaagccattaagttttcagaagagcagcgctttaacaacttcctgaaagcccttcaagagaaagtggaaattaaacaattaaatcatttctgggaaattgttgtccaggatggaattactctgatcaccaaagaggaagcctctggaagttctgtcacagctgaggaagccaaaaagtttctggcccccaaagacaaaccaagtggagacacagcagctgtatttgaagaaggtggtgatgtggacgatttattggacatgatataggtcgtggatgtatggggaatctaagagagctgccatcgctgtgatgctgggagttctaacaaaacaagttggatgcggccattcaaggggagccaaaatctcaagaaattcccagcaggttacctggaggcggatcatctaattctctgtggaatgaatacacacatatatattacaagggataatttagaccccatacaagtttataaagagtcattgttattttctggttggtgtattattttttctgtggtcttactgatctttgtatattacatacatgctttgaagtttctggaaagtagatcttttcttgacctagtatatcagtgacagttgcagcccttgtgatgtgattagtgtctcatgtggaaccatggcatggttattgatgagtttcttaaccctttccagagtcctcctttgcctgatcctccaacagctgtcacaacttgtgttgagcaagcagtagcatttgcttcctcccaacaagcagctgggttaggaaaaccatggttcctctttggtgtacagacttcttggtacccagtcacctctgtcttcagcaccctcataagtcgtcactaatacacagttttgtacatgtaacattaaaggcataaatgactca

SEQ ID NO: 320507 - DNA, 3305 bp, Homo sapiens
gagcgacccgcgctttaagacggctacatggtgcggtcggggaataaggcagctgttgtgctgtgtatggacgtgggctttaccatgagtaactccattcctggtatagaatccccatttgaacaagcaaagaaggtgataaccatgtttgtacagcgacaggtgtttgctgagaacaaggatgagattgctttagtcctgtttggtacagatggcactgacaatcccctttctggtggggatcagtatcagaacatcacagtgcacagacatctgatgctaccagattttgatttgctggaggacattgaaagcaaaatccaaccaggttctcaacaggctgacttcctggatgcactaatcgtgagcatggatgtgattcaacatgaaacaataggaaagaagtttgagaagaggcatattgaaatattcactgacctcagcagccgattcagcaaaagtcagctggatattataattcatagcttgaagaaatgtgacatctccctgcaattcttcttgcctttctcacttggcaaggaagatggaagtggggacagaggagatggcccctttcgcttaggtggccatgggccttcctttccactaaaaggaattaccgaacagcaaaaagaaggtcttgagatagtgaaaatggtgatgatatctttagaaggtgaagatgggttggatgaaatttattcattcagtgagagtctgagaaaactgtgcgtcttcaagaaaattgagaggcattccattcactggccctgccgactgaccattggctccaatttgtctataaggattgcagcctataaatcgattctacaggagagagttaaaaagacttggacagttgtggatgcaaaaaccctaaaaaaagaagatatacaaaaagaaacagtttattgcttaaatgatgatgatgaaactgaagttttaaaagaggatattattcaagggttccgctatggaagtgatatagttcctttctctaaagtggatgaggaacaaatgaaatataaatcggaggggaagtgcttctctgttttgggattttgtaaatcttctcaggttcagagaagattcttcatgggaaatcaagttctaaaggtctttgcagcaagagatgatgaggcagctgcagttgcactttcctccctgattcatgctttggatgacttagacatggtggccatagttcgatatgcttatgacaaaagagctaatcctcaagtcggcgtggcttttcctcatatcaagcataactatgagtgtttagtgtatgtgcagctgcctttcatggaagacttgcggcaatacatgttttcatccttgaaaaacagtaagaaatatgctcccaccgaggcacagttgaatgctgttgatgctttgattgactccatgagcttggcaaagaaagatgagaagacagacacccttgaagacttgtttccaaccaccaaaatcccaaatcctcgatttcagagattatttcagtgtctgctgcacagagctttacatccccgggagcctctacccccaattcagcagcatatttggaatatgctgaatcctcccgctgaggtgacaacgaaaagtcagattcctctctctaaaataaagaccctttttcctctgattgaagccaagaaaaaggatcaagtgactgctcaggaaattttccaagacaaccatgaagatggacctacagctaaaaaattaaagactgagcaagggggagcccacttcagcgtctccagtctggctgaaggcagtgtcacctctgttggaagtgtgaatcctgctgaaaacttccgtgttctagtgaaacagaagaaggccagctttgaggaagcgagtaaccagctcataaatcacatcgaacagtttttggatactaatgaaacaccgtattttatgaagagcatagactgcatccgagccttccgggaagaagccattaagttttcagaagagcagcgctttaacaacttcctgaaagcccttcaagagaaagtggaaattaaacaattaaatcatttctgggaaattgttgtccaggatggaattactctgatcaccaaagaggaagcctctggaagttctgtcacagctgaggaagccaaaaagtttctggcccccaaagacaaaccaagtggagacacagcagctgtatttgaagaaggtggtgatgtggacgatttattggacatgatataggtcgtggatgtatggggaatctaagagagctgccatcgctgtgatgctgggagttctaacaaaacaagttggatgcggccattcaaggggagccaaaatctcaagaaattcccagcaggttacctggaggcggatcatctaattctctgtggaatgaatacacacatatatattacaagggataatttagaccccatacaagtttataaagagtcattgttattttctggttggtgtattattttttctgtggtcttactgatctttgtatattacatacatgctttgaagtttctggaaagtagatcttttcttgacctagtatatcagtgacagttgcagcccttgtgatgtgattagtgtctcatgtggaaccatggcatggttattgatgagtttcttaaccctttccagagtcctcctttgcctgatcctccaacagctgtcacaacttgtgttgagcaagcagtagcatttgcttcctcccaacaagcagctgggttaggaaaaccatgggtaaggacggactcacttctctttttagttgaggccttctagttaccacattactctgcctctgtatataggtggttttctttaagtggggtgggaaggggagcacaatttcccttcatactccttttaagcagtgagttatggtggtggtctcatgaagaaaagaccttttggcccaatctctgccatatcagtgaacctttagaaactcaaaaactgagaaatttactacagtagttagaattatatcacttcactgttctctacttgcaagcctcaaagagagaaagtttcgttatattaaaacacttaggtaacttttcggtctttcccatttctacctaagtcagctttcatctttgtggatggtgtctcctttactaaataagaaaataacaaagcccttattctctttttttcttgtcctcattcttgccttgagttccagttcctctttggtgtacagacttcttggtacccagtcacctctgtcttcagcaccctcataagtcgtcactaatacacagttttgtacatgtaacattaaaggcataaatgactca

SEQ ID NO: 320508 - DNA, 3469 bp, Homo sapiens
agaacctactggaggtaaactgggagagcaagtgttggatctttttaacttgaactaatcttgtttggtggggtacacagtgaggaaaaagaagagctagtgacaaaatctaactcccttctcagtcttaagcaaggtgaaggcaagggagtagaagatatcaagggagtgagtggtggtagccaccaaaggaggtgcggtcggggaataaggcagctgttgtgctgtgtatggacgtgggctttaccatgagtaactccattcctggtatagaatccccatttgaacaagcaaagaaggtgataaccatgtttgtacagcgacaggtgtttgctgagaacaaggatgagattgctttagtcctgtttggtacagatggcactgacaatcccctttctggtggggatcagtatcagaacatcacagtgcacagacatctgatgctaccagattttgatttgctggaggacattgaaagcaaaatccaaccaggttctcaacaggctgacttcctggatgcactaatcgtgagcatggatgtgattcaacatgaaacaataggaaagaagtttgagaagaggcatattgaaatattcactgacctcagcagccgattcagcaaaagtcagctggatattataattcatagcttgaagaaatgtgacatctccctgcaattcttcttgcctttctcacttggcaaggaagatggaagtggggacagaggagatggcccctttcgcttaggtggccatgggccttcctttccactaaaaggaattaccgaacagcaaaaagaaggtcttgagatagtgaaaatggtgatgatatctttagaaggtgaagatgggttggatgaaatttattcattcagtgagagtctgagaaaactgtgcgtcttcaagaaaattgagaggcattccattcactggccctgccgactgaccattggctccaatttgtctataaggattgcagcctataaatcgattctacaggagagagttaaaaagacttggacagttgtggatgcaaaaaccctaaaaaaagaagatatacaaaaagaaacagtttattgcttaaatgatgatgatgaaactgaagttttaaaagaggatattattcaagggttccgctatggaagtgatatagttcctttctctaaagtggatgaggaacaaatgaaatataaatcggaggggaagtgcttctctgttttgggattttgtaaatcttctcaggttcagagaagattcttcatgggaaatcaagttctaaaggtctttgcagcaagagatgatgaggcagctgcagttgcactttcctccctgattcatgctttggatgacttagacatggtggccatagttcgatatgcttatgacaaaagagctaatcctcaagtcggcgtggcttttcctcatatcaagcataactatgagtgtttagtgtatgtgcagctgcctttcatggaagacttgcggcaatacatgttttcatccttgaaaaacagtaagaaatatgctcccaccgaggcacagttgaatgctgttgatgctttgattgactccatgagcttggcaaagaaagatgagaagacagacacccttgaagacttgtttccaaccaccaaaatcccaaatcctcgatttcagagattatttcagtgtctgctgcacagagctttacatccccgggagcctctacccccaattcagcagcatatttggaatatgctgaatcctcccgctgaggtgacaacgaaaagtcagattcctctctctaaaataaagaccctttttcctctgattgaagccaagaaaaaggatcaagtgactgctcaggaaattttccaagacaaccatgaagatggacctacagctaaaaaattaaagactgagcaagggggagcccacttcagcgtctccagtctggctgaaggcagtgtcacctctgttggaagtgtgaatcctgctgaaaacttccgtgttctagtgaaacagaagaaggccagctttgaggaagcgagtaaccagctcataaatcacatcgaacagtttttggatactaatgaaacaccgtattttatgaagagcatagactgcatccgagccttccgggaagaagccattaagttttcagaagagcagcgctttaacaacttcctgaaagcccttcaagagaaagtggaaattaaacaattaaatcatttctgggaaattgttgtccaggatggaattactctgatcaccaaagaggaagcctctggaagttctgtcacagctgaggaagccaaaaagtttctggcccccaaagacaaaccaagtggagacacagcagctgtatttgaagaaggtggtgatgtggacgatttattggacatgatataggtcgtggatgtatggggaatctaagagagctgccatcgctgtgatgctgggagttctaacaaaacaagttggatgcggccattcaaggggagccaaaatctcaagaaattcccagcaggttacctggaggcggatcatctaattctctgtggaatgaatacacacatatatattacaagggataatttagaccccatacaagtttataaagagtcattgttattttctggttggtgtattattttttctgtggtcttactgatctttgtatattacatacatgctttgaagtttctggaaagtagatcttttcttgacctagtatatcagtgacagttgcagcccttgtgatgtgattagtgtctcatgtggaaccatggcatggttattgatgagtttcttaaccctttccagagtcctcctttgcctgatcctccaacagctgtcacaacttgtgttgagcaagcagtagcatttgcttcctcccaacaagcagctgggttaggaaaaccatgggtaaggacggactcacttctctttttagttgaggccttctagttaccacattactctgcctctgtatataggtggttttctttaagtggggtgggaaggggagcacaatttcccttcatactccttttaagcagtgagttatggtggtggtctcatgaagaaaagaccttttggcccaatctctgccatatcagtgaacctttagaaactcaaaaactgagaaatttactacagtagttagaattatatcacttcactgttctctacttgcaagcctcaaagagagaaagtttcgttatattaaaacacttaggtaacttttcggtctttcccatttctacctaagtcagctttcatctttgtggatggtgtctcctttactaaataagaaaataacaaagcccttattctctttttttcttgtcctcattcttgccttgagttccagttcctctttggtgtacagacttcttggtacccagtcacctctgtcttcagcaccctcataagtcgtcactaatacacagttttgtacatgtaacattaaaggcataaatgactca

SEQ ID NO: 320509 - DNA, 3030 bp, Homo sapiens
acagacgatgcggagaaccctaaaaaaagaagatatacaaaacgaaacagtttattgcttaaatgatgatgatgaaactgaagttttaaaagaggatattattcaagggttctctgctctaggaaagaagtttgagaagaggcatattgaaatattcactgacctcagcagccgattcagcaaaagtcagctggatattataattcatagcttgaagaaatgtgacatctccctgcaattcttcttgcctttctcacttggcaaggaagatggaagtggggacagaggagatggcccctttcgcttaggtggccatgggccttcctttccactaaaaggaattaccgaacagcaaaaagaaggtcttgagatagtgaaaatggtgatgatatctttagaaggtgaagatgggttggatgaaatttattcattcagtgagagtctgagaaaactgtgcgtcttcaagaaaattgagaggcattccattcactggccctgccgactgaccattggctccaatttgtctataaggattgcagcctataaatcgattctacaggagagagttaaaaagacttggacagttgtggatgcaaaaaccctaaaaaaagaagatatacaaaaagaaacagtttattgcttaaatgatgatgatgaaactgaagttttaaaagaggatattattcaagggttccgctatggaagtgatatagttcctttctctaaagtggatgaggaacaaatgaaatataaatcggaggggaagtgcttctctgttttgggattttgtaaatcttctcaggttcagagaagattcttcatgggaaatcaagttctaaaggtctttgcagcaagagatgatgaggcagctgcagttgcactttcctccctgattcatgctttggatgacttagacatggtggccatagttcgatatgcttatgacaaaagagctaatcctcaagtcggcgtggcttttcctcatatcaagcataactatgagtgtttagtgtatgtgcagctgcctttcatggaagacttgcggcaatacatgttttcatccttgaaaaacagtaagaaatatgctcccaccgaggcacagttgaatgctgttgatgctttgattgactccatgagcttggcaaagaaagatgagaagacagacacccttgaagacttgtttccaaccaccaaaatcccaaatcctcgatttcagagattatttcagtgtctgctgcacagagctttacatccccgggagcctctacccccaattcagcagcatatttggaatatgctgaatcctcccgctgaggtgacaacgaaaagtcagattcctctctctaaaataaagaccctttttcctctgattgaagccaagaaaaaggatcaagtgactgctcaggaaattttccaagacaaccatgaagatggacctacagctaaaaaattaaagactgagcaagggggagcccacttcagcgtctccagtctggctgaaggcagtgtcacctctgttggaagtgtgaatcctgctgaaaacttccgtgttctagtgaaacagaagaaggccagctttgaggaagcgagtaaccagctcataaatcacatcgaacagtttttggatactaatgaaacaccgtattttatgaagagcatagactgcatccgagccttccgggaagaagccattaagttttcagaagagcagcgctttaacaacttcctgaaagcccttcaagagaaagtggaaattaaacaattaaatcatttctgggaaattgttgtccaggatggaattactctgatcaccaaagaggaagcctctggaagttctgtcacagctgaggaagccaaaaagtttctggcccccaaagacaaaccaagtggagacacagcagctgtatttgaagaaggtggtgatgtggacgatttattggacatgatataggtcgtggatgtatggggaatctaagagagctgccatcgctgtgatgctgggagttctaacaaaacaagttggatgcggccattcaaggggagccaaaatctcaagaaattcccagcaggttacctggaggcggatcatctaattctctgtggaatgaatacacacatatatattacaagggataatttagaccccatacaagtttataaagagtcattgttattttctggttggtgtattattttttctgtggtcttactgatctttgtatattacatacatgctttgaagtttctggaaagtagatcttttcttgacctagtatatcagtgacagttgcagcccttgtgatgtgattagtgtctcatgtggaaccatggcatggttattgatgagtttcttaaccctttccagagtcctcctttgcctgatcctccaacagctgtcacaacttgtgttgagcaagcagtagcatttgcttcctcccaacaagcagctgggttaggaaaaccatgggtaaggacggactcacttctctttttagttgaggccttctagttaccacattactctgcctctgtatataggtggttttctttaagtggggtgggaaggggagcacaatttcccttcatactccttttaagcagtgagttatggtggtggtctcatgaagaaaagaccttttggcccaatctctgccatatcagtgaacctttagaaactcaaaaactgagaaatttactacagtagttagaattatatcacttcactgttctctacttgcaagcctcaaagagagaaagtttcgttatattaaaacacttaggtaacttttcggtctttcccatttctacctaagtcagctttcatctttgtggatggtgtctcctttactaaataagaaaataacaaagcccttattctctttttttcttgtcctcattcttgccttgagttccagttcctctttggtgtacagacttcttggtacccagtcacctctgtcttcagcaccctcataagtcgtcactaatacacagttttgtacatgtaacattaaaggcataaatgactca

SEQ ID NO: 320510 - DNA, 2636 bp, Homo sapiens
agttcgacggagaactctcactggagaatttattcattcagtgagagtctgagaaaactgtgcgtcttcaagaaaattgagaggcattccattcactggccctgccgactgaccattggctccaatttgtctataaggattgcagcctataaatcgattctacaggagagagttaaaaagacttggacagttgtggatgcaaaaaccctaaaaaaagaagatatacaaaaagaaacagtttattgcttaaatgatgatgatgaaactgaagttttaaaagaggatattattcaagggttccgctatggaagtgatatagttcctttctctaaagtggatgaggaacaaatgaaatataaatcggaggggaagtgcttctctgttttgggattttgtaaatcttctcaggttcagagaagattcttcatgggaaatcaagttctaaaggtctttgcagcaagagatgatgaggcagctgcagttgcactttcctccctgattcatgctttggatgacttagacatggtggccatagttcgatatgcttatgacaaaagagctaatcctcaagtcggcgtggcttttcctcatatcaagcataactatgagtgtttagtgtatgtgcagctgcctttcatggaagacttgcggcaatacatgttttcatccttgaaaaacagtaagaaatatgctcccaccgaggcacagttgaatgctgttgatgctttgattgactccatgagcttggcaaagaaagatgagaagacagacacccttgaagacttgtttccaaccaccaaaatcccaaatcctcgatttcagagattatttcagtgtctgctgcacagagctttacatccccgggagcctctacccccaattcagcagcatatttggaatatgctgaatcctcccgctgaggtgacaacgaaaagtcagattcctctctctaaaataaagaccctttttcctctgattgaagccaagaaaaaggatcaagtgactgctcaggaaattttccaagacaaccatgaagatggacctacagctaaaaaattaaagactgagcaagggggagcccacttcagcgtctccagtctggctgaaggcagtgtcacctctgttggaagtgtgaatcctgctgaaaacttccgtgttctagtgaaacagaagaaggccagctttgaggaagcgagtaaccagctcataaatcacatcgaacagtttttggatactaatgaaacaccgtattttatgaagagcatagactgcatccgagccttccgggaagaagccattaagttttcagaagagcagcgctttaacaacttcctgaaagcccttcaagagaaagtggaaattaaacaattaaatcatttctgggaaattgttgtccaggatggaattactctgatcaccaaagaggaagcctctggaagttctgtcacagctgaggaagccaaaaagtttctggcccccaaagacaaaccaagtggagacacagcagctgtatttgaagaaggtggtgatgtggacgatttattggacatgatataggtcgtggatgtatggggaatctaagagagctgccatcgctgtgatgctgggagttctaacaaaacaagttggatgcggccattcaaggggagccaaaatctcaagaaattcccagcaggttacctggaggcggatcatctaattctctgtggaatgaatacacacatatatattacaagggataatttagaccccatacaagtttataaagagtcattgttattttctggttggtgtattattttttctgtggtcttactgatctttgtatattacatacatgctttgaagtttctggaaagtagatcttttcttgacctagtatatcagtgacagttgcagcccttgtgatgtgattagtgtctcatgtggaaccatggcatggttattgatgagtttcttaaccctttccagagtcctcctttgcctgatcctccaacagctgtcacaacttgtgttgagcaagcagtagcatttgcttcctcccaacaagcagctgggttaggaaaaccatgggtaaggacggactcacttctctttttagttgaggccttctagttaccacattactctgcctctgtatataggtggttttctttaagtggggtgggaaggggagcacaatttcccttcatactccttttaagcagtgagttatggtggtggtctcatgaagaaaagaccttttggcccaatctctgccatatcagtgaacctttagaaactcaaaaactgagaaatttactacagtagttagaattatatcacttcactgttctctacttgcaagcctcaaagagagaaagtttcgttatattaaaacacttaggtaacttttcggtctttcccatttctacctaagtcagctttcatctttgtggatggtgtctcctttactaaataagaaaataacaaagcccttattctctttttttcttgtcctcattcttgccttgagttccagttcctctttggtgtacagacttcttggtacccagtcacctctgtcttcagcaccctcataagtcgtcactaatacacagttttgtacatgtaacattaaaggcataaatgactca

SEQ ID NO: 320511 - DNA, 2281 bp, Homo sapiens
gtgtgaatccggcaccgaggtgctctctgtttgggatttgtaaatcttctcaggttcagagaagattcttcatgggaaatcaagttctaaaggtctttgcagcaagagatgatgaggcagctgcagttgcactttcctccctgattcatgctttggatgacttagacatggtggccatagttcgatatgcttatgacaaaagagctaatcctcaagtcggcgtggcttttcctcatatcaagcataactatgagtgtttagtgtatgtgcagctgcctttcatggaagacttgcggcaatacatgttttcatccttgaaaaacagtaagaaatatgctcccaccgaggcacagttgaatgctgttgatgctttgattgactccatgagcttggcaaagaaagatgagaagacagacacccttgaagacttgtttccaaccaccaaaatcccaaatcctcgatttcagagattatttcagtgtctgctgcacagagctttacatccccgggagcctctacccccaattcagcagcatatttggaatatgctgaatcctcccgctgaggtgacaacgaaaagtcagattcctctctctaaaataaagaccctttttcctctgattgaagccaagaaaaaggatcaagtgactgctcaggaaattttccaagacaaccatgaagatggacctacagctaaaaaattaaagactgagcaagggggagcccacttcagcgtctccagtctggctgaaggcagtgtcacctctgttggaagtgtgaatcctgctgaaaacttccgtgttctagtgaaacagaagaaggccagctttgaggaagcgagtaaccagctcataaatcacatcgaacagtttttggatactaatgaaacaccgtattttatgaagagcatagactgcatccgagccttccgggaagaagccattaagttttcagaagagcagcgctttaacaacttcctgaaagcccttcaagagaaagtggaaattaaacaattaaatcatttctgggaaattgttgtccaggatggaattactctgatcaccaaagaggaagcctctggaagttctgtcacagctgaggaagccaaaaagtttctggcccccaaagacaaaccaagtggagacacagcagctgtatttgaagaaggtggtgatgtggacgatttattggacatgatataggtcgtggatgtatggggaatctaagagagctgccatcgctgtgatgctgggagttctaacaaaacaagttggatgcggccattcaaggggagccaaaatctcaagaaattcccagcaggttacctggaggcggatcatctaattctctgtggaatgaatacacacatatatattacaagggataatttagaccccatacaagtttataaagagtcattgttattttctggttggtgtattattttttctgtggtcttactgatctttgtatattacatacatgctttgaagtttctggaaagtagatcttttcttgacctagtatatcagtgacagttgcagcccttgtgatgtgattagtgtctcatgtggaaccatggcatggttattgatgagtttcttaaccctttccagagtcctcctttgcctgatcctccaacagctgtcacaacttgtgttgagcaagcagtagcatttgcttcctcccaacaagcagctgggttaggaaaaccatgggtaaggacggactcacttctctttttagttgaggccttctagttaccacattactctgcctctgtatataggtggttttctttaagtggggtgggaaggggagcacaatttcccttcatactccttttaagcagtgagttatggtggtggtctcatgaagaaaagaccttttggcccaatctctgccatatcagtgaacctttagaaactcaaaaactgagaaatttactacagtagttagaattatatcacttcactgttctctacttgcaagcctcaaagagagaaagtttcgttatattaaaacacttaggtaacttttcggtctttcccatttctacctaagtcagctttcatctttgtggatggtgtctcctttactaaataagaaaataacaaagcccttattctctttttttcttgtcctcattcttgccttgagttccagttcctctttggtgtacagacttcttggtacccagtcacctctgtcttcagcaccctcataagtcgtcactaatacacagttttgtacatgtaacattaaaggcataaatgactca

SEQ ID NO: 320512 - DNA, 2655 bp, Homo sapiens
  misc_feature (2639)..(2639): n is a, c, g, or t
atgctcagagttccggggcacggtttccccgcccctttcaggcctagcaggaaacgaagcggctctttccgctatctgccgcttgtccaccggaagcgagttgcgacacggcaggttcccgcccggaagaagcgaccaaagcgcctgaggaccggcaacatggtgcggtcggggaataaggcagctgttgtgctgtgtatggacgtgggctttaccatgagtaactccattcctggtatagaatccccatttgaacaagcaaagaaggtgataaccatgtttgtacagcgacaggtgtttgctgagaacaaggatgagattgctttagtcctgtttggtacagatggcactgacaatcccctttctggtggggatcagtatcagaacatcacagtgcacagacatctgatgctaccagattttgatttgctggaggacattgaaagcaaaatccaaccaggttctcaacaggctgacttcctggatgcactaatcgtgagcatggatgtgattcaacatgaaacaataggaaagaagtttgagaagaggcatattgaaatattcactgacctcagcagccgattcagcaaaagtcagctggatattataattcatagcttgaagaaatgtgacatctccctgcaattcttcttgcctttctcacttggcaaggaagatggaagtggggacagaggagatggcccctttcgcttaggtggccatgggccttcctttccactaaaaggaattaccgaacagcaaaaagaaggtcttgagatagtgaaaatggtgatgatatctttagaaggtgaagatgggttggatgaaatttattcattcagtgagagtctgagaaaactgtgcgtcttcaagaaaattgagaggcattccattcactggccctgccgactgaccattggctccaatttgtctataaggattgcagcctataaatcgattctacaggagagagttaaaaagacttggacagttgtggatgcaaaaaccctaaaaaaagaagatatacaaaaagaaacagtttattgcttaaatgatgatgatgaaactgaagttttaaaagaggatattattcaagggttccgctatggaagtgatatagttcctttctctaaagtggatgaggaacaaatgaaatataaatcggaggggaagtgcttctctgttttgggattttgtaaatcttctcaggttcagagaagattcttcatgggaaatcaagttctaaaggtctttgcagcaagagatgatgaggcagctgcagttgcactttcctccctgattcatgctttggatgacttagacatggtggccatagttcgatatgcttatgacaaaagagctaatcctcaagtcggcgtggcttttcctcatatcaagcataactatgagtgtttagtgtatgtgcagctgcctttcatggaagacttgcggcaatacatgttttcatccttgaaaaacagtaagaaatatgctcccaccgaggcacagttgaatgctgttgatgctttgattgactccatgagcttggcaaagaaagatgagaagacagacacccttgaagacttgtttccaaccaccaaaatcccaaatcctcgatttcagagattatttcagtgtctgctgcacagagctttacatccccgggagcctctacccccaattcagcagcatatttggaatatgctgaatcctcccgctgaggtgacaacgaaaagtcagattcctctctctaaaataaagaccctttttcctctgattgaagccaagaaaaaggatcaagtgactgctcaggaaattttccaagacaaccatgaagatggacctacagctaaaaaattaaagactgagcaagggggagcccacttcagcgtctccagtctggctgaaggcagtgtcacctctgttggaagtgtgaatcctgctgaaaacttccgtgttctagtgaaacagaagaaggccagctttgaggaagcgagtaaccagctcataaatcacatcgaacagtttttggatactaatgaaacaccgtattttatgaagagcatagactgcatccgagccttccgggaagaagccattaagttttcagaagagcagcgctttaacaacttcctgaaagcccttcaagagaaagtggaaattaaacaattaaatcatttctgggaaattgttgtccaggatggaattactctgatcaccaaagaggaagcctctggaagttctgtcacagctgaggaagccaaaaagtttctggcccccaaagacaaaccaagtggagacacagcagctgtatttgaagaaggtggtgatgtggacgatttattggacatgatataggtcgtggatgtatggggaatctaagagagctgccatcgctgtgatgctgggagttctaacaaaacaagttggatgcggccattcaaggggagccaaaatctcaagaaattcccagcaggttacctggaggcggatcatctaattctctgtggaatgaatacacacatatatattacaagggataatttagaccccatacaagtttataaaggtaaaaataacagatgtgagataaggatagttgcatgcttgtctcctgatactcattgtcctaagcgggnggagacctgtgaccaa

SEQ ID NO: 320513 - DNA, 2892 bp, Homo sapiens
atgctcagagttccggggcacggtttccccgcccctttcaggcctagcaggaaacgaagcggctctttccgctatctgccgcttgtccaccggaagcgagttgcgacacggcaggttcccgcccggaagaagcgaccaaagcgcctgaggaccggcaacatggtgcggtcggggaataaggcagctgttgtgctgtgtatggacgtgggctttaccatgagtaactccattcctggtatagaatccccatttgaacaagcaaagaaggtgataaccatgtttgtacagcgacaggtgtttgctgagaacaaggatgagattgctttagtcctgtttggtacagatggcactgacaatcccctttctggtggggatcagtatcagaacatcacagtgcacagacatctgatgctaccagattttgatttgctggaggacattgaaagcaaaatccaaccaggttctcaacaggctgacttcctggatgcactaatcgtgagcatggatgtgattcaacatgaaacaataggaaagaagtttgagaagaggcatattgaaatattcactgacctcagcagccgattcagcaaaagtcagctggatattataattcatagcttgaagaaatgtgacatctccctgcaattcttcttgcctttctcacttggcaaggaagatggaagtggggacagaggagatggcccctttcgcttaggtggccatgggccttcctttccactaaaaggaattaccgaacagcaaaaagaaggtcttgagatagtgaaaatggtgatgatatctttagaaggtgaagatgggttggatgaaatttattcattcagtgagagtctgagaaaactgtgcgtcttcaagaaaattgagaggcattccattcactggccctgccgactgaccattggctccaatttgtctataaggattgcagcctataaatcgattctacaggagagagttaaaaagacttggacagttgtggatgcaaaaaccctaaaaaaagaagatatacaaaaagaaacagtttattgcttaaatgatgatgatgaaactgaagttttaaaagaggatattattcaagggttccgctatggaagtgatatagttcctttctctaaagtggatgaggaacaaatgaaatataaatcggaggggaagtgcttctctgttttgggattttgtaaatcttctcaggttcagagaagattcttcatgggaaatcaagttctaaaggtctttgcagcaagagatgatgaggcagctgcagttgcactttcctccctgattcatgctttggatgacttagacatggtggccatagttcgatatgcttatgacaaaagagctaatcctcaagtcggcgtggcttttcctcatatcaagcataactatgagtgtttagtgtatgtgcagctgcctttcatggaagacttgcggcaatacatgttttcatccttgaaaaacagtaagaaatatgctcccaccgaggcacagttgaatgctgttgatgctttgattgactccatgagcttggcaaagaaagatgagaagacagacacccttgaagacttgtttccaaccaccaaaatcccaaatcctcgatttcagagattatttcagtgtctgctgcacagagctttacatccccgggagcctctacccccaattcagcagcatatttggaatatgctgaatcctcccgctgaggtgacaacgaaaagtcagattcctctctctaaaataaagaccctttttcctctgattgaagccaagaaaaaggatcaagtgactgctcaggaaattttccaagacaaccatgaagatggacctacagctaaaaaattaaagactgagcaagggggagcccacttcagcgtctccagtctggctgaaggcagtgtcacctctgttggaagtgtgaatcctgctgaaaacttccgtgttctagtgaaacagaagaaggccagctttgaggaagcgagtaaccagctcataaatcacatcgaacaagtcattgttattttctggttggtgtattattttttctgtggtcttactgatctttgtatattacatacatgctttgaagtttctggaaagtagatcttttcttgacctagtatatcagtgacagttgcagcccttgtgatgtgattagtgtctcatgtggaaccatggcatggttattgatgagtttcttaaccctttccagagtcctcctttgcctgatcctccaacagctgtcacaacttgtgttgagcaagcagtagcatttgcttcctcccaacaagcagctgggttaggaaaaccatgggtaaggacggactcacttctctttttagttgaggccttctagttaccacattactctgcctctgtatataggtggttttctttaagtggggtgggaaggggagcacaatttcccttcatactccttttaagcagtgagttatggtggtggtctcatgaagaaaagaccttttggcccaatctctgccatatcagtgaacctttagaaactcaaaaactgagaaatttactacagtagttagaattatatcacttcactgttctctacttgcaagcctcaaagagagaaagtttcgttatattaaaacacttaggtaacttttcggtctttcccatttctacctaagtcagctttcatctttgtggatggtgtctcctttactaaataagaaaataacaaagcccttattctctttttttcttgtcctcattcttgccttgagttccagttcctctttggtgtacagacttcttggtacccagtcacctctgtcttcagcaccctcataagtcgtcactaatacacagttttgtacatgtaacattaaaggcataaatgactca

SEQ ID NO: 320514 - DNA, 2787 bp, Homo sapiens
atgctcagagttccggggcacggtttccccgcccctttcaggcctagcaggaaacgaagcggctctttccgctatctgccgcttgtccaccggaagcgagttgcgacacggcaggttcccgcccggaagaagcgaccaaagcgcctgaggaccggcaacatggtgcggtcggggaataaggcagctgttgtgctgtgtatggacgtgggctttaccatgagtaactccattcctggtatagaatccccatttgaacaagcaaagaaggtgataaccatgtttgtacagcgacaggtgtttgctgagaacaaggatgagattgctttagtcctgtttggtacagatggcactgacaatcccctttctggtggggatcagtatcagaacatcacagtgcacagacatctgatgctaccagattttgatttgctggaggacattgaaagcaaaatccaaccaggttctcaacaggctgacttcctggatgcactaatcgtgagcatggatgtgattcaacatgaaacaataggaaagaagtttgagaagaggcatattgaaatattcactgacctcagcagccgattcagcaaaagtcagctggatattataattcatagcttgaagaaatgtgacatctccctgcaattcttcttgcctttctcacttggcaaggaagatggaagtggggacagaggagatggcccctttcgcttaggtggccatgggccttcctttccactaaaaggaattaccgaacagcaaaaagaaggtcttgagatagtgaaaatggtgatgatatctttagaaggtgaagatgggttggatgaaatttattcattcagtgagagtctgagaaaactgtgcgtcttcaagaaaattgagaggcattccattcactggccctgccgactgaccattggctccaatttgtctataaggattgcagcctataaatcgattctacaggagagagttaaaaagacttggacagttgtggatgcaaaaaccctaaaaaaagaagatatacaaaaagaaacagtttattgcttaaatgatgatgatgaaactgaagttttaaaagaggatattattcaagggttccgctatggaagtgatatagttcctttctctaaagtggatgaggaacaaatgaaatataaatcggaggggaagtgcttctctgttttgggattttgtaaatcttctcaggttcagagaagattcttcatgggaaatcaagttctaaaggtctttgcagcaagagatgatgaggcagctgcagttgcactttcctccctgattcatgctttggatgacttagacatggtggccatagttcgatatgcttatgacaaaagagctaatcctcaagtcggcgtggcttttcctcatatcaagcataactatgagtgtttagtgtatgtgcagctgcctttcatggaagacttgcggcaatacatgttttcatccttgaaaaacagtaagaaatatgctcccaccgaggcacagttgaatgctgttgatgctttgattgactccatgagcttggcaaagaaagatgagaagacagacacccttgaagacttgtttccaaccaccaaaatcccaaatcctcgatttcagagattatttcagtgtctgctgcacagagctttacatccccgggagcctctacccccaattcagcagcatatttggaatatgctgaatcctcccgctgaggtgacaacgaaaagtcagattcctctctctaaaataaagaccctttttcctctgattgaagccaagaaaaaggatcaagtgactgctcaggaaattttccaagacaaccatgaagatggacctacagctaaaaaattaaagactgagcaagggggagcccacttcagcgtctccagtctggctgaaggcagtgtcacctctgttggaagtgtgaatcctgctgaaaacttccgtgttctagtgaaacagaagaaggccagctttgaggaagcgagtaaccagctcataaatcacatcgaacagtttttggatactaatgaaacaccgtattttatgaagagcatagactgcatccgagccttccgggaagaagccattaagttttcagaagagcagcgctttaacaacttcctgaaagcccttcaagagaaagtggaaattaaacaattaaatcatttctgggaaattgttgtccaggatggaattactctgatcaccaaagaggaagcctctggaagttctgtcacagctgaggaagccaaaaagtttctggcccccaaagacaaaccaagtggagacacagcagctgtatttgaagaaggtggtgatgtggacgatttagtaagtacttttaatatgcacctggtgttctgtgattgaagtcacctgagctgtaaatacagccacaaaggctgattatcttacacttgttgcttatttgtgttttaatttccaatacaccagaagcttcctacaccattatatattgccattataaattcaatcagataggtaatttcataatagaaattcctgtgtttcatggtgtcggctatattgttcattcagattaatcctctcccttgaagggctgaaaaagagctagggaggctattccattagtagcaaaatgttgtaattcactgaaattgctgttaaccaaaaataagtaatacaacatgcagtttgtgtgggttgacaaatgaaacagcccttaaaagggctacttcttaaatgttctcaattaacttaatgtaaacaaaatagaccgataggcatttgagg

SEQ ID NO: 320515 - DNA, 2863 bp, Homo sapiens
atgctcagagttccggggcacggtttccccgcccctttcaggcctagcaggaaacgaagcggctctttccgctatctgccgcttgtccaccggaagcgagttgcgacacggcaggttcccgcccggaagaagcgaccaaagcgcctgaggaccggcaacatggtgcggtcggggaataaggcagctgttgtgctgtgtatggacgtgggctttaccatgagtaactccattcctggtatagaatccccatttgaacaagcaaagaaggtgataaccatgtttgtacagcgacaggtgtttgctgagaacaaggatgagattgctttagtcctgtttggtacagatggcactgacaatcccctttctggtggggatcagtatcagaacatcacagtgcacagacatctgatgctaccagattttgatttgctggaggacattgaaagcaaaatccaaccaggttctcaacaggctgacttcctggatgcactaatcgtgagcatggatgtgattcaacatgaaacaataggaaagaagtttgagaagaggcatattgaaatattcactgacctcagcagccgattcagcaaaagtcagctggatattataattcatagcttgaagaaatgtgacatctccctgcaattcttcttgcctttctcacttggcaaggaagatggaagtggggacagaggagatggcccctttcgcttaggtggccatgggccttcctttccactaaaaggaattaccgaacagcaaaaagaaggtcttgagatagtgaaaatggtgatgatatctttagaaggtgaagatgggttggatgaaatttattcattcagtgagagtctgagaaaactgtgcgtcttcaagaaaattgagaggcattccattcactggccctgccgactgaccattggctccaatttgtctataaggattgcagcctataaatcgattctacaggagagagttaaaaagacttggacagttgtggatgcaaaaaccctaaaaaaagaagatatacaaaaagaaacagtttattgcttaaatgatgatgatgaaactgaagttttaaaagaggatattattcaagggttccgctatggaagtgatatagttcctttctctaaagtggatgaggaacaaatgaaatataaatcggaggggaagtgcttctctgttttgggattttgtaaatcttctcaggttcagagaagattcttcatgggaaatcaagttctaaaggtctttgcagcaagagatgatgaggcagctgcagttgcactttcctccctgattcatgctttggatgacttagacatggtggccatagttcgatatgcttatgacaaaagagctaatcctcaagtcggcgtggcttttcctcatatcaagcataactatgagtgtttagtgtatgtgcagctgcctttcatggaagacttgcggcaatacatgttttcatccttgaaaaacagtaagaaatatgctcccaccgaggcacagttgaatgctgttgatgctttgattgactccatgagcttggcaaagaaagatgagaagacagacacccttgaagacttgtttcttttcagaagagcagcgctttaacaacttcctgaaagcccttcaagagaaagtggaaattaaacaattaaatcatttctgtcacagctgaggaagccaaaaagtttctggcccccaaagacaaaccaagtggagacacagcagctgtatttgaagaaggtggtgatgtggacgatttattggacatgatataggtcgtggatgtatggggaatctaagagagctgccatcgctgtgatgctgggagttctaacaaaacaagttggatgcggccattcaaggggagccaaaatctcaagaaattcccagcaggttacctggaggcggatcatctaattctctgtggaatgaatacacacatatatattacaagggataatttagaccccatacaagtttataaagagtcattgttattttctggttggtgtattattttttctgtggtcttactgatctttgtatattacatacatgctttgaagtttctggaaagtagatcttttcttgacctagtatatcagtgacagttgcagcccttgtgatgtgattagtgtctcatgtggaaccatggcatggttattgatgagtttcttaaccctttccagagtcctcctttgcctgatcctccaacagctgtcacaacttgtgttgagcaagcagtagcatttgcttcctcccaacaagcagctgggttaggaaaaccatgggtaaggacggactcacttctctttttagttgaggccttctagttaccacattactctgcctctgtatataggtggttttctttaagtggggtgggaaggggagcacaatttcccttcatactccttttaagcagtgagttatggtggtggtctcatgaagaaaagaccttttggcccaatctctgccatatcagtgaacctttagaaactcaaaaactgagaaatttactacagtagttagaattatatcacttcactgttctctacttgcaagcctcaaagagagaaagtttcgttatattaaaacacttaggtaacttttcggtctttcccatttctacctaagtcagctttcatctttgtggatggtgtctcctttactaaataagaaaataacaaagcccttattctctttttttcttgtcctcattcttgccttgagttccagttcctctttggtgtacagacttcttggtacccagtcacctctgtcttcagcaccctcataagtcgtcactaatacacagttttgtacatgtaacattaaaggcataaatgactca

SEQ ID NO: 320516 - DNA, 1497 bp, Homo sapiens
tgtaccggcagtattgacataaactcgactccttagtgttttcacgagacccgcgagtaaccagctcataaatcacatcgaacagtttttggatactaatgaaacaccgtattttatgaagagcatagactgcatccgagccttccgggaagaagccattaagttttcagaagagcagcgctttaacaacttcctgaaagcccttcaagagaaagtggaaattaaacaattaaatcatttctgggaaattgttgtccaggatggaattactctgatcaccaaagaggaagcctctggaagttctgtcacagctgaggaagccaaaaagtttctggcccccaaagacaaaccaagtggagacacagcagctgtatttgaagaaggtggtgatgtggacgatttattggacatgatataggtcgtggatgtatggggaatctaagagagctgccatcgctgtgatgctgggagttctaacaaaacaagttggatgcggccattcaaggggagccaaaatctcaagaaattcccagcaggttacctggaggcggatcatctaattctctgtggaatgaatacacacatatatattacaagggataatttagaccccatacaagtttataaagagtcattgttattttctggttggtgtattattttttctgtggtcttactgatctttgtatattacatacatgctttgaagtttctggaaagtagatcttttcttgacctagtatatcagtgacagttgcagcccttgtgatgtgattagtgtctcatgtggaaccatggcatggttattgatgagtttcttaaccctttccagagtcctcctttgcctgatcctccaacagctgtcacaacttgtgttgagcaagcagtagcatttgcttcctcccaacaagcagctgggttaggaaaaccatgggtaaggacggactcacttctctttttagttgaggccttctagttaccacattactctgcctctgtatataggtggttttctttaagtggggtgggaaggggagcacaatttcccttcatactccttttaagcagtgagttatggtggtggtctcatgaagaaaagaccttttggcccaatctctgccatatcagtgaacctttagaaactcaaaaactgagaaatttactacagtagttagaattatatcacttcactgttctctacttgcaagcctcaaagagagaaagtttcgttatattaaaacacttaggtaacttttcggtctttcccatttctacctaagtcagctttcatctttgtggatggtgtctcctttactaaataagaaaataacaaagcccttattctctttttttcttgtcctcattcttgccttgagttccagttcctctttggtgtacagacttcttggtacccagtcacctctgtcttcagcaccctcataagtcgtcactaatacacagttttgtacatgtaacattaaaggcataaatgactca

SEQ ID NO: 320517 - DNA, 1505 bp, Homo sapiens
  misc_feature (46)..(46): n is a, c, g, or t
cccgcagctgccacactcccgccctacgggcactctatatcgaggngcagtgggtacttcgcgagtaaccagctcataaatcacatcgaacagtttttggatactaatgaaacaccgtattttatgaagagcatagactgcatccgagccttccgggaagaagccattaagttttcagaagagcagcgctttaacaacttcctgaaagcccttcaagagaaagtggaaattaaacaattaaatcatttctgggaaattgttgtccaggatggaattactctgatcaccaaagaggaagcctctggaagttctgtcacagctgaggaagccaaaaagtttctggcccccaaagacaaaccaagtggagacacagcagctgtatttgaagaaggtggtgatgtggacgatttattggacatgatataggtcgtggatgtatggggaatctaagagagctgccatcgctgtgatgctgggagttctaacaaaacaagttggatgcggccattcaaggggagccaaaatctcaagaaattcccagcaggttacctggaggcggatcatctaattctctgtggaatgaatacacacatatatattacaagggataatttagaccccatacaagtttataaagagtcattgttattttctggttggtgtattattttttctgtggtcttactgatctttgtatattacatacatgctttgaagtttctggaaagtagatcttttcttgacctagtatatcagtgacagttgcagcccttgtgatgtgattagtgtctcatgtggaaccatggcatggttattgatgagtttcttaaccctttccagagtcctcctttgcctgatcctccaacagctgtcacaacttgtgttgagcaagcagtagcatttgcttcctcccaacaagcagctgggttaggaaaaccatgggtaaggacggactcacttctctttttagttgaggccttctagttaccacattactctgcctctgtatataggtggttttctttaagtggggtgggaaggggagcacaatttcccttcatactccttttaagcagtgagttatggtggtggtctcatgaagaaaagaccttttggcccaatctctgccatatcagtgaacctttagaaactcaaaaactgagaaatttactacagtagttagaattatatcacttcactgttctctacttgcaagcctcaaagagagaaagtttcgttatattaaaacacttaggtaacttttcggtctttcccatttctacctaagtcagctttcatctttgtggatggtgtctcctttactaaataagaaaataacaaagcccttattctctttttttcttgtcctcattcttgccttgagttccagttcctctttggtgtacagacttcttggtacccagtcacctctgtcttcagcaccctcataagtcgtcactaatacacagttttgtacatgtaacattaaaggcataaatgactca

SEQ ID NO: 320518 - DNA, 1358 bp, Homo sapiens
ctctaccccaacttgctaccacagttttcagaagagcagcgctttaacaacttcctgaaagcccttcaagagaaagtggaaattaaacaattaaatcatttctgggaaattgttgtccaggatggaattactctgatcaccaaagaggaagcctctggaagttctgtcacagctgaggaagccaaaaagtttctggcccccaaagacaaaccaagtggagacacagcagctgtatttgaagaaggtggtgatgtggacgatttattggacatgatataggtcgtggatgtatggggaatctaagagagctgccatcgctgtgatgctgggagttctaacaaaacaagttggatgcggccattcaaggggagccaaaatctcaagaaattcccagcaggttacctggaggcggatcatctaattctctgtggaatgaatacacacatatatattacaagggataatttagaccccatacaagtttataaagagtcattgttattttctggttggtgtattattttttctgtggtcttactgatctttgtatattacatacatgctttgaagtttctggaaagtagatcttttcttgacctagtatatcagtgacagttgcagcccttgtgatgtgattagtgtctcatgtggaaccatggcatggttattgatgagtttcttaaccctttccagagtcctcctttgcctgatcctccaacagctgtcacaacttgtgttgagcaagcagtagcatttgcttcctcccaacaagcagctgggttaggaaaaccatgggtaaggacggactcacttctctttttagttgaggccttctagttaccacattactctgcctctgtatataggtggttttctttaagtggggtgggaaggggagcacaatttcccttcatactccttttaagcagtgagttatggtggtggtctcatgaagaaaagaccttttggcccaatctctgccatatcagtgaacctttagaaactcaaaaactgagaaatttactacagtagttagaattatatcacttcactgttctctacttgcaagcctcaaagagagaaagtttcgttatattaaaacacttaggtaacttttcggtctttcccatttctacctaagtcagctttcatctttgtggatggtgtctcctttactaaataagaaaataacaaagcccttattctctttttttcttgtcctcattcttgccttgagttccagttcctctttggtgtacagacttcttggtacccagtcacctctgtcttcagcaccctcataagtcgtcactaatacacagttttgtacatgtaacattaaaggcataaatgactca

SEQ ID NO: 320519 - DNA, 1571 bp, Homo sapiens
tcagagtaattcgatccgtggacaacaattgtcccatgatgatgtattgacttgtaaaatctcgcgattctactcgtatgaacaggagacattcgaccgactttgttgaaagcgcggtaacctgctcataaatcactagtcgaacagtcggtagagagtactaaattaaacaccagttactcttatgtaagagtcactagactgcattcgatgctttccgggcaggaagccattaatttttcagaagagcagcgctttaacaacttcctgaaagcccttcaagagaaagtggaaattaaacaattaaatcatttctgggaaattgttgtccaggatggaattactctgatcaccaaagaggaagcctctggaagttctgtcacagctgaggaagccaaaaagtttctggcccccaaagacaaaccaagtggagacacagcagctgtatttgaagaaggtggtgatgtggacgatttattggacatgatataggtcgtggatgtatggggaatctaagagagctgccatcgctgtgatgctgggagttctaacaaaacaagttggatgcggccattcaaggggagccaaaatctcaagaaattcccagcaggttacctggaggcggatcatctaattctctgtggaatgaatacacacatatatattacaagggataatttagaccccatacaagtttataaagagtcattgttattttctggttggtgtattattttttctgtggtcttactgatctttgtatattacatacatgctttgaagtttctggaaagtagatcttttcttgacctagtatatcagtgacagttgcagcccttgtgatgtgattagtgtctcatgtggaaccatggcatggttattgatgagtttcttaaccctttccagagtcctcctttgcctgatcctccaacagctgtcacaacttgtgttgagcaagcagtagcatttgcttcctcccaacaagcagctgggttaggaaaaccatgggtaaggacggactcacttctctttttagttgaggccttctagttaccacattactctgcctctgtatataggtggttttctttaagtggggtgggaaggggagcacaatttcccttcatactccttttaagcagtgagttatggtggtggtctcatgaagaaaagaccttttggcccaatctctgccatatcagtgaacctttagaaactcaaaaactgagaaatttactacagtagttagaattatatcacttcactgttctctacttgcaagcctcaaagagagaaagtttcgttatattaaaacacttaggtaacttttcggtctttcccatttctacctaagtcagctttcatctttgtggatggtgtctcctttactaaataagaaaataacaaagcccttattctctttttttcttgtcctcattcttgccttgagttccagttcctctttggtgtacagacttcttggtacccagtcacctctgtcttcagcaccctcataagtcgtcactaatacacagttttgtacatgtaacattaaaggcataaatgactca

SEQ ID NO: 320520 - DNA, 1421 bp, Homo sapiens
atgctcagagttccggggcacggtttccccgcccctttcaggcctagcaggaaacgaagcggctctttccgctatctgccgcttgtccaccggaagcgagttgcgacacggcaggttcccgcccggaagaagcgaccaaagcgcctgaggaccggcaacatggtgcggtcggggaataaggcagctgttgtgctgtgtatggacgtgggctttaccatgagtaactccattcctggtatagaatccccatttgaacaagcaaagaaggtgataaccatgtttgtacagcgacaggtgtttgctgagaacaaggatgagattgctttagtcctgtttggtacagatggcactgacaatcccctttctggtggggatcagtatcagaacatcacagtgcacagacatctgatgctaccagattttgatttgctggaggacattgaaagcaaaatccaaccaggttctcaacaggctgacttcctggatgcactaatcgtgagcatggatgtgattcaacatgaaacaataggaaagaagtttgagaagaggcatattgaaatattcactgacctcagcagccgattcagcaaaagtcagctggatattataattcatagcttgaagaaatgtgacatctccctgcaattcttcttgcctttctcacttggcaaggaagatggaagtggggacagaggagatggcccctttcgcttaggtggccatgggccttcctttccactaaaaggaattaccgaacagcaaaaagaaggtcttgagatagtgaaaatggtgatgatatctttagaaggtgaagatgggttggatgaaatttattcattcagtgagagtctgagaaaactgtgcgtcttcaagaaaattgagaggcattccattcactggccctgccgactgaccattggctccaatttgtctataaggattgcagcctataaatcgattctacaggagagagttaaaaagacttggacagttgtggatgcaaaaaccctaaaaaaagaagatatacaaaaagaaacagtttattgcttaaatgatgatgatgaaactgaagttttaaaagaggatattattcaaggtatgtcagtaagagttttcactgttgcctaaaagacattttcttcaacatgatgtgatgcaggctggggtttgtattattctttgtttaaagttatttctttgagttatagaaatataacagtttgaaaggataatgagaccctaggtcctttagctcatttgttgggtcttaggcaggttgcttctcaggagtacacttgggtgttccatctctgtgagttttaaatgtcttaagtgatagtactcatacttggctttattttaaagtttgaaactcactagctaggagcatgtttaatatgggtgaactaaggtcgtcttgt

SEQ ID NO: 320521 - DNA, 1201 bp, Homo sapiens
  misc_feature (1052)..(1052): n is a, c, g, or t
atgctcagagttccggggcacggtttccccgcccctttcaggcctagcaggaaacgaagcggctctttccgctatctgccgcttgtccaccggaagcgagttgcgacacggcaggttcccgcccggaagaagcgaccaaagcgcctgaggaccggcaacatggtgcggtcggggaataaggcagctgttgtgctgtgtatggacgtgggctttaccatgagtaactccattcctggtatagaatccccatttgaacaagcaaagaaggtgataaccatgtttgtacagcgacaggtgtttgctgagaacaaggatgagattgctttagtcctgtttggtacagatggcactgacaatcccctttctggtggggatcagtatcagaacatcacagtgcacagacatctgatgctaccagattttgatttgctggaggacattgaaagcaaaatccaaccaggttctcaacaggctgacttcctggatgcactaatcgtgagcatggatgtgattcaacatgaaacaataggaaagaagtttgagaagaggcatattgaaatattcactgacctcagcagccgattcagcaaaagtcagctggatattataattcatagcttgaagaaatgtgacatctccctgcaattcttcttgcctttctcacttggcaaggaagatggaagtggggacagaggagatggcccctttcgcttaggtggccatgggccttcctttccactaaaaggaattaccgaacagcaaaaagaaggtcttgagatagtgaaaatggtgatgatatctttagaaggtgaagatgggttggatgaaatttattcattcagtgagagtctgagaaaactgtgcgtcttcaagaaaattgagaggcattccattcactggccctgccgactgaccattggctccaatttgtctataaggattgcagcctataaatcgattctacaggagagagttaaaaagacttggacagttgtggatgcaaaaaccctaaaaaaaaaggaaggattgttccaatgagggaaaaaccaggntaaatttggcttaaaaattggatggaatgaaatgaaaaacccggtaaagtttttttaaaaaggtaggatataattttttctccaagggggttccccggctatttggggaaggtaggatattaaccttccccttttctttttaaaagatg

SEQ ID NO: 320522 - DNA, 1637 bp, Homo sapiens
ttttttttttttcctgattcttcatcattcaacttgagattattctaatcttgatttgattctcatgctcctttcaaaagagcatactagtttggggtggttggttattttcttaaccttagcaagccagcttatttcctatggaagcagaactggaaacagcagatgtccaccatgcttatacaggacactacacactgtctcgacaagccatgttctttcctccctcttcgtgagcactttctctggtgatgagttagtatggactacttgaacctcaaaactgggcctctcacccaaagccaaatgaagtagcgtatgccaggatgatgtttcttttgggccgttggcagtgagactgctaagcaggctgccttaggttttgctgtggcaatgctagcagattgttccctctttcaaaggggcaaaaatatcattttggtatgataactgactttctatttacagtttctggcccccaaagacaaaccaagtggagacacagcagctgtatttgaagaaggtggtgatgtggacgatttattggacatgatataggtcgtggatgtatggggaatctaagagagctgccatcgctgtgatgctgggagttctaacaaaacaagttggatgcggccattcaaggggagccaaaatctcaagaaattcccagcaggttacctggaggcggatcatctaattctctgtggaatgaatacacacatatatattacaagggataatttagaccccatacaagtttataaagagtcattgttattttctggttggtgtattattttttctgtggtcttactgatctttgtatattacatacatgctttgaagtttctggaaagtagatcttttcttgacctagtatatcagtgacagttgcagcccttgtgatgtgattagtgtctcatgtggaaccatggcatggttattgatgagtttcttaaccctttccagagtcctcctttgcctgatcctccaacagctgtcacaacttgtgttgagcaagcagtagcatttgcttcctcccaacaagcagctgggttaggaaaaccatgggtaaggacggactcacttctctttttagttgaggccttctagttaccacattactctgcctctgtatataggtggttttctttaagtggggtgggaaggggagcacaatttcccttcatactccttttaagcagtgagttatggtggtggtctcatgaagaaaagaccttttggcccaatctctgccatatcagtgaacctttagaaactcaaaaactgagaaatttactacagtagttagaattatatcacttcactgttctctacttgcaagcctcaaagagagaaagtttcgttatattaaaacacttaggtaacttttcggtctttcccatttctacctaagtcagctttcatctttgtggatggtgtctcctttactaaataagaaaataacaaagcccttattctctttttttcttgtcctcattcttgccttgagttccagttcctctttggtgtacagacttcttggtacccagtcacctctgtcttcagcaccctcataagtcgtcactaatacacagttttgtacatgtaacattaaaggcataaatgactca

SEQ ID NO: 320523 - DNA, 1189 bp, Homo sapiens
atgtagagtcattttcattaaaccctctctcaccagagaagcagtggtatgaaattggcctgattcctttctaagtgtgttgttcttgttcacagttggacatgatataggtcgtggatgtatggggaatctaagagagctgccatcgctgtgatgctgggagttctaacaaaacaagttggatgcggccattcaaggggagccaaaatctcaagaaattcccagcaggttacctggaggcggatcatctaattctctgtggaatgaatacacacatatatattacaagggataatttagaccccatacaagtttataaagagtcattgttattttctggttggtgtattattttttctgtggtcttactgatctttgtatattacatacatgctttgaagtttctggaaagtagatcttttcttgacctagtatatcagtgacagttgcagcccttgtgatgtgattagtgtctcatgtggaaccatggcatggttattgatgagtttcttaaccctttccagagtcctcctttgcctgatcctccaacagctgtcacaacttgtgttgagcaagcagtagcatttgcttcctcccaacaagcagctgggttaggaaaaccatgggtaaggacggactcacttctctttttagttgaggccttctagttaccacattactctgcctctgtatataggtggttttctttaagtggggtgggaaggggagcacaatttcccttcatactccttttaagcagtgagttatggtggtggtctcatgaagaaaagaccttttggcccaatctctgccatatcagtgaacctttagaaactcaaaaactgagaaatttactacagtagttagaattatatcacttcactgttctctacttgcaagcctcaaagagagaaagtttcgttatattaaaacacttaggtaacttttcggtctttcccatttctacctaagtcagctttcatctttgtggatggtgtctcctttactaaataagaaaataacaaagcccttattctctttttttcttgtcctcattcttgccttgagttccagttcctctttggtgtacagacttcttggtacccagtcacctctgtcttcagcaccctcataagtcgtcactaatacacagttttgtacatgtaacattaaaggcataaatgactca

SEQ ID NO: 320524 - DNA, 438 bp, Homo sapiens
gccaggactgtataacctgccaatattgccgtggatatctctacgtagaaagcatttgttttagtggagaataatggaaataatcatttttctttcggcttctctgtttaagaggcacagttgaatgctgttgatgctttgattgactccatgagcttggcaaagaaagatgagaagacagacacccttgaagacttgtttccaaccaccaaaatcccaaatcctcgatttcagagattatttcaggtaagagaagaaggatgaacaagtcatatttcttttaaatgaaagagagctaagtgcaaagttgcggtaattggccagtcctaaataaatgtcttttttctctgaaggccccatttgctctatttaatggaagaataacatcttcctctcctacttcagaaggtaaaaatattctgagctcttaaaaagaaa

SEQ ID NO: 320525 - DNA, 697 bp, Homo sapiens
ctttctcacttggcaaggaagatggaagtggggacagaggagatggcccctttcgcttaggtggccatgggccttcctttccactaaaaggaattaccgaacagcaaaaagaaggtcttgagatagtgaaaatggtgatgatatctttagaaggtgaagatgggttggatgaaatttattcattcaggtaagaattgaaaacattgatgggaatttttaattgtacccacgtaaatttctcttttgattagaggtctcccaaatgtttcctttttctgggccactctctaattagtcattgcttaatattctgagttttattaaagaaatagtacacccacccttaatcaccctttttaaagtttgtgttcttggcacatgtttctcatttatttccaggacctgtgtcagtgaagttcaggaatatatagataccatgagaaattaacaagtcaaattgcaaaagatgaaatagtagatttcttcattatgccaagcttgggatacattttttgggcccttttttttttacacatctacaaaaaacattattaattatagaaagtggtctcagatctgagatagtcagtatcttcttatcatcctattaaggttttagaaagtagcatactatggtatagtgattttttttttaaacttttgatcacaaagcagtttgattgagtgaaaaaaaaaa

SEQ ID NO: 320526 - DNA, 3437 bp, Homo sapiens
atgctcagagttccggggcacggtttccccgcccctttcaggcctagcaggaaacgaagcggctctttccgctatctgccgcttgtccaccggaagcgagttgcgacacggcaggttcccgcccggaagaagcgaccaaagcgcctgaggaccggcaacatggtgcggtcggggaataaggcagctgttgtgctgtgtatggacgtgggctttaccatgagtaactccattcctggtatagaatccccatttgaacaagcaaagaaggtgataaccatgtttgtacagcgacaggtgtttgctgagaacaaggatgagattgctttagtcctgtttggtacagatggcactgacaatcccctttctggtggggatcagtatcagaacatcacagtgcacagacatctgatgctaccagattttgatttgctggaggacattgaaagcaaaatccaaccaggttctcaacaggctgacttcctggatgcactaatcgtgagcatggatgtgattcaacatgaaacaataggaaagaagtttgagaagaggcatattgaaatattcactgacctcagcagccgattcagcaaaagtcagctggatattataattcatagcttgaagaaatgtgacatctccctgcaattcttcttgcctttctcacttggcaaggaagatggaagtggggacagaggagatggcccctttcgcttaggtggccatgggccttcctttccactaaaaggaattaccgaacagcaaaaagaaggtcttgagatagtgaaaatggtgatgatatctttagaaggtgaagatgggttggatgaaatttattcattcagtgagagtctgagaaaactgtgcgtcttcaagaaaattgagaggcattccattcactggccctgccgactgaccattggctccaatttgtctataaggattgcagcctataaatcgattctacaggagagagttaaaaagacttggacagttgtggatgcaaaaaccctaaaaaaagaagatatacaaaaagaaacagtttattgcttaaatgatgatgatgaaactgaagttttaaaagaggatattattcaagggttccgctatggaagtgatatagttcctttctctaaagtggatgaggaacaaatgaaatataaatcggaggggaagtgcttctctgttttgggattttgtaaatcttctcaggttcagagaagattcttcatgggaaatcaagttctaaaggtctttgcagcaagagatgatgaggcagctgcagttgcactttcctccctgattcatgctttggatgacttagacatggtggccatagttcgatatgcttatgacaaaagagctaatcctcaagtcggcgtggcttttcctcatatcaagcataactatgagtgtttagtgtatgtgcagctgcctttcatggaagacttgcggcaatacatgttttcatccttgaaaaacagtaagaaatatgctcccaccgaggcacagttgaatgctgttgatgctttgattgactccatgagcttggcaaagaaagatgagaagacagacacccttgaagacttgtttccaaccaccaaaatcccaaatcctcgatttcagagattatttcagtgtctgctgcacagagctttacatccccgggagcctctacccccaattcagcagcatatttggaatatgctgaatcctcccgctgaggtgacaacgaaaagtcagattcctctctctaaaataaagaccctttttcctctgattgaagccaagaaaaaggatcaagtgactgctcaggaaattttccaagacaaccatgaagatggacctacagctaaaaaattaaagactgagcaagggggagcccacttcagcgtctccagtctggctgaaggcagtgtcacctctgttggaagtgtgaatcctgctgaaaacttccgtgttctagtgaaacagaagaaggccagctttgaggaagcgagtaaccagctcataaatcacatcgaacagtttttggatactaatgaaacaccgtattttatgaagagcatagactgcatccgagccttccgggaagaagccattaagttttcagaagagcagcgctttaacaacttcctgaaagcccttcaagagaaagtggaaattaaacaattaaatcatttctgggaaattgttgtccaggatggaattactctgatcaccaaagaggaagcctctggaagttctgtcacagctgaggaagccaaaaagtttctggcccccaaagacaaaccaagtggagacacagcagctgtatttgaagaaggtggtgatgtggacgatttattggacatgatataggtcgtggatgtatggggaatctaagagagctgccatcgctgtgatgctgggagttctaacaaaacaagttggatgcggccattcaaggggagccaaaatctcaagaaattcccagcaggttacctggaggcggatcatctaattctctgtggaatgaatacacacatatatattacaagggataatttagaccccatacaagtttataaagagtcattgttattttctggttggtgtattattttttctgtggtcttactgatctttgtatattacatacatgctttgaagtttctggaaagtagatcttttcttgacctagtatatcagtgacagttgcagcccttgtgatgtgattagtgtctcatgtggaaccatggcatggttattgatgagtttcttaaccctttccagagtcctcctttgcctgatcctccaacagctgtcacaacttgtgttgagcaagcagtagcatttgcttcctcccaacaagcagctgggttaggaaaaccatgggtaaggacggactcacttctctttttagttgaggccttctagttaccacattactctgcctctgtatataggtggttttctttaagtggggtgggaaggggagcacaatttcccttcatactccttttaagcagtgagttatggtggtggtctcatgaagaaaagaccttttggcccaatctctgccatatcagtgaacctttagaaactcaaaaactgagaaatttactacagtagttagaattatatcacttcactgttctctacttgcaagcctcaaagagagaaagtttcgttatattaaaacacttaggtaacttttcggtctttcccatttctacctaagtcagctttcatctttgtggatggtgtctcctttactaaataagaaaataacaaagcccttattctctttttttcttgtcctcattcttgccttgagttccagttcctctttggtgtacagacttcttggtacccagtcacctctgtcttcagcaccctcataagtcgtcactaatacacagttttgtacatgtaacattaaaggcataaatgactca

SEQ ID NO: 320527 - DNA, 3370 bp, Homo sapiens
tgtatccacagagacgcacttgccagagagattttgcgacacggcaggttcccgcccggaagaagcgaccaaagcgcctgaggaccggcaacatggtgcggtcggggaataaggcagctgttgtgctgtgtatggacgtgggctttaccatgagtaactccattcctggtatagaatccccatttgaacaagcaaagaaggtgataaccatgtttgtacagcgacaggtgtttgctgagaacaaggatgagattgctttagtcctgtttggtacagatggcactgacaatcccctttctggtggggatcagtatcagaacatcacagtgcacagacatctgatgctaccagattttgatttgctggaggacattgaaagcaaaatccaaccaggttctcaacaggctgacttcctggatgcactaatcgtgagcatggatgtgattcaacatgaaacaataggaaagaagtttgagaagaggcatattgaaatattcactgacctcagcagccgattcagcaaaagtcagctggatattataattcatagcttgaagaaatgtgacatctccctgcaattcttcttgcctttctcacttggcaaggaagatggaagtggggacagaggagatggcccctttcgcttaggtggccatgggccttcctttccactaaaaggaattaccgaacagcaaaaagaaggtcttgagatagtgaaaatggtgatgatatctttagaaggtgaagatgggttggatgaaatttattcattcagtgagagtctgagaaaactgtgcgtcttcaagaaaattgagaggcattccattcactggccctgccgactgaccattggctccaatttgtctataaggattgcagcctataaatcgattctacaggagagagttaaaaagacttggacagttgtggatgcaaaaaccctaaaaaaagaagatatacaaaaagaaacagtttattgcttaaatgatgatgatgaaactgaagttttaaaagaggatattattcaagggttccgctatggaagtgatatagttcctttctctaaagtggatgaggaacaaatgaaatataaatcggaggggaagtgcttctctgttttgggattttgtaaatcttctcaggttcagagaagattcttcatgggaaatcaagttctaaaggtctttgcagcaagagatgatgaggcagctgcagttgcactttcctccctgattcatgctttggatgacttagacatggtggccatagttcgatatgcttatgacaaaagagctaatcctcaagtcggcgtggcttttcctcatatcaagcataactatgagtgtttagtgtatgtgcagctgcctttcatggaagacttgcggcaatacatgttttcatccttgaaaaacagtaagaaatatgctcccaccgaggcacagttgaatgctgttgatgctttgattgactccatgagcttggcaaagaaagatgagaagacagacacccttgaagacttgtttccaaccaccaaaatcccaaatcctcgatttcagagattatttcagtgtctgctgcacagagctttacatccccgggagcctctacccccaattcagcagcatatttggaatatgctgaatcctcccgctgaggtgacaacgaaaagtcagattcctctctctaaaataaagaccctttttcctctgattgaagccaagaaaaaggatcaagtgactgctcaggaaattttccaagacaaccatgaagatggacctacagctaaaaaattaaagactgagcaagggggagcccacttcagcgtctccagtctggctgaaggcagtgtcacctctgttggaagtgtgaatcctgctgaaaacttccgtgttctagtgaaacagaagaaggccagctttgaggaagcgagtaaccagctcataaatcacatcgaacagtttttggatactaatgaaacaccgtattttatgaagagcatagactgcatccgagccttccgggaagaagccattaagttttcagaagagcagcgctttaacaacttcctgaaagcccttcaagagaaagtggaaattaaacaattaaatcatttctgggaaattgttgtccaggatggaattactctgatcaccaaagaggaagcctctggaagttctgtcacagctgaggaagccaaaaagtttctggcccccaaagacaaaccaagtggagacacagcagctgtatttgaagaaggtggtgatgtggacgatttattggacatgatataggtcgtggatgtatggggaatctaagagagctgccatcgctgtgatgctgggagttctaacaaaacaagttggatgcggccattcaaggggagccaaaatctcaagaaattcccagcaggttacctggaggcggatcatctaattctctgtggaatgaatacacacatatatattacaagggataatttagaccccatacaagtttataaagagtcattgttattttctggttggtgtattattttttctgtggtcttactgatctttgtatattacatacatgctttgaagtttctggaaagtagatcttttcttgacctagtatatcagtgacagttgcagcccttgtgatgtgattagtgtctcatgtggaaccatggcatggttattgatgagtttcttaaccctttccagagtcctcctttgcctgatcctccaacagctgtcacaacttgtgttgagcaagcagtagcatttgcttcctcccaacaagcagctgggttaggaaaaccatgggtaaggacggactcacttctctttttagttgaggccttctagttaccacattactctgcctctgtatataggtggttttctttaagtggggtgggaaggggagcacaatttcccttcatactccttttaagcagtgagttatggtggtggtctcatgaagaaaagaccttttggcccaatctctgccatatcagtgaacctttagaaactcaaaaactgagaaatttactacagtagttagaattatatcacttcactgttctctacttgcaagcctcaaagagagaaagtttcgttatattaaaacacttaggtaacttttcggtctttcccatttctacctaagtcagctttcatctttgtggatggtgtctcctttactaaataagaaaataacaaagcccttattctctttttttcttgtcctcattcttgccttgagttccagttcctctttggtgtacagacttcttggtacccagtcacctctgtcttcagcaccctcataagtcgtcactaatacacagttttgtacatgtaacattaaaggcataaatgactca

SEQ ID NO: 320528 - DNA, 3561 bp, Homo sapiens
atgctcagagttccggggcacggtttccccgcccctttcaggcctagcaggaaacgaagcggctctttccgctatctgccgcttgtccaccggaagcgagttgcgacacggcaggttcccgcccggaagaagcgaccaaagcgcctgaggaccggcaacatggtgcggtcggggaataaggcagctgttgtgctgtgtatggacgtgggctttaccatgagtaactccattcctggtatagaatccccatttgaacaagcaaagaaggtgataaccatgtttgtacagcgacaggtgtttgctgagaacaaggatgagattgctttagtcctgtttggtacagatggcactgacaatcccctttctggtggggatcagtatcagaacatcacagtgcacagacatctgatgctaccagattttgatttgctggaggacattgaaagcaaaatccaaccaggttctcaacaggctgacttcctggatgcactaatcgtgagcatggatgtgattcaacatgaaacaataggaaagaagtttgagaagaggcatattgaaatattcactgacctcagcagccgattcagcaaaagtcagctggatattataattcatagcttgaagaaatgtgacatctccctgcaattcttcttgcctttctcacttggcaaggaagatggaagtggggacagaggagatggcccctttcgcttaggtggccatgggccttcctttccactaaaaggaattaccgaacagcaaaaagaaggtcttgagatagtgaaaatggtgatgatatctttagaaggtgaagatgggttggatgaaatttattcattcagtgagagtctgagaaaactgtgcgtcttcaagaaaattgagaggcattccattcactggccctgccgactgaccattggctccaatttgtctataaggattgcagcctataaatcgattctacaggagagagttaaaaagacttggacagttgtggatgcaaaaaccctaaaaaaagaagatatacaaaaagaaacagtttattgcttaaatgatgatgatgaaactgaagttttaaaagaggatattattcaagggttccgctatggaagtgatatagttcctttctctaaagtggatgaggaacaaatgaaatataaatcggaggggaagtgcttctctgttttgggattttgtaaatcttctcaggttcagagaagattcttcatgggaaatcaagttctaaaggtctttgcagcaagagatgatgaggcagctgcagttgcactttcctccctgattcatgctttggatgacttagacatggtggccatagttcgatatgcttatgacaaaagagctaatcctcaagtcggcgtggcttttcctcatatcaagcataactatgagtgtttagtgtatgtgcagctgcctttcatggaagacttgcggcaatacatgttttcatccttgaaaaacagtaagaaatatgctcccaccgaggcacagttgaatgctgttgatgctttgattgactccatgagcttggcaaagaaagatgagaagacagacacccttgaagacttgtttccaaccaccaaaatcccaaatcctcgatttcagagattatttcagtgtctgctgcacagagctttacatccccgggagcctctacccccaattcagcagcatatttggaatatgctgaatcctcccgctgaggtgacaacgaaaagtcagattcctctctctaaaataaagaccctttttcctctgattgaagccaagaaaaaggatcaagtgactgctcaggaaattttccaagacaaccatgaagatggacctacagctaaaaaattaaagactgagcaagggggagcccacttcagcgtctccagtctggctgaaggcagtgtcacctctgttggaagtgtgaatcctgctgaaaacttccgtgttctagtgaaacagaagaaggccagctttgaggaagcgagtaaccagctcataaatcacatcgaacagtttttggatactaatgaaacaccgtattttatgaagagcatagactgcatccgagccttccgggaagaagccattaagttttcagaagagcagcgctttaacaacttcctgaaagcccttcaagagaaagtggaaattaaacaattaaatcatttctgggaaattgttgtccaggatggaattactctgatcaccaaagaggaagcctctggaagttctgtcacagctgaggaagccaaaaagtttctggcccccaaagacaaaccaagtggagacacagcagctgtatttgaagaaggtggtgatgtggacgatttattggacatgatataggtcgtggatgtatggggaatctaagagagctgccatcgctgtgatgctgggagttctaacaaaacaagttggatgcggccattcaaggggagccaaaatctcaagaaattcccagcaggttacctggaggcggatcatctaattctctgtggaatgaatacacacatatatattacaagggataatttagaccccatacaagtttataaagagtcattgttattttctggttggtgtattattttttctgtggtcttactgatctttgtatattacatacatgctttgaagtttctggaaagtagatcttttcttgacctagtatatcagtgacagttgcagcccttgtgatgtgattagtgtctcatgtggaaccatggcatggttattgatgagtttcttaaccctttccagagtcctcctttgcctgatcctccaacagctgtcacaacttgtgttgagcaagcagtagcatttgcttcctcccaacaagcagctgggttaggaaaaccatgggtaaggacggactcacttctctttttagttgaggccttctagttaccacattactctgcctctgtatataggtggttttctttaagtggggtgggaaggggagcacaatttcccttcatactccttttaagcagtgagttatggtggtggtctcatgaagaaaagaccttttggcccaatctctgccatatcagtgaacctttagaaactcaaaaactgagaaatttactacagtagttagaattatatcacttcactgttctctacttgcaagcctcaaagagagaaagtttcgttatattaaaacacttaggtaacttttcggtctttcccatttctacctaagtcagctttcatctttgtggatggtgtctcctttactaaataagaaaataacaaagcccttattctctttttttcttgtcctcattcttgccttgagttccagttcctctttggtgtacagacttcttggtacccagtcacctctgtcttcagcaccctcataagtcgtcactaatacacagttttgtacatgtaacattaaaggcataaatgactcaaaaaaaaaaaaaaaaaaaaaattcactgccgtcgtttacacgtctgactgggccctgcgtacccaacttaatcgctgcagacatccccttcggcaggtgcgtaatacaaggcccgccgttcgct

SEQ ID NO: 320529 - DNA, 3089 bp, Homo sapiens
atgctcagagttccggggcacggtttccccgcccctttcaggcctagcaggaaacgaagcggctctttccgctatctgccgcttgtccaccggaagcgagttgcgacacggcaggttcccgcccggaagaagcgaccaaagcgcctgaggaccggcaacatggtgcggtcggggaataaggcagctgttgtgctgtgtatggacgtgggctttaccatgagtaactccattcctggtatagaatccccatttgaacaagcaaagaaggtgataaccatgtttgtacagcgacaggtgtttgctgagaacaaggatgagattgctttagtcctgtttggtacagatggcactgacaatcccctttctggtggggatcagtatcagaacatcacagtgcacagacatctgatgctaccagattttgatttgctggaggacattgaaagcaaaatccaaccaggttctcaacaggctgacttcctggatgcactaatcgtgagcatggatgtgattcaacatgaaacaataggaaagaagtttgagaagaggcatattgaaatattcactgacctcagcagccgattcagcaaaagtcagctggatattataattcatagcttgaagaaatgtgacatctccctgcaattcttcttgcctttctcacttggcaaggaagatggaagtggggacagaggagatggcccctttcgcttaggtggccatgggccttcctttccactaaaaggaattaccgaacagcaaaaagaaggtcttgagatagtgaaaatggtgatgatatctttagaaggtgaagatgggttggatgaaatttattcattcagtgagagtctgagaaaactgtgcgtcttcaagaaaattgagaggcattccattcactggccctgccgactgaccattggctccaatttgtctataaggattgcagcctataaatcgattctacaggagagagttaaaaagacttggacagttgtggatgcaaaaaccctaaaaaaagaagatatacaaaaagaaacagtttattgcttaaatgatgatgatgaaactgaagttttaaaagaggatattattcaagggttccgctatggaagtgatatagttcctttctctaaagtggatgaggaacaaatgaaatataaatcggaggggaagtgcttctctgttttgggattttgtaaatcttctcaggttcagagaagattcttcatgggaaatcaagttctaaaggtctttgcagcaagagatgatgaggcagctgcagttgcactttcctccctgattcatgctttggatgacttagacatggtggccatagttcgatatgcttatgacaaaagagctaatcctcaagtcggcgtggcttttcctcatatcaagcataactatgagtgtttagtgtatgtgcagctgcctttcatggaagacttgcggcaatacatgttttcatccttgaaaaacagtaagaaatatgctcccaccgaggcacagttgaatgctgttgatgctttgattgactccatgagcttggcaaagaaagatgagaagacagacacccttgaagacttgtttccaaccaccaaaatcccaaatcctcgatttcagagattatttcagtgtctgctgcacagagctttacatccccgggagcctctacccccaattcagcagcatatttggaatatgctgaatcctcccgctgaggtgacaacgaaaagtcagattcctctctctaaaataaagaccctttttcctctgattgaagccaagaaaaaggatcaagtgactgctcaggaaattttccaagacaaccatgaagatggacctacagctaaaaaattaaagactgagcaagggggagcccacttcagcgtctccagtctggctgaaggcagtgtcacctctgttggaagtgtgaatcctgctgaaaacttccgtgttctagtgaaacagaagaaggccagctttgaggaagcgagtaaccagctcataaatcacatcgaacagtttttggatactaatgaaacaccgtattttatgaagagcatagactgcatccgagccttccgggaagaagccattaagttttcagaagagcagcgctttaacaacttcctgaaagcccttcaagagaaagtggaaattaaacaattaaatcatttctgggaaattgttgtccaggatggaattactctgatcaccaaagaggaagcctctggaagttctgtcacagctgaggaagccaaaaagtttctggcccccaaagacaaaccaagtggagacacagcagctgtatttgaagaaggtggtgatgtggacgatttattggacatgatataggtcgtggatgtatggggaatctaagagagctgccatcgctgtgatgctgggagttctaacaaaacaagttggatgcggccattcaaggggagccaaaatctcaagaaattcccagcaggttacctggaggcggatcatctaattctctgtggaatgaatacacacatatatattacaagggataatttagaccccatacaagtttataaagagtcattgttattttctggttggtgtattattttttctgtggtcttactgatctttgtatattacatacatgctttgaagtttctggaaagtagatcttttcttgacctagtatatcagtgacagttgcagcccttgtgatgtgattagtgtctcatgtggaaccatggcatggttattgatgagtttcttaaccctttccagagtcctcctttgcctgatcctccaacagctgtcacaacttgtgttgagcaagcagtagcatttgcttcctcccaacaagcagctgggttaggaaaaccatgggtaaggacggactcacttctctttttagttgaggccttctagttaccacattactctgcctctgtatataggtggttttctttaagtggggtgggaaggggagcacaatttcccttcatactccttttaaagggtggggggggtctgagaaaaattggcgttggaaaggagtaaaaaaggaataagggagataacgggttggggcaaaagttaaa

SEQ ID NO: 320530 - DNA, 3330 bp, Homo sapiens
  misc_feature (40)..(40): n is a, c, g, or t
tggggaggacctaaacttacggctaggtacgaaggcctgngtgtccggcaacatggtgcggtcggggaataaggcagctgttgtgctgtgtatggacgtgggctttaccatgagtaactccattcctggtatagaatccccatttgaacaagcaaagaaggtgataaccatgtttgtacagcgacaggtgtttgctgagaacaaggatgagattgctttagtcctgtttggtacagatggcactgacaatcccctttctggtggggatcagtatcagaacatcacagtgcacagacatctgatgctaccagattttgatttgctggaggacattgaaagcaaaatccaaccaggttctcaacaggctgacttcctggatgcactaatcgtgagcatggatgtgattcaacatgaaacaataggaaagaagtttgagaagaggcatattgaaatattcactgacctcagcagccgattcagcaaaagtcagctggatattataattcatagcttgaagaaatgtgacatctccctgcaattcttcttgcctttctcacttggcaaggaagatggaagtggggacagaggagatggcccctttcgcttaggtggccatgggccttcctttccactaaaaggaattaccgaacagcaaaaagaaggtcttgagatagtgaaaatggtgatgatatctttagaaggtgaagatgggttggatgaaatttattcattcagtgagagtctgagaaaactgtgcgtcttcaagaaaattgagaggcattccattcactggccctgccgactgaccattggctccaatttgtctataaggattgcagcctataaatcgattctacaggagagagttaaaaagacttggacagttgtggatgcaaaaaccctaaaaaaagaagatatacaaaaagaaacagtttattgcttaaatgatgatgatgaaactgaagttttaaaagaggatattattcaagggttccgctatggaagtgatatagttcctttctctaaagtggatgaggaacaaatgaaatataaatcggaggggaagtgcttctctgttttgggattttgtaaatcttctcaggttcagagaagattcttcatgggaaatcaagttctaaaggtctttgcagcaagagatgatgaggcagctgcagttgcactttcctccctgattcatgctttggatgacttagacatggtggccatagttcgatatgcttatgacaaaagagctaatcctcaagtcggcgtggcttttcctcatatcaagcataactatgagtgtttagtgtatgtgcagctgcctttcatggaagacttgcggcaatacatgttttcatccttgaaaaacagtaagaaatatgctcccaccgaggcacagttgaatgctgttgatgctttgattgactccatgagcttggcaaagaaagatgagaagacagacacccttgaagacttgtttccaaccaccaaaatcccaaatcctcgatttcagagattatttcagtgtctgctgcacagagctttacatccccgggagcctctacccccaattcagcagcatatttggaatatgctgaatcctcccgctgaggtgacaacgaaaagtcagattcctctctctaaaataaagaccctttttcctctgattgaagccaagaaaaaggatcaagtgactgctcaggaaattttccaagacaaccatgaagatggacctacagctaaaaaattaaagactgagcaagggggagcccacttcagcgtctccagtctggctgaaggcagtgtcacctctgttggaagtgtgaatcctgctgaaaacttccgtgttctagtgaaacagaagaaggccagctttgaggaagcgagtaaccagctcataaatcacatcgaacagtttttggatactaatgaaacaccgtattttatgaagagcatagactgcatccgagccttccgggaagaagccattaagttttcagaagagcagcgctttaacaacttcctgaaagcccttcaagagaaagtggaaattaaacaattaaatcatttctgggaaattgttgtccaggatggaattactctgatcaccaaagaggaagcctctggaagttctgtcacagctgaggaagccaaaaagtttctggcccccaaagacaaaccaagtggagacacagcagctgtatttgaagaaggtggtgatgtggacgatttattggacatgatataggtcgtggatgtatggggaatctaagagagctgccatcgctgtgatgctgggagttctaacaaaacaagttggatgcggccattcaaggggagccaaaatctcaagaaattcccagcaggttacctggaggcggatcatctaattctctgtggaatgaatacacacatatatattacaagggataatttagaccccatacaagtttataaagagtcattgttattttctggttggtgtattattttttctgtggtcttactgatctttgtatattacatacatgctttgaagtttctggaaagtagatcttttcttgacctagtatatcagtgacagttgcagcccttgtgatgtgattagtgtctcatgtggaaccatggcatggttattgatgagtttcttaaccctttccagagtcctcctttgcctgatcctccaacagctgtcacaacttgtgttgagcaagcagtagcatttgcttcctcccaacaagcagctgggttaggaaaaccatgggtaaggacggactcacttctctttttagttgaggccttctagttaccacattactctgcctctgtatataggtggttttctttaagtggggtgggaaggggagcacaatttcccttcatactccttttaagcagtgagttatggtggtggtctcatgaagaaaagaccttttggcccaatctctgccatatcagtgaacctttagaaactcaaaaactgagaaatttactacagtagttagaattatatcacttcactgttctctacttgcaagcctcaaagagagaaagtttcgttatattaaaacacttaggtaacttttcggtctttcccatttctacctaagtcagctttcatctttgtggatggtgtctcctttactaaataagaaaataacaaagcccttattctctttttttcttgtcctcattcttgccttgagttccagttcctctttggtgtacagacttcttggtacccagtcacctctgtcttcagcaccctcataagtcgtcactaatacacagttttgtacatgtaacattaaaggcataaatgactca

SEQ ID NO: 320531 - DNA, 3367 bp, Homo sapiens
atgctcagagttccggggcacggtttccccgcccctttcaggcctagcaggaaacgaagcggctctttccgctatctgccgcttgtccaccggaagcgagttgcgacacggcaggttcccgcccggaagaagcgaccaaagcgcctgaggaccggcaacatggtgcggtcggggaataaggcagctgttgtgctgtgtatggacgtgggctttaccatgagtaactccattcctggtatagaatccccatttgaacaagcaaagaaggtgataaccatgtttgtacagcgacaggtgtttgctgagaacaaggatgagattgctttagtcctgtttggtacagatggcactgacaatcccctttctggtggggatcagtatcagaacatcacagtgcacagacatctgatgctaccagattttgatttgctggaggacattgaaagcaaaatccaaccaggttctcaacaggctgacttcctggatgcactaatcgtgagcatggatgtgattcaacatgaaacaataggaaagaagtttgagaagaggcatattgaaatattcactgacctcagcagccgattcagcaaaagtcagctggatattataattcatagcttgaagaaatgtgacatctccctgcaattcttcttgcctttctcacttggcaaggaagatggaagtggggacagaggagatggcccctttcgcttaggtggccatgggccttcctttccactaaaaggaattaccgaacagcaaaaagaaggtcttgagatagtgaaaatggtgatgatatctttagaaggtgaagatgggttggatgaaatttattcattcagtgagagtctgagaaaactgtgcgtcttcaagaaaattgagaggcattccattcactggccctgccgactgaccattggctccaatttgtctataaggattgcagcctataaatcgattctacaggagagagttaaaaagacttggacagttgtggatgcaaaaaccctaaaaaaagaagatatacaaaaagaaacagtttattgcttaaatgatgatgatgaaactgaagttttaaaagaggatattattcaagggttccgctatggaagtgatatagttcctttctctaaagtggatgaggaacaaatgaaatataaatcggaggggaagtgcttctctgttttgggattttgtaaatcttctcaggttcagagaagattcttcatgggaaatcaagttctaaaggtctttgcagcaagagatgatgaggcagctgcagttgcactttcctccctgattcatgctttggatgacttagacatggtggccatagttcgatatgcttatgacaaaagagctaatcctcaagtcggcgtggcttttcctcatatcaagcataactatgagtgtttagtgtatgtgcagctgcctttcatggaagacttgcggcaatacatgttttcatccttgaaaaacagtaagaaatatgctcccaccgaggcacagttgaatgctgttgatgctttgattgactccatgagcttggcaaagaaagatgagaagacagacacccttgaagacttgtttccaaccaccaaaatcccaaatcctcgatttcagagattatttcagtgtctgctgcacagagctttacatccccgggagcctctacccccaattcagcagcatatttggaatatgctgaatcctcccgctgaggtgacaacgaaaagtcagattcctctctctaaaataaagaccctttttcctctgattgaagccaagaaaaaggatcaagtgactgctcaggaaattttccaagacaaccatgaagatggacctacagctaaaaaattaaagactgagcaagggggagcccacttcagcgtctccagtctggctgaaggcagtgtcacctctcgagtaaccagctcataaatcacatcgaacagtttttggatactaatgaaacaccgtattttatgaagagcatagactgcatccgagccttccgggaagaagccattaagttttcagaagagcagcgctttaacaacttcctgaaagcccttcaagagaaagtggaaattaaacaattaaatcatttctgggaaattgttgtccaggatggaattactctgatcaccaaagaggaagcctctggaagttctgtcacagctgaggaagccaaaaagtttctggcccccaaagacaaaccaagtggagacacagcagctgtatttgaagaaggtggtgatgtggacgatttattggacatgatataggtcgtggatgtatggggaatctaagagagctgccatcgctgtgatgctgggagttctaacaaaacaagttggatgcggccattcaaggggagccaaaatctcaagaaattcccagcaggttacctggaggcggatcatctaattctctgtggaatgaatacacacatatatattacaagggataatttagaccccatacaagtttataaagagtcattgttattttctggttggtgtattattttttctgtggtcttactgatctttgtatattacatacatgctttgaagtttctggaaagtagatcttttcttgacctagtatatcagtgacagttgcagcccttgtgatgtgattagtgtctcatgtggaaccatggcatggttattgatgagtttcttaaccctttccagagtcctcctttgcctgatcctccaacagctgtcacaacttgtgttgagcaagcagtagcatttgcttcctcccaacaagcagctgggttaggaaaaccatgggtaaggacggactcacttctctttttagttgaggccttctagttaccacattactctgcctctgtatataggtggttttctttaagtggggtgggaaggggagcacaatttcccttcatactccttttaagcagtgagttatggtggtggtctcatgaagaaaagaccttttggcccaatctctgccatatcagtgaacctttagaaactcaaaaactgagaaatttactacagtagttagaattatatcacttcactgttctctacttgcaagcctcaaagagagaaagtttcgttatattaaaacacttaggtaacttttcggtctttcccatttctacctaagtcagctttcatctttgtggatggtgtctcctttactaaataagaaaataacaaagcccttattctctttttttcttgtcctcattcttgccttgagttccagttcctctttggtgtacagacttcttggtacccagtcacctctgtcttcagcaccctcataagtcgtcactaatacacagttttgtacatgtaacattaaaggcataaatgactca

SEQ ID NO: 320532 - DNA, 2799 bp, Homo sapiens
atgctcagagttccggggcacggtttccccgcccctttcaggcctagcaggaaacgaagcggctctttccgctatctgccgcttgtccaccggaagcgagttgcgacacggcaggttcccgcccggaagaagcgaccaaagcgcctgaggaccggcaacatggtgcggtcggggaataaggcagctgttgtgctgtgtatggacgtgggctttaccatgagtaactccattcctggtatagaatccccatttgaacaagcaaagaaggtgataaccatgtttgtacagcgacaggtgtttgctgagaacaaggatgagattgctttagtcctgtttggtacagatggcactgacaatcccctttctggtggggatcagtatcagaacatcacagtgcacagacatctgatgctaccagattttgatttgctggaggacattgaaagcaaaatccaaccaggttctcaacaggctgacttcctggatgcactaatcgtgagcatggatgtgattcaacatgaaacaataggaaagaagtttgagaagaggcatattgaaatattcactgacctcagcagccgattcagcaaaagtcagctggatattataattcatagcttgaagaaatgtgacatctccctgcaattcttcttgcctttctcacttggcaaggaagatggaagtggggacagaggagatggcccctttcgcttaggtggccatgggccttcctttccactaaaaggaattaccgaacagcaaaaagaaggtcttgagatagtgaaaatggtgatgatatctttagaaggtgaagatgggttggatgaaatttattcattcagtgagagtctgagaaaactgtgcgtcttcaagaaaattgagaggcattccattcactggccctgccgactgaccattggctccaatttgtctataaggattgcagcctataaatcgattctacaggagagagttaaaaagacttggacagttgtggatgcaaaaaccctaaaaaaagaagatatacaaaaagaaacagtttattgcttaaatgatgatgatgaaactgaatcctcccgctgaggtgacaacgaaaagtcagattcctctctctaaaataaagaccctttttcctctgattgaagccaagaaaaaggatcaagtgactgctcaggaaattttccaagacaaccatgaagatggacctacagctaaaaaattaaagactgagcaagggggagcccacttcagcgtctccagtctggctgaaggcagtgtcacctctgttggaagtgtgaatcctgctgaaaacttccgtgttctagtgaaacagaagaaggccagctttgaggaagcgagtaaccagctcataaatcacatcgaacagtttttggatactaatgaaacaccgtattttatgaagagcatagactgcatccgagccttccgggaagaagccattaagttttcagaagagcagcgctttaacaacttcctgaaagcccttcaagagaaagtggaaattaaacaattaaatcatttctgggaaattgttgtccaggatggaattactctgatcaccaaagaggaagcctctggaagttctgtcacagctgaggaagccaaaaagtttctggcccccaaagacaaaccaagtggagacacagcagctgtatttgaagaaggtggtgatgtggacgatttattggacatgatataggtcgtggatgtatggggaatctaagagagctgccatcgctgtgatgctgggagttctaacaaaacaagttggatgcggccattcaaggggagccaaaatctcaagaaattcccagcaggttacctggaggcggatcatctaattctctgtggaatgaatacacacatatatattacaagggataatttagaccccatacaagtttataaagagtcattgttattttctggttggtgtattattttttctgtggtcttactgatctttgtatattacatacatgctttgaagtttctggaaagtagatcttttcttgacctagtatatcagtgacagttgcagcccttgtgatgtgattagtgtctcatgtggaaccatggcatggttattgatgagtttcttaaccctttccagagtcctcctttgcctgatcctccaacagctgtcacaacttgtgttgagcaagcagtagcatttgcttcctcccaacaagcagctgggttaggaaaaccatgggtaaggacggactcacttctctttttagttgaggccttctagttaccacattactctgcctctgtatataggtggttttctttaagtggggtgggaaggggagcacaatttcccttcatactccttttaagcagtgagttatggtggtggtctcatgaagaaaagaccttttggcccaatctctgccatatcagtgaacctttagaaactcaaaaactgagaaatttactacagtagttagaattatatcacttcactgttctctacttgcaagcctcaaagagagaaagtttcgttatattaaaacacttaggtaacttttcggtctttcccatttctacctaagtcagctttcatctttgtggatggtgtctcctttactaaataagaaaataacaaagcccttattctctttttttcttgtcctcattcttgccttgagttccagttcctctttggtgtacagacttcttggtacccagtcacctctgtcttcagcaccctcataagtcgtcactaatacacagttttgtacatgtaacattaaaggcataaatgactca

SEQ ID NO: 320533 - DNA, 3383 bp, Homo sapiens
atgctcagagttccggggcacggtttccccgcccctttcaggcctagcaggaaacgaagcggctctttccgctatctgccgcttgtccaccggaagcgagttgcgacacggcaggttcccgcccggaagaagcgaccaaagcgcctgaggaccggcaacatggtgcggtcggggaataaggcagctgttgtgctgtgtatggacgtgggctttaccatgagtaactccattcctggtatagaatccccatttgaacaagcaaagaaggtgataaccatgtttgtacagcgacaggtgtttgctgagaacaaggatgagattgctttagtcctgtttggtacagatggcactgacaatcccctttctggtggggatcagtatcagaacatcacagtgcacagacatctgatgctaccagattttgatttgctggaggacattgaaagcaaaatccaaccaggttctcaacaggctgacttcctggatgcactaatcgtgagcatggatgtgattcaacatgaaacaataggaaagaagtttgagaagaggcatattgaaatattcactgacctcagcagccgattcagcaaaagtcagctggatattataattcatagcttgaagaaatgtgacatctccctgcaattcttcttgcctttctcacttggcaaggaagatggaagtggggacagaggagatggcccctttcgcttaggtggccatgggccttcctttccactaaaaggaattaccgaacagcaaaaagaaggtcttgagatagtgaaaatggtgatgatatctttagaaggtgaagatgggttggatgaaatttattcattcagtgagagtctgagaaaactgtgcgtcttcaagaaaattgagaggcattccattcactggccctgccgactgaccattggctccaatttgtctataaggattgcagcctataaatcgattctacaggagagagttaaaaagacttggacagttgtggatgcaaaaaccctaaaaaaagaagatatacaaaaagaaacagtttattgcttaaatgatgatgatgaaactgaagttttaaaagaggatattattcaagggttccgctatggaagtgatatagttcctttctctaaagtggatgaggaacaaatgaaatataaatcggaggggaagtgcttctctgttttgggattttgtaaatcttctcaggttcagagaagattcttcatgggaaatcaagttctaaaggtctttgcagcaagagatgatgaggcagctgcagttgcactttcctccctgattcatgctttggatgacttagacatggtggccatagttcgatatgcttatgacaaaagagctaatcctcaagtcggcgtggcttttcctcatatcaagcataactatgagtgtttagtgtatgtgcagctgcctttcatggaagacttgcggcaatacatgttttcatccttgaaaaacagtaagaaatatgctcccaccgaggcacagttgaatgctgttgatgctttgattgactccatgagcttggcaaagaaagatgagaagacagacacccttgaagacttgtttccaaccaccaaaatcccaaatcctcgatttcagagattatttcagtgtctgctgcacagagctttacatccccgggagcctctacccccaattcagcagcatatttggaatatgctgaatcctcccgctgaggtgacaacgaaaagtcagattcctctctctaaaataaagaccctttttcctctgattgaagccaagaaaaaggatcaagtgactgctcaggaaattttccaagacaaccatgaagatggacctacagctaaaaaattaaagactgagcaagggggagcccacttcagcgtctccagtctggctgaaggcagtgtcacctctgttggaagtgtgaatcctgctgaaaacttccgtgttctagtgaaacagaagaaggccagctttgaggaagcgagtaaccagctcataaatcacatcgaacagtttttggatactaatgaaacaccgtattttatgaagagcatagactgcatccgagccttccgggaagaagccattaagttttcagaagagcagcgctttaacaacttcctgaaagcccttcaagagaaagtggaaattaaacaattaaatcatttctgggaaattgttgtccaggatggaattactctgatcaccaaagaggaagcctctggaagttctgtcacagctgaggaagccaaaaagtttctggcccccaaagacaaaccaagtggagacacagcagctgtatttgaagaaggtggtgatgtggacgatttattggacatgatataggtcgtggatgtatggggaatctaagagagctgccatcgctgtgatgctgggagttctaacaaaacaagttggatgcggccattcaaggggagccgtggaatgaatacacacatatatattacaagggataatttagaccccatacaagtttataaagagtcattgttattttctggttggtgtattattttttctgtggtcttactgatctttgtatattacatacatgctttgaagtttctggaaagtagatcttttcttgacctagtatatcagtgacagttgcagcccttgtgatgtgattagtgtctcatgtggaaccatggcatggttattgatgagtttcttaaccctttccagagtcctcctttgcctgatcctccaacagctgtcacaacttgtgttgagcaagcagtagcatttgcttcctcccaacaagcagctgggttaggaaaaccatgggtaaggacggactcacttctctttttagttgaggccttctagttaccacattactctgcctctgtatataggtggttttctttaagtggggtgggaaggggagcacaatttcccttcatactccttttaagcagtgagttatggtggtggtctcatgaagaaaagaccttttggcccaatctctgccatatcagtgaacctttagaaactcaaaaactgagaaatttactacagtagttagaattatatcacttcactgttctctacttgcaagcctcaaagagagaaagtttcgttatattaaaacacttaggtaacttttcggtctttcccatttctacctaagtcagctttcatctttgtggatggtgtctcctttactaaataagaaaataacaaagcccttattctctttttttcttgtcctcattcttgccttgagttccagttcctctttggtgtacagacttcttggtacccagtcacctctgtcttcagcaccctcataagtcgtcactaatacacagttttgtacatgtaacattaaaggcataaatgactca

SEQ ID NO: 320534 - DNA, 2951 bp, Homo sapiens
atgctcagagttccggggcacggtttccccgcccctttcaggcctagcaggaaacgaagcggctctttccgctatctgccgcttgtccaccggaagcgagttgcgacacggcaggttcccgcccggaagaagcgaccaaagcgcctgaggaccggcaacatggtgcggtcggggaataaggcagctgttgtgctgtgtatggacgtgggctttaccatgagtaactccattcctggtatagaatccccatttgaacaagcaaagaaggtgataaccatgtttgtacagcgacaggtgtttgctgagaacaaggatgagattgctttagtcctgtttggtacagatggcactgacaatcccctttctggtggggatcagtatcagaacatcacagtgcacagacatctgatgctaccagattttgatttgctggaggacattgaaagcaaaatccaaccaggttctcaacaggctgacttcctggatgcactaatcgtgagcatggatgtgattcaacatgaaacaataggaaagaagtttgagaagaggcatattgaaatattcactgacctcagcagccgattcagcaaaagtcagctggatattataattcatagcttgaagaaatgtgacatctccctgcaattcttcttgcctttctcacttggcaaggaagatggaagtggggacagaggagatggcccctttcgcttaggtggccatgggccttcctttccactaaaaggaattaccgaacagcaaaaagaaggtcttgagatagtgaaaatggtgatgatatctttagaaggtgaagatgggttggatgaaatttattcattcagtgagagtctgagaaaactgtgcgtcttcaagaaaattgagaggcattccattcactggccctgccgactgaccattggctccaatttgtctataaggattgcagcctataaatcgattctacaggagagagttaaaaagacttggacagttgtggatgcaaaaaccctaaaaaaagaagatatacaaaaagaaacagtttattgcttaaatgatgatgatgaaactgaagttttaaaagaggatattattcaagggttccgctatggaagtgatatagttcctttctctaaagtggatgaggaacaaatgaaatataaatcggaggggaagtgcttctctgttttgggattttgtaaatcttctcaggttcagagaagattcttcatgggaaatcaagttctaaaggtctttgcagcaagagatgatgaggcagctgcagttgcactttcctccctgattcatgctttggatgacttagacatggtggccatagttcgatatgcttatgacaaaagagctaatcctcaagtcggcgtggcttttcctcatatcaagcataactatgagtgtttagtgtatgtgcagctgcctttcatggaagacttgcggcaatacatgttttcatccttgaaaaacagtaagaaatatgctcccaccgaggcacagttgaatgctgttgatgctttgattgactccatgagcttggcaaagaaagatgagaagacagacacccttgaagacttgtttccaaccaccaaaatcccaaatcctcgatttcagagattatttcagtgtctgctgcacagagctttacatccccgggagcctctacccccaattcagcagcatatttggaatatgctgaatcctcccgctgaggtgacaacgaaaagtcagattcctctctctaaaataaagaccctttttcctctgattgaagccaagaaaaaggatcaagtgactgctcaggaaattttccaagacaaccatgaagatggacctacagctaaaaaattaaagactgagcaagggggagcccacttcagcgtctccagtctggctgaaggcagtgtcacctctgttggaagtgtgaatcctgctgaaaacttccgtgttctagtgaaacagaagaaggccagctttgaggaagcgagtaaccagctcataaatcacatcgaacagtttttggatactaatgaaacaccgtattttatgaagagcatagactgcatccgagccttccgggaagaagccattaagttttcagaagagcagcgctttaacaacttcctgaaagcccttcaagagaaagtggaaattaaacaattaaatcatttctgggaaattgttgtccaggatggaattactctgatcaccaaagaggaagcctctggaagttctgtcacagctgaggaagccaaaaagtttctggcccccaaagacaaaccaagtggagacacagcagctgtatttgaagaaggtggtgatgtggacgatttattggacatgatataggtcgtggatgtatggggaatctaagagagctgccatcgctgtgatgctgggagttctaacaaaacaagttggatgcggccattcaaggggagccaaaatctcaagaaattcccagcaggttacctggaggcggatcatctaattctctgtggaatgaatacacacatatatattacaagggataatttagaccccatacaagtttataaagaaaaaaaaaaacaaaaaaaagaaaaaaaaaaaaaaaaaaaaaaaaaaaaaaaaaaaaaaaaaaaaaaaaaaaaaaaaaaaaaaaaaaaaaaaaaaaaaaaaaaaaaaaaaaaaaaggggggggggggcggccgaagcatacccacccccaccggggcgagccccaaaacaccaacccacgagccgcttgacagacaggagaggccacagccaacacagagctacacataacaaatacaaggacccggcccgaccacgcacaacatgacaagtggcgggtacaacaacacgcctcagcgagcttcagggaaagaaccactcggtggggaagagaacgaggcacaccaaaacaaaaaagagcgtgggcagaaaaaaccggagaa

SEQ ID NO: 320535 - DNA, 2693 bp, Homo sapiens
atgctcagagttccggggcacggtttccccgcccctttcaggcctagcaggaaacgaagcggctctttccgctatctgccgcttgtccaccggaagcgagttgcgacacggcaggttcccgcccggaagaagcgaccaaagcgcctgaggaccggcaacatggtgcggtcggggaataaggcagctgttgtgctgtgtatggacgtgggctttaccatgagtaactccattcctggtatagaatccccatttgaacaagcaaagaaggtgataaccatgtttgtacagcgacaggtgtttgctgagaacaaggatgagattgctttagtcctgtttggtacagatggcactgacaatcccctttctggtggggatcagtatcagaacatcacagtgcacagacatctgatgctaccagattttgatttgctggaggacattgaaagcaaaatccaaccaggttctcaacaggctgacttcctggatgcactaatcgtgagcatggatgtgattcaacatgaaacaataggaaagaagtttgagaagaggcatattgaaatattcactgacctcagcagccgattcagcaaaagtcagctggatattataattcatagcttgaagaaatgtgacatctccctgcaattcttcttgcctttctcacttggcaaggaagatggaagtggggacagaggagatggcccctttcgcttaggtggccatgggccttcctttccactaaaaggaattaccgaacagcaaaaagaaggtcttgagatagtgaaaatggtgatgatatctttagaaggtgaagatgggttggatgaaatttattcattcagtgagagtctgagaaaactgtgcgtcttcaagaaaattgagaggcattccattcactggccctgccgactgaccattggctccaatttgtctataaggattgcagcctataaatcgattctacaggagagagttaaaaagacttggacagttgtggatgcaaaaaccctaaaaaaagaagatatacaaaaagaaacagtttattgcttaaatgatgatgatgaaactgaagttttaaaagaggatattattcaagggttccgctatggaagtgatatagttcctttctctaaagtggatgaggaacaaatgaaatataaatcggaggggaagtgcttctctgttttgggattttgtaaatcttctcaggttcagagaagattcttcatgggaaatcaagttctaaaggtctttgcagcaagagatgatgaggcagctgcagttgcactttcctccctgattcatgctttggatgacttagacatggtggccatagttcgatatgcttatgacaaaagagctaatcctcaagtcggcgtggcttttcctcatatcaagcataactatgagtgtttagtgtatgtgcagctgcctttcatggaagacttgcggcaatacatgttttcatccttgaaaaacagtaagaaatatgctcccaccgaggcacagttgaatgctgttgatgctttgattgactccatgagcttggcaaagaaagatgagaagacagacacccttgaagacttgtttccaaccaccaaaatcccaaatcctcgatttcagagattatttcagtgtctgctgcacagagctttacatccccgggagcctctacccccaattcagcagcatatttggaatatgctgaatcctcccgctgaggtgacaacgaaaagtcagattcctctctctaaaataaagaccctttttcctctgattgaagccaagaaaaaggatcaagtgactgctcaggaaattttccaagacaaccatgaagatggacctacagctaaaaaattaaagactgagcaagggggagcccacttcagcgtctccagtctggctgaaggcagtgtcacctctgttggaagtgtgaatcctgctgaaaacttccgtgttctagtgaaacagaagaaggccagctttgaggaagcgagtaaccagctcataaatcacatcgaacagtttttggatactaatgaaacaccgtattttatgaagagcatagactgcatccgagccttccgggaagaagccattaagttttcagaagagcagcgctttaacaacttcctgaaagcccttcaagagaaagtggaaattaaacaattaaatcatttctgggaaattgttgtccaggatggaattactctgatcaccaaagaggaagcctctggaagttctgtcacagctgaggaagccaaaaagtttctggcccccaaagacaaaccaagtggagacacagcagctgtatttgaagaaggtggtgatgtggacgatttattggacatgatataggtcgtggatgtatggggaatctaagagagctgccatcgctgtgatgctgggagttctaacaaaacaagttggatgcggccattcaaggggagccaaaatctcaagaaattcccagcaggttacctggaggcggatcatctaattctctgtggaatgaatacacacatatatattacaagggataatttagaccccatacaagtttataaagaaaaaaaaaaaaaaaaaaaaattcactgccgtcgtttacacgtctgactgggccctgcgtacccaacttaatcgctgcagacatccccttcggcaggtgcgtaatacaaggcccgccgttcgct

SEQ ID NO: 320536 - DNA, 2498 bp, Homo sapiens
atgctcagagttccggggcacggtttccccgcccctttcaggcctagcaggaaacgaagcggctctttccgctatctgccgcttgtccaccggaagcgagttgcgacacggcaggttcccgcccggaagaagcgaccaaagcgcctgaggaccggcaacatggtgcggtcggggaataaggcagctgttgtgctgtgtatggacgtgggctttaccatgagtaactccattcctggtatagaatccccatttgaacaagcaaagaaggtgataaccatgtttgtacagcgacaggtgtttgctgagaacaaggatgagattgctttagtcctgtttggtacagatggcactgacaatcccctttctggtggggatcagtatcagaacatcacagtgcacagacatctgatgctaccagattttgatttgctggaggacattgaaagcaaaatccaaccaggttctcaacaggctgacttcctggatgcactaatcgtgagcatggatgtgattcaacatgaaacaataggaaagaagtttgagaagaggcatattgaaatattcactgacctcagcagccgattcagcaaaagtcagctggatattataattcatagcttgaagaaatgtgacatctccctgcaattcttcttgcctttctcacttggcaaggaagatggaagtggggacagaggagatggcccctttcgcttaggtggccatgggccttcctttccactaaaaggaattaccgaacagcaaaaagaaggtcttgagatagtgaaaatggtgatgatatctttagaaggtgaagatgggttggatgaaatttattcattcagtgagagtctgagaaaactgtgcgtcttcaagaaaattgagaggcattccattcactggccctgccgactgaccattggctccaatttgtctataaggattgcagcctataaatcgattctacaggagagagttaaaaagacttggacagttgtggatgcaaaaaccctaaaaaaagaagatatacaaaaagaaacagtttattgcttaaatgatgatgatgaaactgaagttttaaaagaggatattattcaagggttccgctatggaagtgatatagttcctttctctaaagtggatgaggaacaaatgaaatataaatcggaggggaagtgcttctctgttttgggattttgtaaatcttctcaggttcagagaagattcttcatgggaaatcaagttctaaaggtctttgcagcaagagatgatgaggcagctgcagttgcactttcctccctgattcatgctttggatgacttagacatggtggccatagttcgatatgcttatgacaaaagagctaatcctcaagtcggcgtggcttttcctcatatcaagcataactatgagtgtttagtgtatgtgcagctgcctttcatggaagacttgcggcaatacatgttttcatccttgaaaaacagtaagaaatatgctcccaccgaggcacagttgaatgctgttgatgctttgattgactccatgagcttggcaaagaaagatgagaagacagacacccttgaagacttgtttccaaccaccaaaatcccaaatcctcgatttcagagattatttcagtgtctgctgcacagagctttacatccccgggagcctctacccccaattcagcagcatatttggaatatgctgaatcctcccgctgaggtgacaacgaaaagtcagattcctctctctaaaataaagaccctttttcctctgattgaagccaagaaaaaggatcaagtgactgctcaggaaattttccaagacaaccatgaagatggacctacagctaaaaaattaaagactgagcaagggggagcccacttcagcgtctccagtctggctgaaggcagtgtcacctctgttggaagtgtgaatcctgctgaaaacttccgtgttctagtgaaacagaagaaggccagctttgaggaagcgagtaaccagctcataaatcacatcgaacagtttttggatactaatgaaacaccgtattttatgaagagcatagactgcatccgagccttccgggaagaagccattaagttttcagaagagcagcgctttaacaacttcctgaaagcccttcaagagaaagtggaaattaaacaattaaatcatttctgggaaattgttgtccaggatggaattactctgatcaccaaagaggaagcctctggaagttctgtcacagctgaggaagccaaaaagtttctggcccccaaagacaaaccaagtggagacacagcagctgtatttgaagaaggtggtgatgtggacgatttattggacatgatataggtcgtggatgtatggggaatctaagagagctgccatcgctgtgatgctgggagttctaacaaaacagtggtgcgctcaggggagccaatctcaaaattccacagtactgggcggcctatcccgggagattacctttttag

SEQ ID NO: 320537 - DNA, 2463 bp, Homo sapiens
atgctcagagttccggggcacggtttccccgcccctttcaggcctagcaggaaacgaagcggctctttccgctatctgccgcttgtccaccggaagcgagttgcgacacggcaggttcccgcccggaagaagcgaccaaagcgcctgaggaccggcaacatggtgcggtcggggaataaggcagctgttgtgctgtgtatggacgtgggctttaccatgagtaactccattcctggtatagaatccccatttgaacaagcaaagaaggtgataaccatgtttgtacagcgacaggtgtttgctgagaacaaggatgagattgctttagtcctgtttggtacagatggcactgacaatcccctttctggtggggatcagtatcagaacatcacagtgcacagacatctgatgctaccagattttgatttgctggaggacattgaaagcaaaatccaaccaggttctcaacaggctgacttcctggatgcactaatcgtgagcatggatgtgattcaacatgaaacaataggaaagaagtttgagaagaggcatattgaaatattcactgacctcagcagccgattcagcaaaagtcagctggatattataattcatagcttgaagaaatgtgacatctccctgcaattcttcttgcctttctcacttggcaaggaagatggaagtggggacagaggagatggcccctttcgcttaggtggccatgggccttcctttccactaaaaggaattaccgaacagcaaaaagaaggtcttgagatagtgaaaatggtgatgatatctttagaaggtgaagatgggttggatgaaatttattcattcagtgagagtctgagaaaactgtgcgtcttcaagaaaattgagaggcattccattcactggccctgccgactgaccattggctccaatttgtctataaggattgcagcctataaatcgattctacaggagagagttaaaaagacttggacagttgtggatgcaaaaaccctaaaaaaagaagatatacaaaaagaaacagtttattgcttaaatgatgatgatgaaactgaagttttaaaagaggatattattcaagggttccgctatggaagtgatatagttcctttctctaaagtggatgaggaacaaatgaaatataaatcggaggggaagtgcttctctgttttgggattttgtaaatcttctcaggttcagagaagattcttcatgggaaatcaagttctaaaggtctttgcagcaagagatgatgaggcagctgcagttgcactttcctccctgattcatgctttggatgacttagacatggtggccatagttcgatatgcttatgacaaaagagctaatcctcaagtcggcgtggcttttcctcatatcaagcataactatgagtgtttagtgtatgtgcagctgcctttcatggaagacttgcggcaatacatgttttcatccttgaaaaacagtaagaaatatgctcccaccgaggcacagttgaatgctgttgatgctttgattgactccatgagcttggcaaagaaagatgagaagacagacacccttgaagacttgtttccaaccaccaaaatcccaaatcctcgatttcagagattatttcagtgtctgctgcacagagctttacatccccgggagcctctacccccaattcagcagcatatttggaatatgctgaatcctcccgctgaggtgacaacgaaaagtcagattcctctctctaaaataaagaccctttttcctctgattgaagccaagaaaaaggatcaagtgactgctcaggaaattttccaagacaaccatgaagatggacctacagctaaaaaattaaagactgagcaagggggagcccacttcagcgtctccagtctggctgaaggcagtgtcacctctgttggaagtgtgaatcctgctgaaaacttccgtgttctagtgaaacagaagaaggccagctttgaggaagcgagtaaccagctcataaatcacatcgaacagtttttggatactaatgaaacaccgtattttatgaagagcatagactgcatccgagccttccgggaagaagccattaagttttcagaagagcagcgctttaacaacttcctgaaagcccttcaagagaaagtggaaattaaacaattaaatcatttctgggaaattgttgtccaggatggaattactctgatcaccaaagaggaagcctctggaagttctgtcacagctgaggaagccaaaaagtttctggcccccaaagacaaaccaagtggagacacagcagctgtatttgaagaaggtggtgatgtggacgatttattggacatgatataggtcgtggatgtatggttgctcggcgtgtgcatgcacacgccgaaaatccagactacatcatatgagatccgaatggacgaagttgttggagatcctctagaacac

SEQ ID NO: 320538 - DNA, 1854 bp, Homo sapiens
tgtatccacagagacgcacttgccagagagattttgcgacacggcaggttcccgcccggaagaagcgaccaaagcgcctgaggaccggcaacatggtgcggtcggggaataaggcagctgttgtgctgtgtatggacgtgggctttaccatgagtaactccattcctggtatagaatccccatttgaacaagcaaagaagccaagaaaaaggatcaagtgactgctcaggaaattttccaagacaaccatgaagatggacctacagctaaaaaattaaagactgagcaagggggagcccacttcagcgtctccagtctggctgaaggcagtgtcacctctgttggaagtgtgaatcctgctgaaaacttccgtgttctagtgaaacagaagaaggccagctttgaggaagcgagtaaccagctcataaatcacatcgaacagtttttggatactaatgaaacaccgtattttatgaagagcatagactgcatccgagccttccgggaagaagccattaagttttcagaagagcagcgctttaacaacttcctgaaagcccttcaagagaaagtggaaattaaacaattaaatcatttctgggaaattgttgtccaggatggaattactctgatcaccaaagaggaagcctctggaagttctgtcacagctgaggaagccaaaaagtttctggcccccaaagacaaaccaagtggagacacagcagctgtatttgaagaaggtggtgatgtggacgatttattggacatgatataggtcgtggatgtatggggaatctaagagagctgccatcgctgtgatgctgggagttctaacaaaacaagttggatgcggccattcaaggggagccaaaatctcaagaaattcccagcaggttacctggaggcggatcatctaattctctgtggaatgaatacacacatatatattacaagggataatttagaccccatacaagtttataaagagtcattgttattttctggttggtgtattattttttctgtggtcttactgatctttgtatattacatacatgctttgaagtttctggaaagtagatcttttcttgacctagtatatcagtgacagttgcagcccttgtgatgtgattagtgtctcatgtggaaccatggcatggttattgatgagtttcttaaccctttccagagtcctcctttgcctgatcctccaacagctgtcacaacttgtgttgagcaagcagtagcatttgcttcctcccaacaagcagctgggttaggaaaaccatgggtaaggacggactcacttctctttttagttgaggccttctagttaccacattactctgcctctgtatataggtggttttctttaagtggggtgggaaggggagcacaatttcccttcatactccttttaagcagtgagttatggtggtggtctcatgaagaaaagaccttttggcccaatctctgccatatcagtgaacctttagaaactcaaaaactgagaaatttactacagtagttagaattatatcacttcactgttctctacttgcaagcctcaaagagagaaagtttcgttatattaaaacacttaggtaacttttcggtctttcccatttctacctaagtcagctttcatctttgtggatggtgtctcctttactaaataagaaaataacaaagcccttattctctttttttcttgtcctcattcttgccttgagttccagttcctctttggtgtacagacttcttggtacccagtcacctctgtcttcagcaccctcataagtcgtcactaatacacagttttgtacatgtaacattaaaggcataaatgactca

SEQ ID NO: 320539 - DNA, 1620 bp, Homo sapiens
atgctcagagttccggggcacggtttccccgcccctttcaggcctagcaggaaacgaagcggctctttccgctatctgccgcttgtccaccggaagcgagttgcgacacggcaggttcccgcccggaagaagcgaccaaagcgcctgaggaccggcaacatggtgcggtcggggaataaggcagctgttgtgctgtgtatggacgtgggctttaccatgagtaactccattcctggtatagaatccccatttgaacaagcaaagaaggtgataaccatgtttgtacagcgacaggtgtttgctgagaacaaggatgagattgctttagtcctgtttggtacagatggcactgacaatcccctttctggtggggatcagtatcagaacatcacagtgcacagacatctgatgctaccagattttgatttgctggaggacattgaaagcaaaatccaaccaggttctcaacaggctgacttcctggatgcactaatcgtgagcatggatgtgattcaacatgaaacaataggaaagaagtttgagaagaggcatattgaaatattcactgacctcagcagccgattcagcaaaagtcagctggatattataattcatagcttgaagaaatgtgacatctccctgcaattcttcttgcctttctcacttggcaaggaagatggaagtggggacagaggagatggcccctttcgcttaggtggccatgggccttcctttccactaaaaggaattaccgaacagcaaaaagaaggtcttgagatagtgaaaatggtgatgatatctttagaaggtgaagatgggttggatgaaatttattcattcagtgagagtctgagaaaactgtgcgtcttcaagaaaattgagaggcattccattcactggccctgccgactgaccattggctccaatttgtctataaggattgcagcctataaatcgattctacaggagagagttaaaaagacttggacagttgtggatgcaaaaaccctaaaaaaagaagatatacaaaaagaaacagtttattgcttaaatgatgatgatgaaactgaagttttaaaagaggatattattcaagggttccgctatggaagtgatatagttcctttctctaaagtggatgaggaacaaatgaaatataaatcggaggggaagtgcttctctgttttgggattttgtaaatcttctcaggttcagagaagattcttcatgggaaatcaagttctaaaggtctttgcagcaagagatgatgaggcagctgcagttgcactttcctccctgattcatgctttggatgacttagacatggtggccatagttcgatatgcttatgacaaaagagctaatcctcaagtcggcgtggcttttcctcatatcaagcataactatgagtgtttagtgtatgtgcagctgcctttcatggaagacttgcggcaatacatgttttcatccttgaaaaacagtaagaaatatgctcccaccgaggcacagttgaatgctgttgatgctttgattgactccatgagcttggcaaagaaagatgagaagacagacacccttgaagacttgtttcttacattcccgggagcctctcccccttcg

SEQ ID NO: 320540 - DNA, 2191 bp, Homo sapiens
agaccggagccgggctccgggcccgaccagaggagggcggtgctgcagggctggtccgggaggtgacgaccggcttcggagagtctatcatggcagctcggactggtcatacggccttgagaagggtagtctcgggatgccgtccgaagtcggcgacagcggccggggcgcaggcgcccgtgcggaatggcagatatttagcttcctgtggtatactgatgagcagaactcttccactacatacctcaattttgcctaaggagatatgtgcacgaactttcttcaaaatcactgcaccattaataaacaaaaggaaagaatattcagagagaagaattttaggatattcaatgcaggaaatgtatgatgtagtatcgggagtggaggattacaagcattttgttccttggtgcaaaaaatcagatgttatatcaaagagatctggatattgtaaaacaagattagaaattggatttccacctgtgttggagcgatatacatcagtagtaaccttggtgaaacctcatttagtaaaggcatcttgtactgatgggagacttttcaatcatttggagactatttggcgttttagcccaggtcttcctggctacccaagaacttgtaccttggatttttcaatttcttttgaatttcgatcacttctacattcccagcttgccacactcttttttgatgaagttgtgaagcagatggtagctgcctttgaaagaagagcatgtaagctgtatggtccagaaacaaatatacctcgggagttaatgcttcatgaagtccatcacacataaaggcaaaaaagaactggtgccacctgcttctgactttagtttgttcacttttaggaagtattttcatgacatgttttcagaagccagaaagcatttgttaaacgcagctttggttataaacctgcaccattgaaaatttgcacatagaatatagactcacttgtacatagaattatttcttcaagtataattcaaaataatatggacattatcatgttctgcattacaataatgggatgtcatcaccattgctagaatactggcatgattcttctgagcagaagttgaaactgtaaatttaaaccttttaattatcaccttacctgaaagaggttagttaagatattcacacagtatgtattatattaaccatatcacacttaagttattaaattcagactatttgtaacttattgttatagggcctgccgtatggcttaggatatttgagtaatcatatatttaaagtaaaaactttgggctgggcacagtggctcacacctgtaatcccagcacttggggaagctgaggtgggcagatcagttgaggtcaggagttctagaccagcctggtcaacatggcgaaaccccatctctactaaaaatacaaaaattagctgggcgtggtggcacacacctgtaatcccagttacttgggaggctgaggcacaagaatcgcttgaacccgggaggcggaggttgcagttagccaagatcgccctgctgcactccagcctgggcaacagagggagactctgtctccaaaaacaaaaacaaaaactgttagtgaaggttccctgggacttttgatattttaaaaattgttcttatgactagtagataaattcattgccataatgaggctagctcccagataaacagtgtattttcttctttttttttttttttttggtgagtggtccagagctttaagctacttttccagtagtttgccactttctccgaggtagtttggctgctctttcagtaatgctaattgtgtgtcaaattttgtctacaacagtaggcaacagatgaagataagttggttgaatgtctccagcactatgcatccctattttctatttattgtgtacactcactttcagtaatgtgtttcaaactggtattttttaaaaaacaaatcaatgtaaggactgaagttgaagtagcaatgtaataaagttaatttgtttattttttgtacagttagtttggttattgaaatcttcctatattgtttaaatgtgtatttgcatagacatagtaaagtgttacagcatttcatgtcttaaaaatatctatgaagatatctaaaatatctatttctatgaagaaacagactttaacaaatataagcaaaattcagttttcttttaaccagtc

SEQ ID NO: 320541 - DNA, 1500 bp, Homo sapiens
atagactcgagttcagaccggaaaggcatcttgtactgatgggagacttttcaatcatttggagactatttggcgttttagcccaggtcttcctggctacccaagaacttgtaccttggatttttcaatttcttttgaatttcgatcacttctacattcccagcttgccacactcttttttgatgaagttgtgaagcagatggtagctgcctttgaaagaagagcatgtaagctgtatggtccagaaacaaatatacctcgggagttaatgcttcatgaagtccatcacacataaaggcaaaaaagaactggtgccacctgcttctgactttagtttgttcacttttaggaagtattttcatgacatgttttcagaagccagaaagcatttgttaaacgcagctttggttataaacctgcaccattgaaaatttgcacatagaatatagactcacttgtacatagaattatttcttcaagtataattcaaaataatatggacattatcatgttctgcattacaataatgggatgtcatcaccattgctagaatactggcatgattcttctgagcagaagttgaaactgtaaatttaaaccttttaattatcaccttacctgaaagaggttagttaagatattcacacagtatgtattatattaaccatatcacacttaagttattaaattcagactatttgtaacttattgttatagggcctgccgtatggcttaggatatttgagtaatcatatatttaaagtaaaaactttgggctgggcacagtggctcacacctgtaatcccagcacttggggaagctgaggtgggcagatcagttgaggtcaggagttctagaccagcctggtcaacatggcgaaaccccatctctactaaaaatacaaaaattagctgggcgtggtggcacacacctgtaatcccagttacttgggaggctgaggcacaagaatcgcttgaacccgggaggcggaggttgcagttagccaagatcgccctgctgcactccagcctgggcaacagagggagactctgtctccaaaaacaaaaacaaaaactgttagtgaaggttccctgggacttttgatattttaaaaattgttcttatgactagtagataaattcattgccataatgaggctagctcccagataaacagtgtattttcttctttttttttttttttttggtgagtggtccagagctttaagctacttttccagtagtttgccactttctccgaggtagtttggctgctctttcagtaatgctaattgtgtgtcaaattttgtctacaacagtaggcaacagatgaagataagttggttgaatgtctccagcactatgcatccctattttctatttattgtgtacactcactttcagtaatgtgtttcaaactggtattttttaaaaaacaaatcaatgtaaggactgaagttgaagtagcaatgtaataaagttaatttgtttattttttgta

SEQ ID NO: 320542 - DNA, 511 bp, Homo sapiens
cgacaggctgacgggaacgtttacggtcagcgtgtgtcagcgacgtgcaacccggaagggaagaaggggcgtgtcaggctgcgcaggcggccagtccattggctggaagagaccggagccgggctccgggcccgaccagaggagggcggtgctgcagggctggtccgggaggtgacgaccggcttcggagagtctatcatggcagctcggactggtcatacggccttgagaagggtagtctcgggatgccgtccgaagtcggcgacagcggccggggcgcaggcgcccgtgcggaatggcaggtaatcaacagcgggggcgctgagacgagagtagttttcgattttggctgccgagttgggggaccggaaggatttgggggtgaggcagagccggactcggtgcatttccgtgtctttagaggagaaggcttttttttgcgtttggcatctgagggactcaagagcggcgcgcatcaccttgggcccaaggctgtgttcgtggctcgttt

SEQ ID NO: 320543 - DNA, 2011 bp, Homo sapiens
agaccggagccgggctccgggcccgaccagaggagggcggtgctgcagggctggtccgggaggtgacgaccggcttcggagagtctatcatggcagctcggactggtcatacggccttgagaagggtagtctcgggatgccgtccgaagtcggcgacagcggccggggcgcaggcgcccgtgcggaatggcagatatttagcttcctgtggtatactgatgagcagaactcttccactacatacctcaattttgcctaaggagatatgtgcacgaactttcttcaaaatcactgcaccattaataaacaaaaggaaagaatattcagagagaagaattttaggatattcaatgcaggaaatgtatgatgtagtatcgggagtggaggattacaagcattttgttccttggtgcaaaaaatcagatgttatatcaaagagatctggatattgtaaaacaagattagaaattggatttccacctgtgttggagcgatatacatcagtagtaaccttggtgaaacctcatttagtaaaggcatcttgtactgatgggagacttttcaatcatttggagactatttggcgttttagcccaggtcttcctggctacccaagaacttgtaccttggatttttcaatttcttttgaatttcgatcacttctacattcccagcttgccacactcttttttgatgaagttgtgaagcagatggtagctgcctttgaaagaagagcatgtaagctgtatggtccagaaacaaatatacctcgggagttaatgcttcatgaagtccatcacacataaaggcaaaaaagaactggtgccacctgcttctgactttagtttgttcacttttaggaagtattttcatgacatgttttcagaagccagaaagcatttgttaaacgcagctttggttataaacctgcaccattgaaaatttgcacatagaatatagactcacttgtacatagaattatttcttcaagtataattcaaaataatatggacattatcatgttctgcattacaataatgggatgtcatcaccattgctagaatactggcatgattcttctgagcagaagttgaaactgtaaatttaaaccttttaattatcaccttacctgaaagaggttagttaagatattcacacagtatgtattatattaaccatatcacacttaagttattaaattcagactatttgtaacttattgttatagggcctgccgtatggcttaggatatttgagtaatcatatatttaaagtaaaaactttgggctgggcacagtggctcacacctgtaatcccagcacttggggaagctgaggtgggcagatcagttgaggtcaggagttctagaccagcctggtcaacatggcgaaaccccatctctactaaaaatacaaaaattagctgggcgtggtggcacacacctgtaatcccagttacttgggaggctgaggcacaagaatcgcttgaacccgggaggcggaggttgcagttagccaagatcgccctgctgcactccagcctgggcaacagagggagactctgtctccaaaaacaaaaacaaaaactgttagtgaaggttccctgggacttttgatattttaaaaattgttcttatgactagtagataaattcattgccataatgaggctagctcccagataaacagtgtattttcttctttttttttttttttttggtgagtggtccagagctttaagctacttttccagtagtttgccactttctccgaggtagtttggctgctctttcagtaatgctaattgtgtgtcaaattttgtctacaacagtaggcaacagatgaagataagttggttgaatgtctccagcactatgcatccctattttctatttattgtgtacactcactttcagtaatgtgtttcaaactggtattttttaaaaaacaaatcaatgtaaggactgaagttgaagtagcaatgtaataaagttaatttgtttattttttgta

SEQ ID NO: 320544 - DNA, 1987 bp, Homo sapiens
agaccggagccgggctccgggcccgaccagaggagggcggtgctgcagggctggtccgggaggtgacgaccggcttcggagagtctatcatggcagctcggactggtcatacggccttgagaaggtcggcgacagcggccggggcgcaggcgcccgtgcggaatggcagatatttagcttcctgtggtatactgatgagcagaactcttccactacatacctcaattttgcctaaggagatatgtgcacgaactttcttcaaaatcactgcaccattaataaacaaaaggaaagaatattcagagagaagaattttaggatattcaatgcaggaaatgtatgatgtagtatcgggagtggaggattacaagcattttgttccttggtgcaaaaaatcagatgttatatcaaagagatctggatattgtaaaacaagattagaaattggatttccacctgtgttggagcgatatacatcagtagtaaccttggtgaaacctcatttagtaaaggcatcttgtactgatgggagacttttcaatcatttggagactatttggcgttttagcccaggtcttcctggctacccaagaacttgtaccttggatttttcaatttcttttgaatttcgatcacttctacattcccagcttgccacactcttttttgatgaagttgtgaagcagatggtagctgcctttgaaagaagagcatgtaagctgtatggtccagaaacaaatatacctcgggagttaatgcttcatgaagtccatcacacataaaggcaaaaaagaactggtgccacctgcttctgactttagtttgttcacttttaggaagtattttcatgacatgttttcagaagccagaaagcatttgttaaacgcagctttggttataaacctgcaccattgaaaatttgcacatagaatatagactcacttgtacatagaattatttcttcaagtataattcaaaataatatggacattatcatgttctgcattacaataatgggatgtcatcaccattgctagaatactggcatgattcttctgagcagaagttgaaactgtaaatttaaaccttttaattatcaccttacctgaaagaggttagttaagatattcacacagtatgtattatattaaccatatcacacttaagttattaaattcagactatttgtaacttattgttatagggcctgccgtatggcttaggatatttgagtaatcatatatttaaagtaaaaactttgggctgggcacagtggctcacacctgtaatcccagcacttggggaagctgaggtgggcagatcagttgaggtcaggagttctagaccagcctggtcaacatggcgaaaccccatctctactaaaaatacaaaaattagctgggcgtggtggcacacacctgtaatcccagttacttgggaggctgaggcacaagaatcgcttgaacccgggaggcggaggttgcagttagccaagatcgccctgctgcactccagcctgggcaacagagggagactctgtctccaaaaacaaaaacaaaaactgttagtgaaggttccctgggacttttgatattttaaaaattgttcttatgactagtagataaattcattgccataatgaggctagctcccagataaacagtgtattttcttctttttttttttttttttggtgagtggtccagagctttaagctacttttccagtagtttgccactttctccgaggtagtttggctgctctttcagtaatgctaattgtgtgtcaaattttgtctacaacagtaggcaacagatgaagataagttggttgaatgtctccagcactatgcatccctattttctatttattgtgtacactcactttcagtaatgtgtttcaaactggtattttttaaaaaacaaatcaatgtaaggactgaagttgaagtagcaatgtaataaagttaatttgtttattttttgta

SEQ ID NO: 320545 - DNA, 606 bp, Homo sapiens
tttttctataaatttttaaaatattacttttcaaaaaggaaaagtaaaagggtccattgggctttagctgaaggaaatgctccagaaattggactgtgtaaaccatcagtacaataatacgctgtgtatgtatgtgtatataaaatgagaattatggcataattggagcatttgcattaatcaacaaactcacattgagacaaaacttagttttacagctgtcttgattaaagccaagtgttccatgttgctgtgaagaatagcctctttcaaatactttggaaagtagttacttggaaacttgtaaaggtattacatttttatatttaaacacctatagagatcttcaattccttgagtctgagcttgtgggtggaattctaaatttgtatcataatctgtcttttgtgaaacattttgaaaatatgtatatataatattgtatatgcaaattgtgttgtttcacttgtaaagggaaaaggcttatttttctttatatttctgataacttgttttgcatatgaccagcactgactgaaaggcatgtgtagctgcaaacactgttgctttttttgtgaaatgaaaataaaagtatttaaatacaaa

SEQ ID NO: 320546 - DNA, 564 bp, Homo sapiens
cttggacttacgggtacctaatgaaacgtggaggtccggatgtatgaaaatctcctcttttcccctttccttattgcctctgtaggcaataattatagagtagtatagatggtttttcttttttatccatctgcctatctccaggaggatggggtgtgcacttttagaaatgtatataaatgttcttgctcctttttcctgttacttcattgtgtgccaaggcctttccatggatacttaggtacgtaatgaaaattgaggttcattctatgaaaaaatctccccttctccccttcccttattgcctgtcttggcaatggccagtagatatagaagagtgcacttagtgcactcttctatatctaccaccgatttgaggtgaggattccagcttgctggtactctggaaagatagtgagctgagagaccagcagaattatttttcatgcctcaaacaggtgaatccagtctggaaaaagtgtttggaaaacaaggcttgaagtttgttgcccaagatgttgaaggagagtagaataatacttgtagatatagaagagtgcacta

SEQ ID NO: 320547 - DNA, 3464 bp, Homo sapiens
cttggacttacgggtacctaatgaaacgtggaggtccggatgtatgaaaatctcctcttttcccctttccttattgcctctgtaggcaataattatagagtagtatagatggtttttcttttttatccatctgcctatctccaggaggatggggtgtgcacttttagaaatgtatataaatgttcttgctcctttttcctgttacttcattgtgtgccaaggcctttccatggatacttaggtacgtaatgaaaattgaggttcattctatgaaaaaatctccccttctccccttcccttattgcctgtcttggcaatggccagtagagtagttatttaagggatttgtttttttgtttttttgttttttttttggtaggggaggtggggaatttctgggtttgtcttttttttaatgtatataaaagtttgctagttgttgttattgttgttctttcactctcaacacagttttttgtttggagttgtaggaatcaaatgtaatgagggacccagacccgagagtgtggtaaatattctttgccttcctcagagcctgtatacacaagcaagtagtatgtgagcactacagggcttgggttttggttttttgcttttgagggttttaatgaggagtgggattgttgagaggaaaaggcaagatatataatttttttaatgtatataaatgttttgctcctttttgatgttaacttcattttgaatctggtcctttgtatgaccacttaggtacttaatagtaataaagttgagattgactctatgaaaaatatcccatactccccatccctcattgcctagggggcaatggtagaatagatgtttggtttcttttgggggtgtctgagtgtatatgtgtgtgtatatacacacaagaacacacatatttatatactatacacacacattttaatgtatataaatatttgctacattctgtgtgttatataatgtggtacccagtcctctgctgggacatggatgtacataatgaaacatggaggtccagacgtatgataactctcctgtttcccttccctcattgcctacaggggcaatagtttcatatcttgggttttttattgtttaatttttttttatggggaggggttctttgggtgggtaatagtcagggggaaaggacagtgtctatactttttaaagatgtatataaatgtttcatgttattggttttgtacctagtcctttgcatggatatataggtacctaatgaaaatcgaggatcagtgtatgacaaatctcccatcctcccctttccttattgcctgtgtcggcaataggaagtagaatagttgtgtgttgtttacttacttgtctgttttagagagatttctatttttggtaggggaatattcttaatatgttttcatatctttatttcattttgtagtcttttgcatggctatgtagggacctaatgaaagtcgagtttcataatatgacagctcacttcttttcctacatatttcctcacttagcagtagctagtgtagttattttgtggttattttatttcattctctaggatctattccattaaggatgcaagtgtgtagatgcatatatatcatttgcttctttcttccgccattattttcctttaacacttagtcccttgcaaggggtctgactatacctaacaaaaataaagacctactaaatccctgccatctggctggaaggtgtagcagtgtattaatgtaactaatagcaacaggtgtgcagcagataagacaggagaagacactcagctatggttgagttgtgaaagctaattagatccagcatttcttatgttgattcagattgaatgaggtagtgaaaagggacctgtgcttttgtaaattctagaaaggcaagaggacaatattgaataaagctgtgtttaaacttcattgctcatatatcttttagtaactggtaaaccggcgaagctgataagccaataagagtgctgtctagaacgcatttgcaaaccgttaagagtagcttctttttgaggcctggacttctgattcatctatagaagtctattatgattccatcaattgcatagcttgtgtacctggtagaaattgtgtcttggaatgaccctttcgagttattgacatggctctgatgaatagaacatgagccccaaaactaaatccaaaaggaattttctatctttcatcccccacatgtggcaagacaagttggccctttcttacccagaggtcttttgtgtgactgcatctttctcctccgttctccattgtgtgctttccattttgtctttagtgcctatactgttaggtgttttcttcactggcattcacaaatttaagccattgctgcctcattagccttgtattttgtgtgcatatcatatatccagacctgtatgttcgctttaagcattcttatatcacactgtctcctcatctaccatatggtaaatgttaaaactccacatttgtctgcatcagggaaaatgcatgggcacacatcctccctccctccctctctgctctcctcccttccttcaggcctcttagcattgtttgttttcccatttctgatactactactccatgctgaagatttgccatattactattttggaaacattgagtgatagaactcctagaaaatttgcaaagaaatgttacatactgtatatcaaactctcagattctagtgttgaaaaagtagcctatactttgctattacttatacctgctgccatagaaaaaaataagtttattcatgacacatttacatttgatcataaataaaagaaaaaagggcacctttttggagttagtcatggtagtcattagtgatatttctgaacagttcttaatttaaaatacttcaaaggaagtaaaggtcatggcttagctgaaggaaatgctccagaaattggactgtgtaaaccatcagtacaataatacgctgtgtatgtatgtgtatataaaatgagaattatggcataattggagcatttgcattaatcaacaaactcacattgagacaaaacttagttttacagctgtcttgattaaagccaagtgttccatgttgctgtgaagaatagcctctttcaaatactttggaaagtagttacttggaaacttgtaaaggtattacatttttatatttaaacacctatagagatcttcaattccttgagtctgagcttgtgggtggaattctaaatttgtatcataatctgtcttttgtgaaacattttgaaaatatgtatatataatattgtatatgcaaattgtgttgtttcacttgtaaagggaaaaggcttatttttctttatatttctgataacttgttttgcatatgaccagcactgactgaaaggcatgtgtagctgcaaacactgttgctttttttgtgaaatgaaaataaaagtatttaaatacaaa

SEQ ID NO: 320548 - DNA, 3650 bp, Homo sapiens
cttggacttacgggtacctaatgaaacgtggaggtccggatgtatgaaaatctcctcttttcccctttccttattgcctctgtaggcaataattatagagtagtatagatggtttttcttttttatccatctgcctatctccaggaggatggggtgtgcacttttagaaatgtatataaatgttcttgctcctttttcctgttacttcattgtgtgccaaggcctttccatggatacttaggtacgtaatgaaaattgaggttcattctatgaaaaaatctccccttctccccttcccttattgcctgtcttggcaatggccagtagagtagttatttaagggatttgtttttttgtttttttgttttttttttggtaggggaggtggggaatttctgggtttgtcttttttttaatgtatataaaagtttgctagttgttgttattgttgttctttcactctcaacacagttttttgtttggagttgtaggaatcaaatgtaatgagggacccagacccgagagtgtggtaaatattctttgccttcctcagagcctgtatacacaagcaagtagtatgtgagcactacagggcttgggttttggttttttgcttttgagggttttaatgaggagtgggattgttgagaggaaaaggcaagatatataatttttttaatgtatataaatgttttgctcctttttgatgttaacttcattttgaatctggtcctttgtatgaccacttaggtacttaatagtaataaagttgagattgactctatgaaaaatatcccatactccccatccctcattgcctagggggcaatggtagaatagatgtttggtttcttttgggggtgtctgagtgtatatgtgtgtgtatatacacacaagaacacacatatttatatactatacacacacattttaatgtatataaatatttgctacattctgtgtgttatataatgtggtacccagtcctctgctgggacatggatgtacataatgaaacatggaggtccagacgtatgataactctcctgtttcccttccctcattgcctacaggggcaatagtttcatatcttgggttttttattgtttaatttttttttatggggaggggttctttgggtgggtaatagtcagggggaaaggacagtgtctatactttttaaagatgtatataaatgtttcatgttattggttttgtacctagtcctttgcatggatatataggtacctaatgaaaatcgaggatcagtgtatgacaaatctcccatcctcccctttccttattgcctgtgtcggcaataggaagtagaatagttgtgtgttgtttacttacttgtctgttttagagagatttctatttttggtaggggaatattcttaatatgttttcatatctttatttcattttgtagtcttttgcatggctatgtagggacctaatgaaagtcgagtttcataatatgacagctcacttcttttcctacatatttcctcacttagcagtagctagtgtagttattttgtggttattttatttcattctctaggatctattccattaaggatgcaagtgtgtagatgcatatatatcatttgcttctttcttccgccattattttcctttaacacttagtcccttgcaaggggtctgactatacctaacaaaaataaagacctactaaatccctgccatctggctggaaggtgtagcagtgtattaatgtaactaatagcaacaggtgtgcagcagataagacaggagaagacactcagctatggttgagttgtgaaagctaattagatccagcatttcttatgttgattcagattgaatgaggtagtgaaaagggacctgtgcttttgtaaattctagaaaggcaagaggacaatattgaataaagctgtgtttaaacttcattgctcatatatcttttagtaactggtaaaccggcgaagctgataagccaataagagtgctgtctagaacgcatttgcaaaccgttaagagtagcttctttttgaggcctggacttctgattcatctatagaagtctattatgattccatcaattgcatagcttgtgtacctggtagaaattgtgtcttggaatgaccctttcgagttattgacatggctctgatgaatagaacatgagccccaaaactaaatccaaaaggaattttctatctttcatcccccacatgtggcaagacaagttggccctttcttacccagaggtcttttgtgtgactgcatctttctcctccgttctccattgtgtgctttccattttgtctttagtgcctatactgttaggtgttttcttcactggcattcacaaatttaagccattgctgcctcattagccttgtattttgtgtgcatatcatatatccagacctgtatgttcgctttaagcattcttatatcacactgtctcctcatctaccatatggtaaatgttaaaactccacatttgtctgcatcagggaaaatgcatgggcacacatcctccctccctccctctctgctctcctcccttccttcaggcctcttagcattgtttgttttcccatttctgatactactactccatgctgaagatttgccatattactattttggaaacattgagtgatagaactcctagaaaatttgcaaagaaatgttacatactgtatatcaaactctcagattctagtgttgaaaaagtagcctatactttgctattacttatacctgctgccatagaaaaaaataagtttattcatgacacatttacatttgatcataaataaaagaaaaaagggcacctttttggagttagtcatggtagtcattagtgatatttctgaacagttcttaatttaaaatacttcaaaggaagtaaaggtcatggcttagctgaaggaaatgctccagaaattggactgtgtaaaccatcagtacaataatacgctgtgtatgtatgtgtatataaaatgagaattatggcataattggagcatttgcattaatcaacaaactcacattgagacaaaacttagttttacagctgtcttgattaaagccaagtgttccatgttgctgtgaagaatagcctctttcaaatactttggaaagtagttacttggaaacttgtaaaggtattacatttttatatttaaacacctatagagatcttcaattccttgagtctgagcttgtgggtggaattctaaatttgtatcataatctgtcttttgtgaaacattttgaaaatatgtatatataatattgtatatgcaaattgtgttgtttcacttgtaaagggaaaaggcttatttttctttatatttctgataacttgttttgcatatgaccagcactgactgaaaggcatgtgtagctgcaaacactgttgctttttttgtgaaatgaaaataaaagtatttaaatacaaaaaaaaaaagaaaaacaacaaacaaacaacaacaactctgttcgcgggcggccctgttgcggccctcgagaaagaaagacttttcatacacccctccgcgttgtgggggcgcgcggggggcccccgttgggtttagcggcgacacccggcgcccaagaggcgggctgccccagagggaaacacccgg

SEQ ID NO: 320549 - DNA, 1629 bp, Homo sapiens
  misc_feature (21)..(21): n is a, c, g, or t
  misc_feature (33)..(33): n is a, c, g, or t
tcatcgagctggtaccgggantggagagagaanggacctgtgcttttgtaaattctagaaaggcaagaggacaatattgaataaagctgtgtttaaacttcattgctcatatatcttttagtaactggtaaaccggcgaagctgataagccaataagagtgctgtctagaacgcatttgcaaaccgttaagagtagcttctttttgaggcctggacttctgattcatctatagaagtctattatgattccatcaattgcatagcttgtgtacctggtagaaattgtgtcttggaatgaccctttcgagttattgacatggctctgatgaatagaacatgagccccaaaactaaatccaaaaggaattttctatctttcatcccccacatgtggcaagacaagttggccctttcttacccagaggtcttttgtgtgactgcatctttctcctccgttctccattgtgtgctttccattttgtctttagtgcctatactgttaggtgttttcttcactggcattcacaaatttaagccattgctgcctcattagccttgtattttgtgtgcatatcatatatccagacctgtatgttcgctttaagcattcttatatcacactgtctcctcatctaccatatggtaaatgttaaaactccacatttgtctgcatcagggaaaatgcatgggcacacatcctccctccctccctctctgctctcctcccttccttcaggcctcttagcattgtttgttttcccatttctgatactactactccatgctgaagatttgccatattactattttggaaacattgagtgatagaactcctagaaaatttgcaaagaaatgttacatactgtatatcaaactctcagattctagtgttgaaaaagtagcctatactttgctattacttatacctgctgccatagaaaaaaataagtttattcatgacacatttacatttgatcataaataaaagaaaaaagggcacctttttggagttagtcatggtagtcattagtgatatttctgaacagttcttaatttaaaatacttcaaaggaagtaaaggtcatggcttagctgaaggaaatgctccagaaattggactgtgtaaaccatcagtacaataatacgctgtgtatgtatgtgtatataaaatgagaattatggcataattggagcatttgcattaatcaacaaactcacattgagacaaaacttagttttacagctgtcttgattaaagccaagtgttccatgttgctgtgaagaatagcctctttcaaatactttggaaagtagttacttggaaacttgtaaaggtattacatttttatatttaaacacctatagagatcttcaattccttgagtctgagcttgtgggtggaattctaaatttgtatcataatctgtcttttgtgaaacattttgaaaatatgtatatataatattgtatatgcaaattgtgttgtttcacttgtaaagggaaaaggcttatttttctttatatttctgataacttgttttgcatatgaccagcactgactgaaaggcatgtgtagctgcaaacactgttgctttttttgtgaaatgaaaataaaagtatttaaatacaaa

SEQ ID NO: 320550 - DNA, 1694 bp, Homo sapiens
tcgataagggccaagagtcttgtcaaaaagaaaagtgatgttcactggaaagtgtggccaagtttgggatttccttttaaaagtattctaaccaccagaggtttttgatcagctagttccatgttcactgttaacacatgaggacttcttatcactgctggagctcctgcttatctgttttcttgcttgcatactagttggcttatctgataagccaataagagtgctgtctagaacgcatttgcaaaccgttaagagtagcttctttttgaggcctggacttctgattcatctatagaagtctattatgattccatcaattgcatagcttgtgtacctggtagaaattgtgtcttggaatgaccctttcgagttattgacatggctctgatgaatagaacatgagccccaaaactaaatccaaaaggaattttctatctttcatcccccacatgtggcaagacaagttggccctttcttacccagaggtcttttgtgtgactgcatctttctcctccgttctccattgtgtgctttccattttgtctttagtgcctatactgttaggtgttttcttcactggcattcacaaatttaagccattgctgcctcattagccttgtattttgtgtgcatatcatatatccagacctgtatgttcgctttaagcattcttatatcacactgtctcctcatctaccatatggtaaatgttaaaactccacatttgtctgcatcagggaaaatgcatgggcacacatcctccctccctccctctctgctctcctcccttccttcaggcctcttagcattgtttgttttcccatttctgatactactactccatgctgaagatttgccatattactattttggaaacattgagtgatagaactcctagaaaatttgcaaagaaatgttacatactgtatatcaaactctcagattctagtgttgaaaaagtagcctatactttgctattacttatacctgctgccatagaaaaaaataagtttattcatgacacatttacatttgatcataaataaaagaaaaaagggcacctttttggagttagtcatggtagtcattagtgatatttctgaacagttcttaatttaaaatacttcaaaggaagtaaaggtcatggcttagctgaaggaaatgctccagaaattggactgtgtaaaccatcagtacaataatacgctgtgtatgtatgtgtatataaaatgagaattatggcataattggagcatttgcattaatcaacaaactcacattgagacaaaacttagttttacagctgtcttgattaaagccaagtgttccatgttgctgtgaagaatagcctctttcaaatactttggaaagtagttacttggaaacttgtaaaggtattacatttttatatttaaacacctatagagatcttcaattccttgagtctgagcttgtgggtggaattctaaatttgtatcataatctgtcttttgtgaaacattttgaaaatatgtatatataatattgtatatgcaaattgtgttgtttcacttgtaaagggaaaaggcttatttttctttatatttctgataacttgttttgcatatgaccagcactgactgaaaggcatgtgtagctgcaaacactgttgctttttttgtgaaatgaaaataaaagtatttaaatacaaa

SEQ ID NO: 320551 - DNA, 1510 bp, Homo sapiens
ctatcgattaatccataatccagtgctgctcaaacgcctctccttaccggtttagcagtatcttttctattagcaggcctgctacttcgtgcatttactactcatatagtaactctattcatagattccttcactttgctacttcttgtttcccttttttaaattgtgtcttggaatgaccctttcgagttattgacatggctctgatgaatagaacatgagccccaaaactaaatccaaaaggaattttctatctttcatcccccacatgtggcaagacaagttggccctttcttacccagaggtcttttgtgtgactgcatctttctcctccgttctccattgtgtgctttccattttgtctttagtgcctatactgttaggtgttttcttcactggcattcacaaatttaagccattgctgcctcattagccttgtattttgtgtgcatatcatatatccagacctgtatgttcgctttaagcattcttatatcacactgtctcctcatctaccatatggtaaatgttaaaactccacatttgtctgcatcagggaaaatgcatgggcacacatcctccctccctccctctctgctctcctcccttccttcaggcctcttagcattgtttgttttcccatttctgatactactactccatgctgaagatttgccatattactattttggaaacattgagtgatagaactcctagaaaatttgcaaagaaatgttacatactgtatatcaaactctcagattctagtgttgaaaaagtagcctatactttgctattacttatacctgctgccatagaaaaaaataagtttattcatgacacatttacatttgatcataaataaaagaaaaaagggcacctttttggagttagtcatggtagtcattagtgatatttctgaacagttcttaatttaaaatacttcaaaggaagtaaaggtcatggcttagctgaaggaaatgctccagaaattggactgtgtaaaccatcagtacaataatacgctgtgtatgtatgtgtatataaaatgagaattatggcataattggagcatttgcattaatcaacaaactcacattgagacaaaacttagttttacagctgtcttgattaaagccaagtgttccatgttgctgtgaagaatagcctctttcaaatactttggaaagtagttacttggaaacttgtaaaggtattacatttttatatttaaacacctatagagatcttcaattccttgagtctgagcttgtgggtggaattctaaatttgtatcataatctgtcttttgtgaaacattttgaaaatatgtatatataatattgtatatgcaaattgtgttgtttcacttgtaaagggaaaaggcttatttttctttatatttctgataacttgttttgcatatgaccagcactgactgaaaggcatgtgtagctgcaaacactgttgctttttttgtgaaatgaaaataaaagtatttaaatacaaa

SEQ ID NO: 320552 - DNA, 476 bp, Homo sapiens
atgaccaatgagttaccgaattcggagcctcggtacccataagcaggttaatacagacctcacattgagacaaaacttagttttacagctgtcttgattaaagccaagtgttccatgttgctgtgaagaatagcctctttcaaatactttggaaagtagttacttggaaacttgtaaaggtattacatttttatatttaaacacctatagagatcttcaattccttgagtctgagcttgtgggtggaattctaaatttgtatcataatctgtcttttgtgaaacattttgaaaatatgtatatataatattgtatatgcaaattgtgttgtttcacttgtaaagggaaaaggcttatttttctttatatttctgataacttgttttgcatatgaccagcactgactgaaaggcatgtgtagctgcaaacactgttgctttttttgtgaaatgaaaataaaagtatttaaatacaaa

SEQ ID NO: 320553 - DNA, 2747 bp, Homo sapiens
agcgggtcatttcacctgcgtcgtcccggacgccatttggctgttgacgtggttccgagccagcaaataacgccagcagccctcccagatccacgccggcccgtctctccgccggccccctcctcgcagtggtttctcctgcagctcccctgggctccgcggccagtagtgcagcccgtggagccgcggctttgcccgtctcctctgggtggccccagtgcgcgggctgacactcattcagccggggaaggtgaggcgagtagaggctggtgcggaacttgccgcccccagcagcgccggcgggctaagcccagggccgggcagacaaaagaggccgcccgcgtaggaaggcacggccggcggcggcggagcgcagcgatggccgggcgagggggcagcgcgctgctggctctgtgcggggcactggctgcctgcgggtggctcctgggcgccgaagcccaggagcccggggcgcccgcggcgggcatgaggcggcgccggcggctgcagcaagaggacggcatctccttcgagtaccaccgctaccccgagctgcgcgaggcgctcgtgtccgtgtggctgcagtgcaccgccatcagcaggatttacacggtggggcgcagcttcgagggccgggagctcctggtcatcgagctgtccgacaaccctggcgtccatgagcctggtgagcctgaatttaaatacattgggaatatgcatgggaatgaggctgttggacgagaactgctcattttcttggcccagtacctatgcaacgaataccagaaggggaacgagacaattgtcaacctgatccacagtacccgcattcacatcatgccttccctgaacccagatggctttgagaaggcagcgtctcagcctggtgaactcaaggactggtttgtgggtcgaagcaatgcccagggaatagatctgaaccggaactttccagacctggataggatagtgtacgtgaatgagaaagaaggtggtccaaataatcatctgttgaaaaatatgaagaaaattgtggatcaaaacacaaagcttgctcctgagaccaaggctgtcattcattggattatggatattccttttgtgctttctgccaatctccatggaggagaccttgtggccaattatccatatgatgagacgcggagtggtagtgctcacgaatacagctcctccccagatgacgccattttccaaagcttggcccgggcatactcttctttcaacccggccatgtctgaccccaatcggccaccatgtcgcaagaatgatgatgacagcagctttgtagatggaaccaccaacggtggtgcttggtacagcgtacctggagggatgcaagacttcaattaccttagcagcaactgttttgagatcaccgtggagcttagctgtgagaagttcccacctgaagagactctgaagacctactgggaggataacaaaaactccctcattagctaccttgagcagatacaccgaggagttaaaggatttgtccgagaccttcaaggtaacccaattgcgaatgccaccatctccgtggaaggaatagaccacgatgttacatccgcaaaggatggtgattactggagattgcttatacctggaaactataaacttacagcctcagctccaggctatctggcaataacaaagaaagtggcagttccttacagccctgctgctggggttgattttgaactggagtcattttctgaaaggaaagaagaggagaaggaagaattgatggaatggtggaaaatgatgtcagaaactttaaatttttaaaaaggcttctagttagctgctttaaatctatctatataatgtagtatgatgtaatgtggtcttttttttagattttgtgcagttaatacttaacattgatttattttttaatcatttaaatattaatcaactttccttaaaataaatagcctcttaggtaaaaatataagaacttgatatatttcattctcttatatagtattcattttcctacctatattacacaaaaaagtatagaaaagatttaagtaattttgccatcctaggcttaaatgcaatattcctggtattatttacaatgcagaattttttgagtaattctagctttcaaaaattagtgaagttcttttactgtaattggtgacaatgtcacataatgaatgctattgaaaaggttaacagatacagctcggagttgtgagcactctactgcaagacttaaatagttcagtataaattgtcgtttttttcttgtgctgactaactataagcatgatcttgttaatgcatttttgatgggaagaaaaggtacatgtttacaaagaggttttatgaaaagaataaaaattgacttcttgcttgtacatataggagcaatactattatattatgtagtccgttaacactacttaaaagtttagggttttctcttggttgtagagtggcccagaattgcattctgaatgaataaaggttaaaaaaaaatccccagtgcatgtatttcagttctctaagatttttggtctggcattgtggtcttatgatgaaaacatgtatcctcttaatggcggcttctcatatattcatcctgtacattttaaaatttgttaagcaactactgtggctaagcactgcatagcctctatgtatgttattgtggcaggcaaaaggttctgattttgggcacaacctttatataaataacacaaaaattaatg

SEQ ID NO: 320554 - DNA, 404 bp, Homo sapiens
cacagatgggcgtgagcggtgaagaggcttctgagacggagggagaggacaaaccagcaggctgggtccaggtgtcctggctccgaccttaccccctccccggactcacttattcttacggcaagcatgacgggggaaccatgaagatccagcaggaaaacacccagtttctgtatccaaaggcctttcctgttttggtaagccagctgggccaacactccctaaacaaggccaaattccacctttgtgcagctctgcgggggtgctataccaccctataccaccctggtattatttacaatgcagaattttttgagtaattctagctttcaaaaattagtgaagtggtggtatagctgataccaccgtgggaaaacaaataagcaattgacaccaccaaattc

SEQ ID NO: 320555 - DNA, 295 bp, Homo sapiens
tactgtccggcttgcctctactactgccggttcctctactactgccggtgcctcgtagtgctcacgaatacagctcctccccagatgacgccattttccaaagcttggcccgggcatactcttctttcaacccggccatgtctgaccccaattactgccggttcctctactaataggtttggtcctagcctttctattagctcttagtaagattacacatgctagcatccccgtaccagtgagttcaccctctaaatcaccacgatcaaaagggacaagcatcaagcacgcagca

SEQ ID NO: 320556 - DNA, 2454 bp, Homo sapiens
agcgggtcatttcacctgcgtcgtcccggacgccatttggctgttgacgtggttccgagccagcaaataacgccagcagccctcccagatccacgccggcccgtctctccgccggccccctcctcgcagtggtttctcctgcagctcccctgggctccgcggccagtagtgcagcccgtggagccgcggctttgcccgtctcctctgggtggccccagtgcgcgggctgacactcattcagccggggaaggtgaggcgagtagaggctggtgcggaacttgccgcccccagcagcgccggcgggctaagcccagggccgggcagacaaaagaggccgcccgcgtaggaaggcacggccggcggcggcggagcgcagcgatggccgggcgagggggcagcgcgctgctggctctgtgcggggcactggctgcctgcgggtggctcctgggcgccgaagcccaggagcccggggcgcccgcggcgggcatgaggcggcgccggcggctgcagcaagaggacggcatctccttcgagtaccaccgctaccccgagctgcgcgaggcgctcgtgtccgtgtggctgcagtgcaccgccatcagcaggatttacacggtggggcgcagcttcgagggccgggagctcctggtcatcgagctgtccgacaaccctggcgtccatgagcctggtgagcctgaatttaaatacattgggaatatgcatgggaatgaggctgttggacgagaactgctcattttcttggcccagtacctatgcaacgaataccagaaggggaacgagacaattgtcaacctgatccacagtacccgcattcacatcatgccttccctgaacccagatggctttgagaaggcagcgtctcagcctggtgaactcaaggactggtttgtgggtcgaagcaatgcccagggaatagatctgaaccggaactttccagacctggataggatagtgtacgtgaatgagaaagaaggtggtccaaataatcatctgttgaaaaatatgaagaaaattgtggatcaaaacacaaagcttgctcctgagaccaaggctgtcattcattggattatggatattccttttgtgctttctgccaatctccatggaggagaccttgtggccaattatccatatgatgagacgcggagtggtagtgctcacgaatacagctcctccccagatgacgccattttccaaagcttggcccgggcatactcttctttcaacccggccatgtctgaccccaatcggccaccatgtcgcaagaatgatgatgacagcagctttgtagatggaaccaccaacggtggtgcttggtacagcgtacctggagggatgcaagacttcaattaccttagcagcaactgttttgagatcaccgtggagcttagctgtgagaagttcccacctgaagagactctgaagacctactgggaggataacaaaaactccctcattagctaccttgagcagatacaccgaggagttaaaggatttgtccgagaccttcaaggtaacccaattgcgaatgccaccatctccgtggaaggaatagaccacgatgttacatccgcaaaggatggtgattactggagattgcttatacctggaaactataaacttacagcctcagctccaggctatctggcaataacaaagaaagtggcagttccttacagccctgctgctggggttgattttgaactggagtcattttctgaaaggaaagaagaggagaaggaagaattgatggaatggtggaaaatgatgtcagaaactttaaatttttaatgtggtcttttttttagattttgtgcagttaatacttaacattgatttattttttaatcatttaaatattaatcaactttccttaaaataaatagcctcttaggtaaaaatataagaacttgatatatttcattctcttatatagtattcattttcctacctatattacacaaaaaagtatagaaaagatttaagtaattttgccatcctaggcttaaatgcaatattcctggtattatttacaatgcagaattttttgagtaattctagctttcaaaaattagtgaagttcttttactgtaattggtgacaatgtcacataatgaatgctattgaaaaggttaacagatacagctcggagttgtgagcactctactgcaagacttaaatagttcagtataaattgtcgtttttttcttgtgctgactaactataagcatgatcttgttaatgcatttttgatgggaagaaaaggtacatgtttacaaagaggttttatgaaaagaataaaaattgacttcttgcttgtacatataggagcaatactattatattatgtagtccgttaacactacttaaaagtttagggttttctcttggttgtagagtggcccagaattgcattctgaatgaataaaggttaaa

SEQ ID NO: 320557 - DNA, 2465 bp, Homo sapiens
agcgggtcatttcacctgcgtcgtcccggacgccatttggctgttgacgtggttccgagccagcaaataacgccagcagccctcccagatccacgccggcccgtctctccgccggccccctcctcgcagtggtttctcctgcagctcccctgggctccgcggccagtagtgcagcccgtggagccgcggctttgcccgtctcctctgggtggccccagtgcgcgggctgacactcattcagccggggaaggtgaggcgagtagaggctggtgcggaacttgccgcccccagcagcgccggcgggctaagcccagggccgggcagacaaaagaggccgcccgcgtaggaaggcacggccggcggcggcggagcgcagcgatggccgggcgagggggcagcgcgctgctggctctgtgcggggcactggctgcctgcgggtggctcctgggcgccgaagcccaggagcccggggcgcccgcggcgggcatgaggcggcgccggcggctgcagcaagaggacggcatctccttcgagtaccaccgctaccccgagctgcgcgaggcgctcgtgtccgtgtggctgcagtgcaccgccatcagcaggatttacacggtggggcgcagcttcgagggccgggagctcctggtcatcgagctgtccgacaaccctggcgtccatgagcctggtgagcctgaatttaaatacattgggaatatgcatgggaatgaggctgttggacgagaactgctcattttcttggcccagtacctatgcaacgaataccagaaggggaacgagacaattgtcaacctgatccacagtacccgcattcacatcatgccttccctgaacccagatggctttgagaaggcagcgtctcagcctggtgaactcaaggactggtttgtgggtcgaagcaatgcccagggaatagatctgaaccggaactttccagacctggataggatagtgtacgtgaatgagaaagaaggtggtccaaataatcatctgttgaaaaatatgaagaaaattgtggatcaaaacacaaagttccttttgtgctttctgccaatctccatggaggagaccttgtggccaattatccatatgatgagacgcggagtggtagtgctcacgaatacagctcctccccagatgacgccattttccaaagcttggcccgggcatactcttctttcaacccggccatgtctgaccccaatcggccaccatgtcgcaagaatgatgatgacagcagctttgtagatggaaccaccaacggtggtgcttggtacagcgtacctggagggatgcaagacttcaattaccttagcagcaactgttttgagatcaccgtggagcttagctgtgagaagttcccacctgaagagactctgaagacctactgggaggataacaaaaactccctcattagctaccttgagcagatacaccgaggagttaaaggatttgtccgagaccttcaaggtaacccaattgcgaatgccaccatctccgtggaaggaatagaccacgatgttacatccgcaaaggatggtgattactggagattgcttatacctggaaactataaacttacagcctcagctccaggctatctggcaataacaaagaaagtggcagttccttacagccctgctgctggggttgattttgaactggagtcattttctgaaaggaaagaagaggagaaggaagaattgatggaatggtggaaaatgatgtcagaaactttaaatttttaaaaaggcttctagttagctgctttaaatctatctatataatgtagtatgatgtaatgtggtcttttttttagattttgtgcagttaatacttaacattgatttattttttaatcatttaaatattaatcaactttccttaaaataaatagcctcttaggtaaaaatataagaacttgatatatttcattctcttatatagtattcattttcctacctatattacacaaaaaagtatagaaaagatttaagtaattttgccatcctaggcttaaatgcaatattcctggtattatttacaatgcagaattttttgagtaattctagctttcaaaaattagtgaagttcttttactgtaattggtgacaatgtcacataatgaatgctattgaaaaggttaacagatacagctcggagttgtgagcactctactgcaagacttaaatagttcagtataaattgtcgtttttttcttgtgctgactaactataagcatgatcttgttaatgcatttttgatgggaagaaaaggtacatgtttacaaagaggttttatgaaaagaataaaaattgacttcttgcttgtacatataggagcaatactattatattatgtagtccgttaacactacttaaaagtttagggttttctcttggttgtagagtggcccagaattgcattctgaatgaataaaggttaaa

SEQ ID NO: 320558 - DNA, 2451 bp, Homo sapiens
agcgggtcatttcacctgcgtcgtcccggacgccatttggctgttgacgtggttccgagccagcaaataacgccagcagccctcccagatccacgccggcccgtctctccgccggccccctcctcgcagtggtttctcctgcagctcccctgggctccgcggccagtagtgcagcccgtggagccgcggctttgcccgtctcctctgggtggccccagtgcgcgggctgacactcattcagccggggaaggtgaggcgagtagaggctggtgcggaacttgccgcccccagcagcgccggcgggctaagcccagggccgggcaggccgggcgagggggcagcgcgctgctggctctgtgcggggcactggctgcctgcgggtggctcctgggcgccgaagcccaggagcccggggcgcccgcggcgggcatgaggcggcgccggcggctgcagcaagaggacggcatctccttcgagtaccaccgctaccccgagctgcgcgaggcgctcgtgtccgtgtggctgcagtgcaccgccatcagcaggatttacacggtggggcgcagcttcgagggccgggagctcctggtcatcgagctgtccgacaaccctggcgtccatgagcctggtgagcctgaatttaaatacattgggaatatgcatgggaatgaggctgttggacgagaactgctcattttcttggcccagtacctatgcaacgaataccagaaggggaacgagacaattgtcaacctgatccacagtacccgcattcacatcatgccttccctgaacccagatggctttgagaaggcagcgtctcagcctggtgaactcaaggactggtttgtgggtcgaagcaatgcccagggaatagatctgaaccggaactttccagacctggataggatagtgtacgtgaatgagaaagaaggtggtccaaataatcatctgttgaaaaatatgaagaaaattgtggatcaaaacacaaagcttgctcctgagaccaaggctgtcattcattggattatggatattccttttgtgctttctgccaatctccatggaggagaccttgtggccaattatccatatgatgagacgcggagtggtagtgctcacgaatacagctcctccccagatgacgccattttccaaagcttggcccgggcatactcttctttcaacccggccatgtctgaccccaatcggccaccatgtcgcaagaatgatgatgacagcagctttgtagatggaaccaccaacggtggtgcttggtacagcgtacctggagggatgcaagacttcaattaccttagcagcaactgttttgagatcaccgtggagcttagctgtgagaagttcccacctgaagagactctgaagacctactgggaggataacaaaaactccctcattagctaccttgagcagatacaccgaggagttaaaggatttgtccgagaccttcaaggtaacccaattgcgaatgccaccatctccgtggaaggaatagaccacgatgttacatccgcaaaggatggtgattactggagattgcttatacctggaaactataaacttacagcctcagctccaggctatctggcaataacaaagaaagtggcagttccttacagccctgctgctggggttgattttgaactggagtcattttctgaaaggaaagaagaggagaaggaagaattgatggaatggtggaaaatgatgtcagaaactttaaatttttaaaaaggcttctagttagctgctttaaatctatctatataatgtagtatgatgtaatgtggtcttttttttagattttgtgcagttaatacttaacattgatttattttttaatcatttaaatattaatcaactttccttaaaataaatagcctcttaggtaaaaatataagaacttgatatatttcattctcttatatagtattcattttcctacctatattacacaaaaaagtatagaaaagatttaagtaattttgccatcctaggcttaaatgcaatattcctggtattatttacaatgcagaattttttgagtaattctagctttcaaaaattagtgaagttcttttactgtaattggtgacaatgtcacataatgaatgctattgaaaaggttaacagatacagctcggagttgtgagcactctactgcaagacttaaatagttcagtataaattgtcgtttttttcttgtgctgactaactataagcatgatcttgttaatgcatttttgatgggaagaaaaggtacatgtttacaaagaggttttatgaaaagaataaaaattgacttcttgcttgtacatataggagcaatactattatattatgtagtccgttaacactacttaaaagtttagggttttctcttggttgtagagtggcccagaattgcattctgaatgaataaaggttaaa

SEQ ID NO: 320559 - DNA, 2587 bp, Homo sapiens
agcgggtcatttcacctgcgtcgtcccggacgccatttggctgttgacgtggttccgagccagcaaataacgccagcagccctcccagatccacgccggcccgtctctccgccggccccctcctcgcagtggtttctcctgcagctcccctgggctccgcggccagtagtgcagcccgtggagccgcggctttgcccgtctcctctgggtggccccagtgcgcgggctgacactcattcagccggggaaggtgaggcgagtagaggctggtgcggaacttgccgcccccagcagcgccggcgggctaagcccagggccgggcagacaaaagaggccgcccgcgtaggaaggcacggccggcggcggcggagcgcagcgatggccgggcgagggggcagcgcgctgctggctctgtgcggggcactggctgcctgcgggtggctcctgggcgccgaagcccaggagcccggggcgcccgcggcgggcatgaggcggcgccggcggctgcagcaagaggacggcatctccttcgagtaccaccgctaccccgagctgcgcgaggcgctcgtgtccgtgtggctgcagtgcaccgccatcagcaggatttacacggtggggcgcagcttcgagggccgggagctcctggtcatcgagctgtccgacaaccctggcgtccatgagcctggtgagcctgaatttaaatacattgggaatatgcatgggaatgaggctgttggacgagaactgctcattttcttggcccagtacctatgcaacgaataccagaaggggaacgagacaattgtcaacctgatccacagtacccgcattcacatcatgccttccctgaacccagatggctttgagaaggcagcgtctcagcctggtgaactcaaggactggtttgtgggtcgaagcaatgcccagggaatagatctgaaccggaactttccagacctggataggatagtgtacgtgaatgagaaagaaggtggtccaaataatcatctgttgaaaaatatgaagaaaattgtggatcaaaacacaaagcttgctcctgagaccaaggctgtcattcattggattatggatattccttttgtgctttctgccaatctccatggaggagaccttgtggccaattatccatatgatgagacgcggagtggtagtgctcacgaatacagctcctccccagatgacgccattttccaaagcttggcccgggcatactcttctttcaacccggccatgtctgaccccaatcggccaccatgtcgcaagaatgatgatgacagcagctttgtagatggaaccaccaacggtggtgcttggtacagcgtacctggagggatgcaagacttcaattaccttagcagcaactgttttgagatcaccgtggagcttagctgtgagaagttcccacctgaagagactctgaagacctactgggaggataacaaaaactccctcattagctaccttgagcagatacaccgaggagttaaaggatttgtccgagaccttcaaggtaacccaattgcgaatgccaccatctccgtggaaggaatagaccacgatgttacatccgcaaaggatggtgattactggagattgcttatacctggaaactataaacttacagcctcagctccaggctatctggcaataacaaagaaagtggcagttccttacagccctgctgctggggttgattttgaactggagtcattttctgaaaggaaagaagaggagaaggaagaattgatggaatggtggaaaatgatgtcagaaactttaaatttttaaaaaggcttctagttagctgctttaaatctatctatataatgtagtatgatgtaatgtggtcttttttttagattttgtgcagttaatacttaacattgatttattttttaatcatttaaatattaatcaactttccttaaaataaatagcctcttaggtaaaaatataagaacttgatatatttcattctcttatatagtattcattttcctacctatattacacaaaaaagtatagaaaagatttaagtaattttgccatcctaggcttaaatgcaatattcctggtattatttacaatgcagaattttttgagtaattctagctttcaaaaattagtgaagttcttttactgtaattggtgacaatgtcacataatgaatgctattgaaaaggttaacagatacagctcggagttgtgagcactctactgcaagacttaaatagttcagtataaattgtcgtttttttcttgtgctgactaactataagcatgatcttgttaatgcatttttgatgggaagaaaaggtacatgtttacaaagaggttttatgaaaagaataaaaattgacttcttgcttgtacatataggagcaatactattatattatgtagtccgttaacactacttaaaagtttagggttttctcttggttgtagagtggcccagaattgcattctgaatgaataaaggttaaatagttcagtataaattgtcgtttttttcttgtgctgactaactataagcatgatcttgttaatgcttatagttagtcag

SEQ ID NO: 320560 - DNA, 1777 bp, Homo sapiens
gatctttatcagcgatagaaatatctgccgagcagagacccggaaaactttcctaagagaaaactttgaacacattcaacacatcgtcattgacgaagctcagaatttccgtactgaagatggggactggtatgagaaggcagcgtctcagcctggtgaactcaaggactggtttgtgggtcgaagcaatgcccagggaatagatctgaaccggaactttccagacctggataggatagtgtacgtgaatgagaaagaaggtggtccaaataatcatctgttgaaaaatatgaagaaaattgtggatcaaaacacaaagcttgctcctgagaccaaggctgtcattcattggattatggatattccttttgtgctttctgccaatctccatggaggagaccttgtggccaattatccatatgatgagacgcggagtggtagtgctcacgaatacagctcctccccagatgacgccattttccaaagcttggcccgggcatactcttctttcaacccggccatgtctgaccccaatcggccaccatgtcgcaagaatgatgatgacagcagctttgtagatggaaccaccaacggtggtgcttggtacagcgtacctggagggatgcaagacttcaattaccttagcagcaactgttttgagatcaccgtggagcttagctgtgagaagttcccacctgaagagactctgaagacctactgggaggataacaaaaactccctcattagctaccttgagcagatacaccgaggagttaaaggatttgtccgagaccttcaaggtaacccaattgcgaatgccaccatctccgtggaaggaatagaccacgatgttacatccgcaaaggatggtgattactggagattgcttatacctggaaactataaacttacagcctcagctccaggctatctggcaataacaaagaaagtggcagttccttacagccctgctgctggggttgattttgaactggagtcattttctgaaaggaaagaagaggagaaggaagaattgatggaatggtggaaaatgatgtcagaaactttaaatttttaaaaaggcttctagttagctgctttaaatctatctatataatgtagtatgatgtaatgtggtcttttttttagattttgtgcagttaatacttaacattgatttattttttaatcatttaaatattaatcaactttccttaaaataaatagcctcttaggtaaaaatataagaacttgatatatttcattctcttatatagtattcattttcctacctatattacacaaaaaagtatagaaaagatttaagtaattttgccatcctaggcttaaatgcaatattcctggtattatttacaatgcagaattttttgagtaattctagctttcaaaaattagtgaagttcttttactgtaattggtgacaatgtcacataatgaatgctattgaaaaggttaacagatacagctcggagttgtgagcactctactgcaagacttaaatagttcagtataaattgtcgtttttttcttgtgctgactaactataagcatgatcttgttaatgcatttttgatgggaagaaaaggtacatgtttacaaagaggttttatgaaaagaataaaaattgacttcttgcttgtacatataggagcaatactattatattatgtagtccgttaacactacttaaaagtttagggttttctcttggttgtagagtggcccagaattgcattctgaatgaataaaggttaaa

SEQ ID NO: 320561 - DNA, 1533 bp, Homo sapiens
ccccccaccgaaagtgtttaatccaggtttgttatttgagcacctgtggcttttttaggtactgttcgcattaataaagtaaagcgcctgaggtcttctcgtcttgctgtgttatccccgccgcttcaacggcaaggtcaatgtcactggttaaaagtaagagacagctgaaccctcgtggagccattcatacgtagtgctcacgaatacagctcctccccagatgacgccattttccaaagcttggcccgggcatactcttctttcaacccggccatgtctgaccccaatcggccaccatgtcgcaagaatgatgatgacagcagctttgtagatggaaccaccaacggtggtgcttggtacagcgtacctggagggatgcaagacttcaattaccttagcagcaactgttttgagatcaccgtggagcttagctgtgagaagttcccacctgaagagactctgaagacctactgggaggataacaaaaactccctcattagctaccttgagcagatacaccgaggagttaaaggatttgtccgagaccttcaaggtaacccaattgcgaatgccaccatctccgtggaaggaatagaccacgatgttacatccgcaaaggatggtgattactggagattgcttatacctggaaactataaacttacagcctcagctccaggctatctggcaataacaaagaaagtggcagttccttacagccctgctgctggggttgattttgaactggagtcattttctgaaaggaaagaagaggagaaggaagaattgatggaatggtggaaaatgatgtcagaaactttaaatttttaaaaaggcttctagttagctgctttaaatctatctatataatgtagtatgatgtaatgtggtcttttttttagattttgtgcagttaatacttaacattgatttattttttaatcatttaaatattaatcaactttccttaaaataaatagcctcttaggtaaaaatataagaacttgatatatttcattctcttatatagtattcattttcctacctatattacacaaaaaagtatagaaaagatttaagtaattttgccatcctaggcttaaatgcaatattcctggtattatttacaatgcagaattttttgagtaattctagctttcaaaaattagtgaagttcttttactgtaattggtgacaatgtcacataatgaatgctattgaaaaggttaacagatacagctcggagttgtgagcactctactgcaagacttaaatagttcagtataaattgtcgtttttttcttgtgctgactaactataagcatgatcttgttaatgcatttttgatgggaagaaaaggtacatgtttacaaagaggttttatgaaaagaataaaaattgacttcttgcttgtacatataggagcaatactattatattatgtagtccgttaacactacttaaaagtttagggttttctcttggttgtagagtggcccagaattgcattctgaatgaataaaggttaaa

SEQ ID NO: 320562 - DNA, 1081 bp, Homo sapiens
cagctcgtaccatcagtcgctgactgggaggatacaaaaactccctcattagctacctgagcagatacaccgaggagttaaaggatttgtccgagaccttcaaggtaacccaattgcgaatgccaccatctccgtggaaggaatagaccacgatgttacatccgcaaaggatggtgattactggagattgcttatacctggaaactataaacttacagcctcagctccaggctatctggcaataacaaagaaagtggcagttccttacagccctgctgctggggttgattttgaactggagtcattttctgaaaggaaagaagaggagaaggaagaattgatggaatggtggaaaatgatgtcagaaactttaaatttttaaaaaggcttctagttagctgctttaaatctatctatataatgtagtatgatgtaatgtggtcttttttttagattttgtgcagttaatacttaacattgatttattttttaatcatttaaatattaatcaactttccttaaaataaatagcctcttaggtaaaaatataagaacttgatatatttcattctcttatatagtattcattttcctacctatattacacaaaaaagtatagaaaagatttaagtaattttgccatcctaggcttaaatgcaatattcctggtattatttacaatgcagaattttttgagtaattctagctttcaaaaattagtgaagttcttttactgtaattggtgacaatgtcacataatgaatgctattgaaaaggttaacagatacagctcggagttgtgagcactctactgcaagacttaaatagttcagtataaattgtcgtttttttcttgtgctgactaactataagcatgatcttgttaatgcatttttgatgggaagaaaaggtacatgtttacaaagaggttttatgaaaagaataaaaattgacttcttgcttgtacatataggagcaatactattatattatgtagtccgttaacactacttaaaagtttagggttttctcttggttgtagagtggcccagaattgcattctgaatgaataaaggttaaa

SEQ ID NO: 320563 - DNA, 1247 bp, Homo sapiens
  misc_feature (1174)..(1174): n is a, c, g, or t
  misc_feature (1222)..(1222): n is a, c, g, or t
  misc_feature (1229)..(1229): n is a, c, g, or t
agcgggtcatttcacctgcgtcgtcccggacgccatttggctgttgacgtggttccgagccagcaaataacgccagcagccctcccagatccacgccggcccgtctctccgccggccccctcctcgcagtggtttctcctgcagctcccctgggctccgcggccagtagtgcagcccgtggagccgcggctttgcccgtctcctctgggtggccccagtgcgcgggctgacactcattcagccggggaaggtgaggcgagtagaggctggtgcggaacttgccgcccccagcagcgccggcgggctaagcccagggccgggcagacaaaagaggccgcccgcgtaggaaggcacggccggcggcggcggagcgcagcgatggccgggcgagggggcagcgcgctgctggctctgtgcggggcactggctgcctgcgggtggctcctgggcgccgaagcccaggagcccggggcgcccgcggcgggcatgaggcggcgccggcggctgcagcaagaggacggcatctccttcgagtaccaccgctaccccgagctgcgcgaggcgctcgtgtccgtgtggctgcagtgcaccgccatcagcaggatttacacggtggggcgcagcttcgagggccgggagctcctggtcatcgagctgtccgacaaccctggcgtccatgagcctggtgagcctgaatttaaatacattgggaatatgcatgggaatgaggctgttggacgagaactgctcattttcttggcccagtacctatgcaacgaataccagaaggggaacgagacaattgtcaacctgatccacagtacccgcattcacatcatgccttccctgaacccagatggctttgagaaggcagcgtctcagcctggtgaactcaaggactggtttgtgggtcgaagcaatgcccagggaatagatctgaaccggaactttccagacctggataggatagtgtacgtgaatgagaaagaaggtggtccaaataatcatctgttgaaaaatatgaagaaaattgtggatcaaaacacaaagcttgctcctgagaccaaggctgtcattcattggattatggatattccttttgtgctttctgccaatctccatggaggagaccttgtggccaattatccatatgatgagacgcggagtgatgctnacgatacaggtcttcccagataagccattttccaaacttggccttggncggttcntttaggaaaacggtaccg

SEQ ID NO: 320564 - DNA, 647 bp, Homo sapiens
  misc_feature (5)..(5): n is a, c, g, or t
  misc_feature (76)..(76): n is a, c, g, or t
  misc_feature (81)..(82): n is a, c, g, or t
  misc_feature (84)..(84): n is a, c, g, or t
  misc_feature (87)..(87): n is a, c, g, or t
  misc_feature (89)..(89): n is a, c, g, or t
  misc_feature (92)..(92): n is a, c, g, or t
  misc_feature (94)..(94): n is a, c, g, or t
  misc_feature (96)..(97): n is a, c, g, or t
  misc_feature (99)..(99): n is a, c, g, or t
  misc_feature (102)..(102): n is a, c, g, or t
  misc_feature (104)..(104): n is a, c, g, or t
  misc_feature (107)..(107): n is a, c, g, or t
  misc_feature (109)..(109): n is a, c, g, or t
  misc_feature (112)..(112): n is a, c, g, or t
  misc_feature (114)..(114): n is a, c, g, or t
  misc_feature (116)..(117): n is a, c, g, or t
  misc_feature (123)..(123): n is a, c, g, or t
  misc_feature (129)..(129): n is a, c, g, or t
  misc_feature (139)..(139): n is a, c, g, or t
  misc_feature (183)..(183): n is a, c, g, or t
tatantactatactatactatactatactatactatactatactagtatagtatagtatagtatagtattgtattntattnncnacncnacncnanncnacncnacncnacncnanncggcgncggcgncggcggcgcnagtggtatccttctgcctccctctcttccgccgcgcgcccgtcncgccccgatttaagtaattttgccatcctaggcttaaatgcaatattcctggtattatttacaatgcagaattttttgagtaattctagctttcaaaaattagtgaagttcttttactgtaattggtgacaatgtcacataatgaatgctattgaaaaggttaacagatacagctcggagttgtgagcactctactgcaagacttaaatagttcagtataaattgtcgtttttttcttgtgctgactaactataagcatgatcttgttaatgcatttttgatgggaagaaaaggtacatgtttacaaagaggttttatgaaaagaataaaaattgacttcttgcttgtacatataggagcaatactattatattatgtagtccgttaacactacttaaaagtttagggttttctcttggttgtagagtggcccagaattgcattctgaatgaataaaggttaaa

SEQ ID NO: 320565 - DNA, 1132 bp, Homo sapiens
agcgggtcatttcacctgcgtcgtcccggacgccatttggctgttgacgtggttccgagccagcaaataacgccagcagccctcccagatccacgccggcccgtctctccgccggccccctcctcgcagtggtttctcctgcagctcccctgggctccgcggccagtagtgcagcccgtggagccgcggctttgcccgtctcctctgggtggccccagtgcgcgggctgacactcattcagccggggaaggtgaggcgagtagaggctggtgcggaacttgccgcccccagcagcgccggcgggctaagcccagggccgggcagacaaaagaggccgcccgcgtaggaaggcacggccggcggcggcggagcgcagcgatggccgggcgagggggcagcgcgctgctggctctgtgcggggcactggctgcctgcgggtggctcctgggcgccgaagcccaggagcccggggcgcccgcggcgggcatgaggcggcgccggcggctgcagcaagaggacggcatctccttcgagtaccaccgctaccccgagctgcgcgaggcgctcgtgtccgtgtggctgcagtgcaccgccatcagcaggatttacacggtggggcgcagcttcgagggccgggagctcctggtcatcgagctgtccgacaaccctggcgtccatgagcctggtgagcctgaatttaaatacattgggaatatgcatgggaatgaggctgttggacgagaactgctcattttcttggcccagtacctatgcaacgaataccagaaggggaacgagacaattgtcaacctgatccacagtacccgcattcacatcatgccttcctgtgaccccatgggcttggaaagcggcgttttcgcctgttgacctcgggaggtttggggtctaccatgcccgggattattctaccggagtttcaccgcaatgatcttcgtcgtcagggggcccacccttgcgcctaaggggctacgagcagtacgcgagggcctgcaggtttcttgtgcatcactcgcgcgcgtacctacaggaggggctccccccctgcttattgccccacgtttttcttaactttttttgtctgcgcggcctcgtgcaccgcgccccgccccct

SEQ ID NO: 320566 - DNA, 2508 bp, Homo sapiens
agcgggtcatttcacctgcgtcgtcccggacgccatttggctgttgacgtggttccgagccagcaaataacgccagcagccctcccagatccacgccggcccgtctctccgccggccccctcctcgcagtggtttctcctgcagctcccctgggctccgcggccagtagtgcagcccgtggagccgcggctttgcccgtctcctctgggtggccccagtgcgcgggctgacactcattcagccggggaaggtgaggcgagtagaggctggtgcggaacttgccgcccccagcagcgccggcgggctaagcccagggccgggcagacaaaagaggccgcccgcgtaggaaggcacggccggcggcggcggagcgcagcgatggccgggcgagggggcagcgcgctgctggctctgtgcggggcactggctgcctgcgggtggctcctgggcgccgaagcccaggagcccggggcgcccgcggcgggcatgaggcggcgccggcggctgcagcaagaggacggcatctccttcgagtaccaccgctaccccgagctgcgcgaggcgctcgtgtccgtgtggctgcagtgcaccgccatcagcaggatttacacggtggggcgcagcttcgagggccgggagctcctggtcatcgagctgtccgacaaccctggcgtccatgagcctggtgagcctgaatttaaatacattgggaatatgcatgggaatgaggctgttggacgagaactgctcattttcttggcccagtacctatgcaacgaataccagaaggggaacgagacaattgtcaacctgatccacagtacccgcattcacatcatgccttccctgaacccagatggctttgagaaggcagcgtctcagcctggtgaactcaaggactggtttgtgggtcgaagcaatgcccagggaatagatctgaaccggaactttccagacctggataggatagtgtacgtgaatgagaaagaaggtggtccaaataatcatctgttgaaaaatatgaagaaaattgtggatcaaaacacaaagcttgctcctgagaccaaggctgtcattcattggattatggatattccttttgtgctttctgccaatctccatggaggagaccttgtggccaattatccatatgatgagacgcggagtggtagtgctcacgaatacagctcctccccagatgacgccattttccaaagcttggcccgggcatactcttctttcaacccggccatgtctgaccccaatcggccaccatgtcgcaagaatgatgatgacagcagctttgtagatggaaccaccaacggtggtgcttggtacagcgtacctggagggatgcaagacttcaattaccttagcagcaactgttttgagatcaccgtggagcttagctgtgagaagttcccacctgaagagactctgaagacctactgggaggataacaaaaactccctcattagctaccttgagcagatacaccgaggagttaaaggatttgtccgagaccttcaaggtaacccaattgcgaatgccaccatctccgtggaaggaatagaccacgatgttacatccgcaaaggatggtgattactggagattgcttatacctggaaactataaacttacagcctcagctccaggctatctggcaataacaaagaaagtggcagttccttacagccctgctgctggggttgattttgaactggagtcattttctgaaaggaaagaagaggagaaggaagaattgatggaatggtggaaaatgatgtcagaaactttaaatttttaaaaaggcttctagttagctgctttaaatctatctatataatgtagtatgatgtaatgtggtcttttttttagattttgtgcagttaatacttaacattgatttattttttaatcatttaaatattaatcaactttccttaaaataaatagcctcttaggtaaaaatataagaacttgatatatttcattctcttatatagtattcattttcctacctatattacacaaaaaagtatagaaaagatttaagtaattttgccatcctaggcttaaatgcaatattcctggtattatttacaatgcagaattttttgagtaattctagctttcaaaaattagtgaagttcttttactgtaattggtgacaatgtcacataatgaatgctattgaaaaggttaacagatacagctcggagttgtgagcactctactgcaagacttaaatagttcagtataaattgtcgtttttttcttgtgctgactaactataagcatgatcttgttaatgcatttttgatgggaagaaaaggtacatgtttacaaagaggttttatgaaaagaataaaaattgacttcttgcttgtacatataggagcaatactattatattatgtagtccgttaacactacttaaaagtttagggttttctcttggttgtagagtggcccagaattgcattctgaatgaataaaggttaaa

SEQ ID NO: 320567 - DNA, 2445 bp, Homo sapiens
agcgggtcatttcacctgcgtcgtcccggacgccatttggctgttgacgtggttccgagccagcaaataacgccagcagccctcccagatccacgccggcccgtctctccgccggccccctcctcgcagtggtttctcctgcagctcccctgggctccgcggccagtagtgcagcccgtggagccgcggctttgcccgtctcctctgggtggccccagtgcgcgggctgacactcattcagccggggaaggtgaggcgagtagaggctggtgcggaacttgccgcccccagcagcgccggcgggctaagcccagggccgggcagacaaaagaggccgcccgcgtaggaaggcacggccggcggcggcggagcgcagcgatggccgggcgagggggcagcgcgctgctggctctgtgcggggcactggctgcctgcgggtggctcctgggcgccgaagcccaggagcccggggcgcccgcggcgggcatgaggcggcgccggcggctgcagcaagaggacggcatctccttcgagtaccaccgctaccccgagctgcgcgaggcgctcgtgtccgtgtggctgcagtgcaccgccatcagcaggatttacacggtggggcgcagcttcgagggccgggagctcctggtcatcgagctgtccgacaaccctggcgtccatgagcctggtgagcctgaatttaaatacattgggaatatgcatgggaatgaggctgttggacgagaactgctcattttcttggcccagtacctatgcaacgaataccagaaggggaacgagacaattgtcaacctgatccacagtacccgcattcacatcatgccttccctgaacccagatggctttgagaaggcagcgtctcagcctggtgaactcaaggactggtttgtgggtcgaagcaatgcccagggaatagatctgaaccggaactttccagacctggataggatagtgtacgtgaatgagaaagaaggtggtccaaataatcatctgttgaaaaatatgaagaaaattgtggatcaaaacacaaagcttgctcctgagaccaaggctgtcattcattggattatggatattccttttgtgctttctgccaatctccatggaggagaccttgtggccaattatccatatgatgagacgcggagtggtagtgctcacgaatacagctcctccccagatgacgccattttccaaagcttggcccgggcatactcttctttcaacccggccatgtctgaccccaatcggccaccatgtcgcaagaatgatgatgacagcagctttgtagatggaaccaccaacggtggtgcttggtacagcgtacctggagggatgcaagacttcaattaccttagcagcaactgttttgagatcaccgtggagcttagctgtgagaagttcccacctgaagagactctgaagacctactgggtccgagaccttcaaggtaacccaattgcgaatgccaccatctccgtggaaggaatagaccacgatgttacatccgcaaaggatggtgattactggagattgcttatacctggaaactataaacttacagcctcagctccaggctatctggcaataacaaagaaagtggcagttccttacagccctgctgctggggttgattttgaactggagtcattttctgaaaggaaagaagaggagaaggaagaattgatggaatggtggaaaatgatgtcagaaactttaaatttttaaaaaggcttctagttagctgctttaaatctatctatataatgtagtatgatgtaatgtggtcttttttttagattttgtgcagttaatacttaacattgatttattttttaatcatttaaatattaatcaactttccttaaaataaatagcctcttaggtaaaaatataagaacttgatatatttcattctcttatatagtattcattttcctacctatattacacaaaaaagtatagaaaagatttaagtaattttgccatcctaggcttaaatgcaatattcctggtattatttacaatgcagaattttttgagtaattctagctttcaaaaattagtgaagttcttttactgtaattggtgacaatgtcacataatgaatgctattgaaaaggttaacagatacagctcggagttgtgagcactctactgcaagacttaaatagttcagtataaattgtcgtttttttcttgtgctgactaactataagcatgatcttgttaatgcatttttgatgggaagaaaaggtacatgtttacaaagaggttttatgaaaagaataaaaattgacttcttgcttgtacatataggagcaatactattatattatgtagtccgttaacactacttaaaagtttagggttttctcttggttgtagagtggcccagaattgcattctgaatgaataaaggttaaa

SEQ ID NO: 320568 - DNA, 2411 bp, Homo sapiens
agcgggtcatttcacctgcgtcgtcccggacgccatttggctgttgacgtggttccgagccagcaaataacgccagcagccctcccagatccacgccggcccgtctctccgccggccccctcctcgcagtggtttctcctgcagctcccctgggctccgcggccagtagtgcagcccgtggagccgcggctttgcccgtctcctctgggtggccccagtgcgcgggctgacactcattcagccggggaaggtgaggcgagtagaggctggtgcggaacttgccgcccccagcagcgccggcgggctaagcccagggccgggcagcactggctgcctgcgggtggctcctgggcgccgaagcccaggagcccggggcgcccgcggcgggcatgaggcggcgccggcggctgcagcaagaggacggcatctccttcgagtaccaccgctaccccgagctgcgcgaggcgctcgtgtccgtgtggctgcagtgcaccgccatcagcaggatttacacggtggggcgcagcttcgagggccgggagctcctggtcatcgagctgtccgacaaccctggcgtccatgagcctggtgagcctgaatttaaatacattgggaatatgcatgggaatgaggctgttggacgagaactgctcattttcttggcccagtacctatgcaacgaataccagaaggggaacgagacaattgtcaacctgatccacagtacccgcattcacatcatgccttccctgaacccagatggctttgagaaggcagcgtctcagcctggtgaactcaaggactggtttgtgggtcgaagcaatgcccagggaatagatctgaaccggaactttccagacctggataggatagtgtacgtgaatgagaaagaaggtggtccaaataatcatctgttgaaaaatatgaagaaaattgtggatcaaaacacaaagcttgctcctgagaccaaggctgtcattcattggattatggatattccttttgtgctttctgccaatctccatggaggagaccttgtggccaattatccatatgatgagacgcggagtggtagtgctcacgaatacagctcctccccagatgacgccattttccaaagcttggcccgggcatactcttctttcaacccggccatgtctgaccccaatcggccaccatgtcgcaagaatgatgatgacagcagctttgtagatggaaccaccaacggtggtgcttggtacagcgtacctggagggatgcaagacttcaattaccttagcagcaactgttttgagatcaccgtggagcttagctgtgagaagttcccacctgaagagactctgaagacctactgggaggataacaaaaactccctcattagctaccttgagcagatacaccgaggagttaaaggatttgtccgagaccttcaaggtaacccaattgcgaatgccaccatctccgtggaaggaatagaccacgatgttacatccgcaaaggatggtgattactggagattgcttatacctggaaactataaacttacagcctcagctccaggctatctggcaataacaaagaaagtggcagttccttacagccctgctgctggggttgattttgaactggagtcattttctgaaaggaaagaagaggagaaggaagaattgatggaatggtggaaaatgatgtcagaaactttaaatttttaaaaaggcttctagttagctgctttaaatctatctatataatgtagtatgatgtaatgtggtcttttttttagattttgtgcagttaatacttaacattgatttattttttaatcatttaaatattaatcaactttccttaaaataaatagcctcttaggtaaaaatataagaacttgatatatttcattctcttatatagtattcattttcctacctatattacacaaaaaagtatagaaaagatttaagtaattttgccatcctaggcttaaatgcaatattcctggtattatttacaatgcagaattttttgagtaattctagctttcaaaaattagtgaagttcttttactgtaattggtgacaatgtcacataatgaatgctattgaaaaggttaacagatacagctcggagttgtgagcactctactgcaagacttaaatagttcagtataaattgtcgtttttttcttgtgctgactaactataagcatgatcttgttaatgcatttttgatgggaagaaaaggtacatgtttacaaagaggttttatgaaaagaataaaaattgacttcttgcttgtacatataggagcaatactattatattatgtagtccgttaacactacttaaaagtttagggttttctcttggttgtagagtggcccagaattgcattctgaatgaataaaggttaaa

SEQ ID NO: 320569 - DNA, 1725 bp, Homo sapiens
tgtgattctagacgatcctctcctatctgaatccagatcctcctatctgattcagcctcctatctgaatccagatggctttgagaaggcagcgtctcagcctggtgaactcaaggactggtttgtgggtcgaagcaatgcccagggaatagatctgaaccggaactttccagacctggataggatagtgtacgtgaatgagaaagaaggtggtccaaataatcatctgttgaaaaatatgaagaaaattgtggatcaaaacacaaagcttgctcctgagaccaaggctgtcattcattggattatggatattccttttgtgctttctgccaatctccatggaggagaccttgtggccaattatccatatgatgagacgcggagtggtagtgctcacgaatacagctcctccccagatgacgccattttccaaagcttggcccgggcatactcttctttcaacccggccatgtctgaccccaatcggccaccatgtcgcaagaatgatgatgacagcagctttgtagatggaaccaccaacggtggtgcttggtacagcgtacctggagggatgcaagacttcaattaccttagcagcaactgttttgagatcaccgtggagcttagctgtgagaagttcccacctgaagagactctgaagacctactgggaggataacaaaaactccctcattagctaccttgagcagatacaccgaggagttaaaggatttgtccgagaccttcaaggtaacccaattgcgaatgccaccatctccgtggaaggaatagaccacgatgttacatccgcaaaggatggtgattactggagattgcttatacctggaaactataaacttacagcctcagctccaggctatctggcaataacaaagaaagtggcagttccttacagccctgctgctggggttgattttgaactggagtcattttctgaaaggaaagaagaggagaaggaagaattgatggaatggtggaaaatgatgtcagaaactttaaatttttaaaaaggcttctagttagctgctttaaatctatctatataatgtagtatgatgtaatgtggtcttttttttagattttgtgcagttaatacttaacattgatttattttttaatcatttaaatattaatcaactttccttaaaataaatagcctcttaggtaaaaatataagaacttgatatatttcattctcttatatagtattcattttcctacctatattacacaaaaaagtatagaaaagatttaagtaattttgccatcctaggcttaaatgcaatattcctggtattatttacaatgcagaattttttgagtaattctagctttcaaaaattagtgaagttcttttactgtaattggtgacaatgtcacataatgaatgctattgaaaaggttaacagatacagctcggagttgtgagcactctactgcaagacttaaatagttcagtataaattgtcgtttttttcttgtgctgactaactataagcatgatcttgttaatgcatttttgatgggaagaaaaggtacatgtttacaaagaggttttatgaaaagaataaaaattgacttcttgcttgtacatataggagcaatactattatattatgtagtccgttaacactacttaaaagtttagggttttctcttggttgtagagtggcccagaattgcattctgaatgaataaaggttaaa

SEQ ID NO: 320570 - DNA, 2065 bp, Homo sapiens
  misc_feature (71)..(71): n is a, c, g, or t
ggggggagggggacgagtgaggcaggggggagggggaggagagaggggggcgagggggcgacgcggagggnacgacgcgggatgggggagggcggcgccggcggctgcagcaagaggacggcatctccttcgagtaccaccgctaccccgagctgcgcgaggcgctcgtgtccgtgtggctgcagtgcaccgccatcagcaggatttacacggtggggcgcagcttcgagggccgggagctcctggtcatcgagctgtccgacaaccctggcgtccatgagcctggtgagcctgaatttaaatacattgggaatatgcatgggaatgaggctgttggacgagaactgctcattttcttggcccagtacctatgcaacgaataccagaaggggaacgagacaattgtcaacctgatccacagtacccgcattcacatcatgccttccctgaacccagatggctttgagaaggcagcgtctcagcctggtgaactcaaggactggtttgtgggtcgaagcaatgcccagggaatagatctgaaccggaactttccagacctggataggatagtgtacgtgaatgagaaagaaggtggtccaaataatcatctgttgaaaaatatgaagaaaattgtggatcaaaacacaaagttccttttgtgctttctgccaatctccatggaggagaccttgtggccaattatccatatgatgagacgcggagtggtagtgctcacgaatacagctcctccccagatgacgccattttccaaagcttggcccgggcatactcttctttcaacccggccatgtctgaccccaatcggccaccatgtcgcaagaatgatgatgacagcagctttgtagatggaaccaccaacggtggtgcttggtacagcgtacctggagggatgcaagacttcaattaccttagcagcaactgttttgagatcaccgtggagcttagctgtgagaagttcccacctgaagagactctgaagacctactgggaggataacaaaaactccctcattagctaccttgagcagatacaccgaggagttaaaggatttgtccgagaccttcaaggtaacccaattgcgaatgccaccatctccgtggaaggaatagaccacgatgttacatccgcaaaggatggtgattactggagattgcttatacctggaaactataaacttacagcctcagctccaggctatctggcaataacaaagaaagtggcagttccttacagccctgctgctggggttgattttgaactggagtcattttctgaaaggaaagaagaggagaaggaagaattgatggaatggtggaaaatgatgtcagaaactttaaatttttaaaaaggcttctagttagctgctttaaatctatctatataatgtagtatgatgtaatgtggtcttttttttagattttgtgcagttaatacttaacattgatttattttttaatcatttaaatattaatcaactttccttaaaataaatagcctcttaggtaaaaatataagaacttgatatatttcattctcttatatagtattcattttcctacctatattacacaaaaaagtatagaaaagatttaagtaattttgccatcctaggcttaaatgcaatattcctggtattatttacaatgcagaattttttgagtaattctagctttcaaaaattagtgaagttcttttactgtaattggtgacaatgtcacataatgaatgctattgaaaaggttaacagatacagctcggagttgtgagcactctactgcaagacttaaatagttcagtataaattgtcgtttttttcttgtgctgactaactataagcatgatcttgttaatgcatttttgatgggaagaaaaggtacatgtttacaaagaggttttatgaaaagaataaaaattgacttcttgcttgtacatataggagcaatactattatattatgtagtccgttaacactacttaaaagtttagggttttctcttggttgtagagtggcccagaattgcattctgaatgaataaaggttaaa

SEQ ID NO: 320571 - DNA, 878 bp, Homo sapiens
agcgggtcatttcacctgcgtcgtcccggacgccatttggctgttgacgtggttccgagccagcaaataacgccagcagccctcccagatccacgccggcccgtctctccgccggccccctcctcgcagtggtttctcctgcagctcccctgggctccgcggccagtagtgcagcccgtggagccgcggctttgcccgtctcctctgggtggccccagtgcgcgggctgacactcattcagccggggaaggtgaggcgagtagaggctggtgcggaacttgccgcccccagcagcgccggcgggctaagcccagggccgggcagacaaaagaggccgcccgcgtaggaaggcacggccggcggcggcggagcgcagcgatggccgggcgagggggcagcgcgctgctggctctgtgcggggcactggctgcctgcgggtggctcctgggcgccgaagcccaggagcccggggcgcccgcggcgggcatgaggcggcgccggcggctgcagcaagaggacggcatctccttcgagtaccaccgctaccccgagctgcgcgaggcgctcgtgtccgtgtggctgcagtgcaccgccatcagcaggatttacacggtggggcgcagcttcgagggccgggagctcctggtcatcgagctgtccgacaaccctggcgtccatgagcctgattgcaagctgtatgaagtggggaccctgattccagcacccagctcatgtttggcacacagcgggcttgaatatacattatgaaataatctacattatggaaaaatactgaatatgcagtgtggaaaaaatgaatccatcaatagctgcataacacagtgtattaaaataaaatgttttattcttcatacatt

SEQ ID NO: 320572 - DNA, 1449 bp, Homo sapiens
  misc_feature (2)..(2): n is a, c, g, or t
  misc_feature (4)..(4): n is a, c, g, or t
  misc_feature (6)..(8): n is a, c, g, or t
gncncnnngcggaagcgccggcggagcgtcctcgcatggagcgcgagcccagcgcctcggaggccgcccccgcggcggccgcgctcttcgcctggggtgcaaatagctatgggcaacttggcctcggccataaggaagatgtgctgttgccccagcaactgaatgacttctgtaaacccaggagtgtcaggaggatcacaggaggagggggccactctgcagttgtcacagatggaggagacctctttgtttgtggcctgaacaaagatgggcaactggggcttggtcacacagaggatatcccatattttaccccctgcaaatccctctttggctgtcccatccaacaggtggcctgtggctgggattttacgattatgctcacagaaaatggtcaagttctatcatgtggatccaactcctttggccagttaggagttcctcatggacctcgaagatgtgtggttccccaggccattgagctccataaagagaaggttgtttgtattgctgctggactgaggcatgcagtagctgctacagcgagtggcatcgtgttccagtgggggactggtttggcatcatgtggacgacggttgtgccctgggcagactcttccattgtttttcacagcaaaggaaccaagcagagtgacaggtctagagaattctaaagcaatgtgtgttcttgctggctcagaccactcagcttcattaacagatgcaggagaggtgtatgtttggggaagcaacaagcatgggcaactggctaatgaggctgctttccttcctgtgccccagaaaatagaagcacattgtttccagaatgaaaaggtcactgccatctggagtggatggacacacctggttgctcagacagaaactggcaagatgtttacctggggccgagcagactatggtcagctagggaggaagttggagacttatgaaggctggaaactagaaaagcaagattcatttctcccctgttcaagaccaccgaacagcatgccttcatctccgcattgcttaactggagcaactgaggtctcttgtggctcagagcataatttggcaataattggtggagtgtgttactcttggggctggaatgagcatggcatgtgcggagatggcactgaagccaacgtctgggccccaaagccggtgcaggctctgctgtcatcgtcaggactccttgtgggctgtggggctggccactccttggccctctgccagctgccagctcaccctgcattggtccaggaccccaaggtcacctacctttccccagatgccatcgaggacactgaatctcagaaagccatggacaaagagagaaactggaaggaaagacaatcagaaacttcaacccaaagccaatctgactggtccagaaatgggggactgtgatagagaatctttaataaagtggcttttcccaccaaaa

SEQ ID NO: 320573 - DNA, 1534 bp, Homo sapiens
  misc_feature (2)..(2): n is a, c, g, or t
  misc_feature (4)..(4): n is a, c, g, or t
  misc_feature (6)..(8): n is a, c, g, or t
gncncnnngcggaagcgccggcggagcgtcctcgcatggagcgcgagcccagcgcctcggaggccgcccccgcggcggccgcgctcttcgcctggggtgcaaatagctatgggcaacttggcctcggccataaggaagatgtgctgttgccccagcaactgaatgacttctgtaaacccaggagtgtcaggaggatcacaggaggagggggccactctgcagttgtcacagatggaggagacctctttgtttgtggcctgaacaaagatgggcaactggggcttggtcacacagaggatatcccatattttaccccctgcaaatccctctttggctgtcccatccaacaggtggcctgtggctgggattttacgattatgctcacagaaaatggtcaagttctatcatgtggatccaactcctttggccagttaggagttcctcatggacctcgaagatgtgtggttccccaggccattgagctccataaagagaaggttgtttgtattgctgctggactgaggcatgcagtagctgctacagcgagtggcatcgtgttccagtgggggactggtttggcatcatgtggacgacggttgtgccctgggcagactcttccattgtttttcacagcaaaggaaccaagcagagtgacaggtctagagaattctaaagcaatgtgtgttcttgctggctcagaccactcagcttcattaacagatgcaggagaggtgtatgtttggggaagcaacaagcatgggcaactggctaatgaggctgctttccttcctgtgccccagaaaatagaagcacattgtttccagaatgaaaaggtcactgccatctggagtggatggacacacctggttgctcagacagaaactggcaagatgtttacctggggccgagcagactatggtcagctagggaggaagttggagacttatgaaggctggaaactagaaaagcaagattcatttctcccctgttcaagaccaccgaacagcatgccttcatctccgcattgcttaactggagcaactgagactagctttagatggcatctccttggaaagtcttccctgatgtccaggtcctaattgatcacttcattctctgaacttccagtaggtctcttgtggctcagagcataatttggcaataattggtggagtgtgttactcttggggctggaatgagcatggcatgtgcggagatggcactgaagccaacgtctgggccccaaagccggtgcaggctctgctgtcatcgtcaggactccttgtgggctgtggggctggccactccttggccctctgccagctgccagctcaccctgcattggtccaggaccccaaggtcacctacctttccccagatgccatcgaggacactgaatctcagaaagccatggacaaagagagaaactggaaggaaagacaatcagaaacttcaacccaaagccaatctgactggtccagaaatgggggactgtgatagagaatctttaataaagtggcttttcccaccaaaa

SEQ ID NO: 320574 - DNA, 441 bp, Homo sapiens
ccatcagtgtaagatgtgacttgcttctccttgtcttctgccacgattgtgaggcctccccaaccacatggaactgtggagtgtgttactcttggggctggaatgagcatggcatgtgcggagatggcactgaagccaacgtctgggccccaaagccggtgcaggctctgctgtcatcgtcaggactccttgtgggctgtggggctggccactccttggccctctgccagctgccagctcaccctgcattggtccaggaccccaaggtcacctacctttccccagatgccatcgaggacactgaatctcagaaagccatggacaaagagagaaactggaaggaaagacaatcagaaacttcaacccaaagccaatctgactggtccagaaatgggggactgtgatagagaatctttaataaagtggcttttcccaccaaaa

SEQ ID NO: 320575 - DNA, 425 bp, Homo sapiens
atttgtaaaatcgacatcatgatacccactcccagaagttgttcttcccaatggcataggtggagtgtgttactcttggggctggaatgagcatggcatgtgcggagatggcactgaagccaacgtctgggccccaaagccggtgcaggctctgctgtcatcgtcaggactccttgtgggctgtggggctggccactccttggccctctgccagctgccagctcaccctgcattggtccaggaccccaaggtcacctacctttccccagatgccatcgaggacactgaatctcagaaagccatggacaaagagagaaactggaaggaaagacaatcagaaacttcaacccaaagccaatctgactggtccagaaatgggggactgtgatagagaatctttaataaagtggcttttcccaccaaaa

SEQ ID NO: 320576 - DNA, 183 bp, Homo sapiens
gcggccgcctactactactactactgctcgaattcaagcttctaacgatgtacggggccatggacaaagagagaaactggaaggaaagacaatcagaaacttcaacccaaagccaatctgactggtccagaaatgggggactgtgatagagaatctttaataaagtggcttttcccaccaaaa

SEQ ID NO: 320577 - DNA, 4145 bp, Homo sapiens
aaggttaagtagcatgcccgaggtcatacactgataaacatgaggccaatgattagatatgtctgacttcacattccacatatttccttacactgttttgcagtgtaaataggtggttaagaagataccaaagtagatctctggttcatcttctgagaagcagaactagaattctcctggctagcagttatccatctagtgcatatgtatctagagctggccaggcctttagtttacaaaataaatagaaagccttgtccccactctggaggagcttgctgccttgttagaaggtgagatatgttcgaatagaacatttggggaaaccatttgagacctggtataatgaagtgctaagattgtgggcaaggtggggaggaggtaggccttcctgactagtttaggctacaatagttgggaagactgcaagaagccagcaggcttcagtcatgccctaaaagagcgattggtttagaaaaaaaacaaaagggaactactaacatgtattctattctaggcaggtgtcaggcaaagttgtatcttattttggtctcactagattcttgcaaagcttatctgcatatccaggttttataaaaggttaagaaactgaagctcctagaagtaaatgagcccttagttatcaaatattgtctgcattgtgcaacttcttttttagcccgtagtctttgttttcatactttagttttagagaattactccaaattcatcatgattgaagacaataaggagaacaaagaccattccttagaaaggggaagagcaagtctcattttttccttaaagaatgaagttggaggacttataaaagccctgaaaatctttcaggagaagcatgtgaatctgttacatatcgagtcccgaaaatcaaaaagaagaaactcagaatttgagatttttgttgactgtgacatcaacagagaacaattgaatgatatttttcatctgctgaagtctcataccaatgttctctctgtgaatctaccagataattttactttgaaggaagatggtatggaaactgttccttggtttccaaagaagatttctgacctggaccattgtgccaacagagttctgatgtatggatctgaactagatgcagaccatcctggcttcaaagacaatgtctaccgtaaacgtcgaaagtattttgcggacttggctatgaactataaacatggagaccccattccaaaggttgaattcactgaagaggagattaagacctggggaaccgtattccaagagctcaacaaactctacccaacccatgcttgcagagagtatctcaaaaacttacctttgctttctaaatattgtggatatcgggaggataatatcccacaattggaagatgtctccaactttttaaaagagcgtacaggtttttccatccgtcctgtggctggttacttatcaccaagagatttcttatcaggtttagcctttcgagtttttcactgcactcaatatgtgagacacagttcagatcccttctataccccagagccagatacctgccatgaactcttaggtcatgtcccgcttttggctgaacctagttttgcccaattctcccaagaaattggcttggcttctcttggcgcttcagaggaggctgttcaaaaactggcaacgtgctactttttcactgtggagtttggtctatgtaaacaagatggacagctaagagtctttggtgctggcttactttcttctatcagtgaactcaaacatgcactttctggacatgccaaagtaaagccctttgatcccaagattacctgcaaacaggaatgtcttatcacaacttttcaagatgtctactttgtatctgaaagttttgaagatgcaaaggagaagatgagagaatttaccaaaacaattaagcgtccatttggagtgaagtataatccatatacacggagtattcagatcctgaaagacaccaagagcataaccagtgccatgaatgagctgcagcatgatctcgatgttgtcagtgatgcccttgctaaggtcagcaggaagccgagtatctaacagtagccagtcatccaggaacatttgagcatcaattcggaggtctgggccatctcttgctttccttgaacacctgatcctggagggacagcatcttctggccaaacaatattatcgaattccactacttaaggaatcactagtctttgaaaatttgtacctggatattctatttaccacttatttttttgtttagttttatttctttttttttttggtagcagctttaatgagacaatttatataccatacaagccactgaccacccatttttaatagagaagttgtttgacccaatagatagatctaatctcagcctaactctattttccccaatcctccttgagtaaaatgaccctttaggatcgcttagaataacttgaggagtattatggcgctgactcatattgttacctaagatccccttatttctaaagtatctgttacttattgctgaatttgtgccaagctcaatcacattcacactaaaatttaacaggagaccctgctgtctttgttgctagcatgagcaaaagtatagaggcctttgcacatggaggatacctagtaaagagcaagtagtctagtttcaagtgtagtatcttgtagggaaatgggagtagctaagcctggaaaggttgaatggggcataatcattaagactaggctaaaaattcgagactttattttttaggcattagggagccccttcccaagtgactatcttccttgaaactttgttttctttcaatgacatcacacgatactggttttattctggactatctatcctactcatgggtccaagggaaacttagtagagatgcgacttgcatggggctgtactcagacatgtggtcctaggtattataatgggattgtccccagattaacaggaagcattgttatcaaaggaagagttcaaactgagatagataagagaagcacaaagtaaaagatagaaaaaacagtgctgagtactttatttctaaggtataaggtgaggccataaacagaaaggtatgcaatgagagtagaggctgcaaaaaaggggaggaaatagaatgtcagaaaggtcaagaagagtggtttaggactgagactgtaagtaatgtaaggattgccaaggaatggtttttatgcagagtcagctgtgtagcacagggagtaagcagtcctgttataaatgggtgaagctgaactccaaaatacaaacttatgtctctttaatttgcccctttcctccctctagtcactaaatgaagatgttcttcaagtttctgtctttgcacttctactctttttgccatctcttcatggggaatgtcacccagatacatgacttcagttcttattttgaatgactcctctatttgcagttataaccctgacatctttcttgaatttttttgccccttaattccaacgaactcctggatgtctatgtagatgtctcataatttaggccaatgctgtacaacttcatgtggcatcatccacatagaatgaataggggttgttcaatatgacagccctgccaagcatctcaaattgaacaggtctataaaggaactcagaatcacttgaatatcacagtccatcagcttcctttcccagtaatttaatttccattaatggtatattaaacatcgtattttcaatcatttttaggtttagtcagctacttaaaaataggctttttcttcacataaataaattgtataccatttaatgtgttttatttcaacagactaatagatcttttaacacttcttagtcctcaaaataaattattaaaaactttgtatttcatgtcatattatataaggaaatagaattttgaagaataattcatgctgttttaaatttttacattgtacattttaatagctaatcaactcttaagtatacatttgatggtaaatagatgctagctaatctggaatcatttgaaatattgattatctgatttatagtttggttgcaaggaaatctactgtaagcaaatcataatagatagcaaatcttagaacatgtagaaaaaaagaaattaaaaaaagcaaatcttagaacatgta

SEQ ID NO: 320578 - DNA, 1439 bp, Homo sapiens
agcgggccggtgcaggccctgaggggcgccgagatgtgggagctgctggccgcggcgtgggcagttcaggggctgggcggctgagggtgcaaatagctatgggcaacttggcctcggccataaggaagatgtgctgttgccccagcaactgaatgacttctgtaaacccaggagtgtcaggaggatcacaggaggagggggccactctgcagttgtcacagatggaggagacctctttgtttgtggcctgaacaaagatgggcaactggggcttggtcacacagaggatatcccatattttaccccctgcaaatccctctttggctgtcccatccaacaggtggcctgtggctgggattttacgattatgctcacagaaaatggtcaagttctatcatgtggatccaactcctttggccagttaggagttcctcatggacctcgaagatgtgtggttccccaggccattgagctccataaagagaaggttgtttgtattgctgctggactgaggcatgcagtagctgctacagcgagtggcatcgtgttccagtgggggactggtttggcatcatgtggacgacggttgtgccctgggcagactcttccattgtttttcacagcaaaggaaccaagcagagtgacaggtctagagaattctaaagcaatgtgtgttcttgctggctcagaccactcagcttcattaacagatgcaggagaggtgtatgtttggggaagcaacaagcatgggcaactggctaatgaggctgctttccttcctgtgccccagaaaatagaagcacattgtttccagaatgaaaaggtcactgccatctggagtggatggacacacctggttgctcagacagaaactggcaagatgtttacctggggccgagcagactatggtcagctagggaggaagttggagacttatgaaggctggaaactagaaaagcaagattcatttctcccctgttcaagaccaccgaacagcatgccttcatctccgcattgcttaactggagcaactgaggtctcttgtggctcagagcataatttggcaataattggtggagtgtgttactcttggggctggaatgagcatggcatgtgcggagatggcactgaagccaacgtctgggccccaaagccggtgcaggctctgctgtcatcgtcaggactccttgtgggctgtggggctggccactccttggccctctgccagctgccagctcaccctgcattggtccaggaccccaaggtcacctacctttccccagatgccatcgaggacactgaatctcagaaagccatggacaaagagagaaactggaaggaaagacaatcagaaacttcaacccaaagccaatctgactggtccagaaatgggggactgtgatagagaatctttaataaagtggcttttcccaccaaaa

SEQ ID NO: 320579 - DNA, 3397 bp, Homo sapiens
aaggttaagtagcatgcccgaggtcatacactgataaacatgaggccaatgattagatatgtctgacttcacattccacatatttccttacactgttttgcagtgtaaataggtggttaagaagataccaaagtagatctctggttcatcttctgagaagcagaactagaattctcctggctagcagttatccatctagtgcatatgtatctagagctggccaggcctttagtttacaaaataaatagaaagccttgtccccactctggaggagcttgctgccttgttagaaggtgagatatgttcgaatagaacatttggggaaaccatttgagacctggtataatgaagtgctaagattgtgggcaaggtggggaggaggtaggccttcctgactagtttaggctacaatagttgggaagactgcaagaagccagcaggcttcagtcatgccctaaaagagcgattggtttagaaaaaaaacaaaagggaactactaacatgtattctattctaggcaggtgtcaggcaaagttgtatcttattttggtctcactagattcttgcaaagcttatctgcatatccaggttttataaaaggttaagaaactgaagctcctagaagtaaatgagcccttagttatcaaatattgtctgcattgtgcaacttcttttttagcccgtagtctttgttttcatactttagttttagagaattactccaaattcatcatgattgaagacaataaggagaacaaagaccattccttagaaaggggaagagcaagtctcattttttccttaaagaatgaagttggaggacttataaaagccctgaaaatctttcaggagaagcatgtgaatctgttacatatcgagtcccgaaaatcaaaaagaagaaactcagaatttgagatttttgttgactgtgacatcaacagagaacaattgaatgatatttttcatctgctgaagtctcataccaatgttctctctgtgaatctaccagataattttactttgaaggaagatggtatggaaactgttccttggtttccaaagaagatttctgacctggaccattgtgccaacagagttctgatgtatggatctgaactagatgcagaccatcctggcttcaaagacaatgtctaccgtaaacgtcgaaagtattttgcggacttggctatgaactataaacatggagaccccattccaaaggttgaattcactgaagaggagattaagacctggggaaccgtattccaagagctcaacaaactctacccaacccatgcttgcagagagtatctcaaaaacttacctttgctttctaaatattgtggatatcgggaggataatatcccacaattggaagatgtctccaactttttaaaagagcgtacaggtttttccatccgtcctgtggctggttacttatcaccaagagatttcttatcaggtttagcctttcgagtttttcactgcactcaatatgtgagacacagttcagatcccttctataccccagagccagatacctgccatgaactcttaggtcatgtcccgcttttggctgaacctagttttgcccaattctcccaagaaattggcttggcttctcttggcgcttcagaggaggctgttcaaaaactggcaacgtgctactttttcactgtggagtttggtctatgtaaacaagatggacagctaagagtctttggtgctggcttactttcttctatcagtgaactcaaacatgcactttctggacatgccaaagtaaagccctttgatcccaagattacctgcaaacaggaatgtcttatcacaacttttcaagatgtctactttgtatctgaaagttttgaagatgcaaaggagaagatgagagaatttaccaaaacaattaagcgtccatttggagtgaagtataatccatatacacggagtattcagatcctgaaagacaccaagagcataaccagtgccatgaatgagctgcagcatgatctcgatgttgtcagtgatgcccttgctaagggtgcaaatagctatgggcaacttggcctcggccataaggaagatgtgctgttgccccagcaactgaatgacttctgtaaacccaggagtgtcaggaggatcacaggaggagggggccactctgcagttgtcacagatggaggagacctctttgtttgtggcctgaacaaagatgggcaactggggcttggtcacacagaggatatcccatattttaccccctgcaaatccctctttggctgtcccatccaacaggtggcctgtggctgggattttacgattatgctcacagaaaatggtcaagttctatcatgtggatccaactcctttggccagttaggagttcctcatggacctcgaagatgtgtggttccccaggccattgagctccataaagagaaggttgtttgtattgctgctggactgaggcatgcagtagctgctacagcgagtggcatcgtgttccagtgggggactggtttggcatcatgtggacgacggttgtgccctgggcagactcttccattgtttttcacagcaaaggaaccaagcagagtgacaggtctagagaattctaaagcaatgtgtgttcttgctggctcagaccactcagcttcattaacagatgcaggagaggtgtatgtttggggaagcaacaagcatgggcaactggctaatgaggctgctttccttcctgtgccccagaaaatagaagcacattgtttccagaatgaaaaggtcactgccatctggagtggatggacacacctggttgctcagacagaaactggcaagatgtttacctggggccgagcagactatggtcagctagggaggaagttggagacttatgaaggctggaaactagaaaagcaagattcatttctcccctgttcaagaccaccgaacagcatgccttcatctccgcattgcttaactggagcaactgaggtctcttgtggctcagagcataatttggcaataattggtggagtgtgttactcttggggctggaatgagcatggcatgtgcggagatggcactgaagccaacgtctgggccccaaagccggtgcaggctctgctgtcatcgtcaggactccttgtgggctgtggggctggccactccttggccctctgccagctgccagctcaccctgcattggtccaggaccccaaggtcacctacctttccccagatgccatcgaggacactgaatctcagaaagccatggacaaagagagaaactggaaggaaagacaatcagaaacttcaacccaaagccaatctgactggtccagaaatgggggactgtgatagagaatctttaataaagtggcttttcccaccaaaa

SEQ ID NO: 320580 - DNA, 1664 bp, Homo sapiens
gattcactgactctttgtcttctagcatgcactttctggacatgccaaagtaaagccctttgatcccaagattacctgcaaacaggaatgtcttatcacaacttttcaagatgtctactttgtatctgaaagttttgaagatgcaaaggagaagatgagagaatttaccaaaacaattaagcgtccatttggagtgaagtataatccatatacacggagtattcagatcctgaaagacaccaagagcataaccagtgccatgaatgagctgcagcatgatctcgatgttgtcagtgatgcccttgctaagggtgcaaatagctatgggcaacttggcctcggccataaggaagatgtgctgttgccccagcaactgaatgacttctgtaaacccaggagtgtcaggaggatcacaggaggagggggccactctgcagttgtcacagatggaggagacctctttgtttgtggcctgaacaaagatgggcaactggggcttggtcacacagaggatatcccatattttaccccctgcaaatccctctttggctgtcccatccaacaggtggcctgtggctgggattttacgattatgctcacagaaaatggtcaagttctatcatgtggatccaactcctttggccagttaggagttcctcatggacctcgaagatgtgtggttccccaggccattgagctccataaagagaaggttgtttgtattgctgctggactgaggcatgcagtagctgctacagcgagtggcatcgtgttccagtgggggactggtttggcatcatgtggacgacggttgtgccctgggcagactcttccattgtttttcacagcaaaggaaccaagcagagtgacaggtctagagaattctaaagcaatgtgtgttcttgctggctcagaccactcagcttcattaacagatgcaggagaggtgtatgtttggggaagcaacaagcatgggcaactggctaatgaggctgctttccttcctgtgccccagaaaatagaagcacattgtttccagaatgaaaaggtcactgccatctggagtggatggacacacctggttgctcagacagaaactggcaagatgtttacctggggccgagcagactatggtcagctagggaggaagttggagacttatgaaggctggaaactagaaaagcaagattcatttctcccctgttcaagaccaccgaacagcatgccttcatctccgcattgcttaactggagcaactgaggtctcttgtggctcagagcataatttggcaataattggtggagtgtgttactcttggggctggaatgagcatggcatgtgcggagatggcactgaagccaacgtctgggccccaaagccggtgcaggctctgctgtcatcgtcaggactccttgtgggctgtggggctggccactccttggccctctgccagctgccagctcaccctgcattggtccaggaccccaaggtcacctacctttccccagatgccatcgaggacactgaatctcagaaagccatggacaaagagagaaactggaaggaaagacaatcagaaacttcaacccaaagccaatctgactggtccagaaatgggggactgtgatagagaatctttaataaagtggcttttcccaccaaaa

SEQ ID NO: 320581 - DNA, 1219 bp, Homo sapiens
  misc_feature (2)..(2): n is a, c, g, or t
  misc_feature (4)..(4): n is a, c, g, or t
  misc_feature (6)..(8): n is a, c, g, or t
gncncnnngcggaagcgccggcggagcgtcctcgcatggagcgcgagcccagcgcctcggaggccgcccccgcggcggccgcgctcttcgcctggggtgcaaatagctatgggcaacttggcctcggccataaggaagatgtgctgttgccccagcaactgaatgacttctgtaaacccaggagtgtcaggaggatcacaggaggagggggccactctgcagttgtcacagatggaggagacctctttgtttgtggcctgaacaaagatgggcaactggggcttggtcacacagaggatatcccatattttaccccctgcaaatccctctttggctgtcccatccaacaggtggcctgtggctgggattttacgattatgctcacagaaaatggtcaagttctatcatgtggatccaactcctttggccagttaggagttcctcatggacctcgaagatgtgtggttccccaggccattgagctccataaagagaaggttgtttgtattgctgctggactgaggcatgcagtagctgctacagcgagtggcatcgtgttccagtgggggactggtttggcatcatgtggacgacggttgtgccctgggcagactcttccattgtttttcacagcaaaggaaccaagcagagtgacagatgcaggagaggtgtatgtttggggaagcaacaagcatgggcaactggctaatgaggctgctttccttcctgtgccccagaaaatagaagcacattgtttccagaatgaaaaggtcactgccatctggagtggatggacacacctggttgctcagacaggtctcttgtggctcagagcataatttggcaataattggtggagtgtgttactcttggggctggaatgagcatggcatgtgcggagatggcactgaagccaacgtctgggccccaaagccggtgcaggctctgctgtcatcgtcaggactccttgtgggctgtggggctggccactccttggccctctgccagctgccagctcaccctgcattggtccaggaccccaaggtcacctacctttccccagatgccatcgaggacactgaatctcagaaagccatggacaaagagagaaactggaaggaaagacaatcagaaacttcaacccaaagccaatctgactggtccagaaatgggggactgtgatagagaatctttaataaagtggcttttcccaccaaaa

SEQ ID NO: 320582 - DNA, 3476 bp, Homo sapiens
aaggttaagtagcatgcccgaggtcatacactgataaacatgaggccaatgattagatatgtctgacttcacattccacatatttccttacactgttttgcagtgtaaataggtggttaagaagataccaaagtagatctctggttcatcttctgagaagcagaactagaattctcctggctagcagttatccatctagtgcatatgtatctagagctggccaggcctttagtttacaaaataaatagaaagccttgtccccactctggaggagcttgctgccttgttagaaggtgagatatgttcgaatagaacatttggggaaaccatttgagacctggtataatgaagtgctaagattgtgggcaaggtggggaggaggtaggccttcctgactagtttaggctacaatagttgggaagactgcaagaagccagcaggcttcagtcatgccctaaaagagcgattggtttagaaaaaaaacaaaagggaactactaacatgtattctattctaggcaggtgtcaggcaaagttgtatcttattttggtctcactagattcttgcaaagcttatctgcatatccaggttttataaaaggttaagaaactgaagctcctagaagtaaatgagcccttagttatcaaatattgtctgcattgtgcaacttcttttttagcccgtagtctttgttttcatactttagttttagagaattactccaaattcatcatgattgaagacaataaggagaacaaagaccattccttagaaaggggaagagcaagtctcattttttccttaaagaatgaagttggaggacttataaaagccctgaaaatctttcaggagaagcatgtgaatctgttacatatcgagtcccgaaaatcaaaaagaagaaactcagaatttgagatttttgttgactgtgacatcaacagagaacaattgaatgatatttttcatctgctgaagtctcataccaatgttctctctgtgaatctaccagataattttactttgaaggaagatggtatggaaactgttccttggtttccaaagaagatttctgacctggaccattgtgccaacagagttctgatgtatggatctgaactagatgcagaccatcctggcttcaaagacaatgtctaccgtaaacgtcgaaagtattttgcggacttggctatgaactataaacatggagaccccattccaaaggttgaattcactgaagaggagattaagacctggggaaccgtattccaagagctcaacaaactctacccaacccatgcttgcagagagtatctcaaaaacttacctttgctttctaaatattgtggatatcgggaggataatatcccacaattggaagatgtctccaactttttaaaagagcgtacaggtttttccatccgtcctgtggctggttacttatcaccaagagatttcttatcaggtttagcctttcgagtttttcactgcactcaatatgtgagacacagttcagatcccttctataccccagagccagatacctgccatgaactcttaggtcatgtcccgcttttggctgaacctagttttgcccaattctcccaagaaattggcttggcttctcttggcgcttcagaggaggctgttcaaaaactggcaacgtgctactttttcactgtggagtttggtctatgtaaacaagatggacagctaagagtctttggtgctggcttactttcttctatcagtgaactcaaacatgcactttctggacatgccaaagtaaagccctttgatcccaagattacctgcaaacaggaatgtcttatcacaacttttcaagatgtctactttgtatctgaaagttttgaagatgcaaaggagaagatgagagaatttaccaaaacaattaagcgtccatttggagtgaagtataatccatatacacggagtattcagatcctgaaagacaccaagagcataaccagtgccatgaatgagctgcagcatgatctcgatgttgtcagtgatgcccttgctaagggtgcaaatagctatgggcaacttggcctcggccataaggaagatgtgctgttgccccagcaactgaatgacttctgtaaacccaggagtgtcaggaggatcacaggaggagggggccactctgcagttgtcacagatggaggagacctctttgtttgtggcctgaacaaagatgggcaactggggcttggtcacacagaggatatcccatattttaccccctgcaaatccctctttggctgtcccatccaacaggtggcctgtggctgggattttacgattatgctcacagaaaatggtcaagttctatcatgtggatccaactcctttggccagttaggagttcctcatggacctcgaagatgtgtggttccccaggccattgagctccataaagagaaggttgtttgtattgctgctggactgaggcatgcagtagctgctacaggacagcactaattggctgtggcagctgaggctcaggtgcttcgtgagtccacttgtggagtggaggaaggagagaggagcgagtggcatcgtgttccagtgggggactggtttggcatcatgtggacgacggttgtgccctgggcagactcttccattgtttttcacagcaaaggaaccaagcagagtgacaggtctagagaattctaaagcaatgtgtgttcttgctggctcagaccactcagcttcattaacagatgcaggagaggtgtatgtttggggaagcaacaagcatgggcaactggctaatgaggctgctttccttcctgtgccccagaaaatagaagcacattgtttccagaatgaaaaggtcactgccatctggagtggatggacacacctggttgctcagacagaaactggcaagatgtttacctggggccgagcagactatggtcagctagggaggaagttggagacttatgaaggctggaaactagaaaagcaagattcatttctcccctgttcaagaccaccgaacagcatgccttcatctccgcattgcttaactggagcaactgaggtctcttgtggctcagagcataatttggcaataattggtggagtgtgttactcttggggctggaatgagcatggcatgtgcggagatggcactgaagccaacgtctgggccccaaagccggtgcaggctctgctgtcatcgtcaggactccttgtgggctgtggggctggccactccttggccctctgccagctgccagctcaccctgcattggtccaggaccccaaggtcacctacctttccccagatgccatcgaggacactgaatctcagaaagccatggacaaagagagaaactggaaggaaagacaatcagaaacttcaacccaaagccaatctgactggtccagaaatgggggactgtgatagagaatctttaataaagtggcttttcccaccaaaa

SEQ ID NO: 320583 - DNA, 1402 bp, Homo sapiens
agcgggccggtgcaggccctgaggggcgccgagatgtgggagctgctggccgcggcgtgggcagttcaggggctgggcggctgagggtgcaaatagctatgggcaacttggcctcggccataaggaagatgtgctgttgccccagcaactgaatgacttctgtaaacccaggagtgtcaggaggatcacaggaggagggggccactctgcagttgtcacagatggaggagacctctttgtttgtggcctgaacaaagatgggcaactggggcttggtcacacagaggatatcccatattttaccccctgcaaatccctctttggctgtcccatccaacaggtggcctgtggctgggattttacgattatgctcacagaaaatggtcaagttctatcatgtggatccaactcctttggccagttaggagttcctcatggacctcgaagatgtgtggttccccaggccattgagctccataaagagaaggttgtttgtattgctgctggactgaggcatgcagtagctgctacagcgagtggcatcgtgttccagtgggggactggtttggcatcatgtggacgacggttgtgccctgggcagactcttccattgtttttcacagcaaaggaaccaagcagagtgacaggtctagagaattctaaagcaatgtgtgttcttgctggctcagaccactcagcttcattaacagatgcaggagaggtgtatgtttggggaagcaacaagcatgggcaactggctaatgaggctgctttccttcctgtgccccagaaaatagaagcacattgtttccagaatgaaaaggtcactgccatctggagtggatggacacacctggttgctcagacagaaactggcaagatgtttacctggggccgagcagactatggtcagctagggaggaagttggagacttatgaaggctggaaactagaaaagcaagattcatttctcccctgttcaagaccaccgaacagcatgccttcatctccgcattgcttaactggagcaactgaggtggagtgtgttactcttggggctggaatgagcatggcatgtgcggagatggcactgaagccaacgtctgggccccaaagccggtgcaggctctgctgtcatcgtcaggactccttgtgggctgtggggctggccactccttggccctctgccagctgccagctcaccctgcattggtccaggaccccaaggtcacctacctttccccagatgccatcgaggacactgaatctcagaaagccatggacaaagagagaaactggaaggaaagacaatcagaaacttcaacccaaagccaatctgactggtccagaaatgggggactgtgatagagaatctttaataaagtggcttttcccaccaaaa

SEQ ID NO: 320584 - DNA, 1224 bp, Homo sapiens
agcgggccggtgcaggccctgaggggcgccgagatgtgggagctgctggccgcggcgtgggcagttcaggggctgggcggctgagggtgcaaatagctatgggcaacttggcctcggccataaggaagatgtgctgttgccccagcaactgaatgacttctgtaaacccaggagtgtcaggaggatcacaggaggagggggccactctgcagttgtcacagatggaggagacctctttgtttgtggcctgaacaaagatgggcaactggggcttggtcacacagaggatatcccatattttaccccctgcaaatccctctttggctgtcccatccaacaggtggcctgtggctgggattttacgattatgctcacagaaaatggtcaagttctatcatgtggatccaactcctttggccagttaggagttcctcatggacctcgaagatgtgtggttccccaggccattgagctccataaagagaaggttgtttgtattgctgctggactgaggcatgcagtagctgctacagcgagtggcatcgtgttccagtgggggactggtttggcatcatgtggacgacggttgtgccctgggcagactcttccattgtttttcacagcaaaggaaccaagcagagtgacaggtctagagaattctaaagcaatgtgtgttcttgctggctcagaccactcagcttcattaacagatgcaggagaggtgtatgtttggggaagcaacaagcatgggcaactggctaatgaggctgctttccttcctgtgccccagaaaatagaagcacattgtttccagaatgaaaaggtcactgccatctggagtggatggacacacctggttgctcagacagaaactggcaagatgtttacctggggccgagcagactatggtcagctagggaggaagttggagacttatgaaggctggaaactagaaaagcaagattcatttctcccctgttcaagaccaccgaacagcatgccttcatctccgcattgcttaactggagcaactgaggtctcttgtggctcagagcataatttggcaataattggtacctgagctggcctccctgcccgggaagtggcatttgagcatattaaagaactcacaggctgaggggcaccatgtgtagaaagccagacataaaaaggaagaatgattggactgcttctggtttttcgaataaatccccattctaagtt

SEQ ID NO: 320585 - DNA, 944 bp, Homo sapiens
  misc_feature (2)..(2): n is a, c, g, or t
  misc_feature (4)..(4): n is a, c, g, or t
  misc_feature (6)..(8): n is a, c, g, or t
gncncnnngcggaagcgccggcggagcgtcctcgcatggagcgcgagcccagcgcctcggaggccgcccccgcggcggccgcgctcttcgcctggggtgcaaatagctatgggcaacttggcctcggccataaggaagatgtgctgttgccccagcaactgaatgacttctgtaaacccaggagtgtcaggaggatcacaggaggagggggccactctgcagttgtcacagatggaggagacctctttgtttgtggcctgaacaaagatgggcaactggggcttggtcacacagaggatatcccatattttaccccctgcaaatccctctttggctgtcccatccaacaggtggcctgtggctgggattttacgattatgctcacagaaaatggtcaagttctatcatgtggatccaactcctttggccagttaggagttcctcatggacctcgaagatgtgtggttccccaggccattgagctccataaagagaaggttgtttgtattgctgctggactgaggcatgcagtagctgctacagcgagtggcatcgtgttccagtgggggactggtttggcatcatgtggacgacggttgtgccctgggcagactcttccattgtttttcacagcaaaggaaccaagcagagtgacagcaagcagagtgacaggtaagatgcttctttctttagtcctatatttgttctttgtcaggaagtagagacataaacatgcagaagaggattaaatggatttttgattttgctatttcttggtctctctaactttctctattagttggtctgttagtcttgctggcattgtttgttggcccagtagaagcaaccctctttgctgctagagtttggaaccgattgaggcatagatgcaagtcaggtaggtggagattgaaatggtaactctagaactgaaatgagctagg

SEQ ID NO: 320586 - DNA, 350 bp, Homo sapiens
gtaaaatcgacatcatgatacccactcccagaagttgttcttcccaatggcataggtatgtcaagtacatgctcagtacccgccatgtcataggtgctccgcaggtgttgtccacttggctgcttcactgattcactctcttcctttccacctaggatttctttccacatctgacaaagctcactggctaactcccatttgtgggcatagactgaggtgaactgagggcatgtggccatcacttgctgagaagatccctgcctttcagaggcagggtccccagatccagctctgctttcaggcccctcacctctgtgtctggatgaattggctccagctgttgtgcttcc

SEQ ID NO: 320587 - DNA, 1282 bp, Homo sapiens
  misc_feature (2)..(2): n is a, c, g, or t
  misc_feature (4)..(4): n is a, c, g, or t
  misc_feature (6)..(8): n is a, c, g, or t
gncncnnngcggaagcgccggcggagcgtcctcgcatggagcgcgagcccagcgcctcggaggccgcccccgcggcggccgcgctcttcgcctggggtgcaaatagctatgggcaacttggcctcggccataaggaagatgtgctgttgccccagcaactgaatgacttctgtaaacccaggagtgtcaggaggatcacaggaggagggggccactctgcagttgtcacagatggaggagacctctttgtttgtggcctgaacaaagatgggcaactggggcttggtcacacagaggatatcccatattttaccccctgcaaatccctctttggctgtcccatccaacaggtggcctgtggctgggattttacgattatgctcacagaaaatggtcaagttctatcatgtggatccaactcctttggccagttaggagttcctcatggacctcgaagatgtgtggttccccaggccattgagctccataaagagaaggttgtttgtattgctgctggactgaggcatgcagtagctgctacagcgagtggcatcgtgttccagtgggggactggtttggcatcatgtggacgacggttgtgccctgggcagactcttccattgtttttcacagcaaaggaaccaagcagagtgacaggtctagagaattctaaagcaatgtgtgttcttgctggctcagaccactcagcttcattaacagatgcaggagaggtgtatgtttggggaagcaacaagcatgggcaactggctaatgaggctgctttccttcctgtgccccagaaaatagaagcacattgtttccagaatgaaaaggtcactgccatctggagtggatggacacacctggttgctcagacaggtctcttgtggctcagagcataatttggcaataattggtggagtgtgttactcttggggctggaatgagcatggcatgtgcggagatggcactgaagccaacgtctgggccccaaagccggtgcaggctctgctgtcatcgtcaggactccttgtgggctgtggggctggccactccttggccctctgccagctgccagctcaccctgcattggtccaggaccccaaggtcacctacctttccccagatgccatcgaggacactgaatctcagaaagccatggacaaagagagaaactggaaggaaagacaatcagaaacttcaacccaaagccaatctgactggtccagaaatgggggactgtgatagagaatctttaataaagtggcttttcccaccaaaa

SEQ ID NO: 320588 - DNA, 798 bp, Homo sapiens
  misc_feature (2)..(2): n is a, c, g, or t
  misc_feature (4)..(4): n is a, c, g, or t
  misc_feature (6)..(8): n is a, c, g, or t
gncncnnngcggaagcgccggcggagcgtcctcgcatggagcgcgagcccagcgcctcggaggccgcccccgcggcggccgcgctcttcgcctggggtgcaaatagctatgggcaacttggcctcggccataaggaagatgtgctgttgccccagcaactgaatgacttctgtaaacccaggagtgtcaggaggatcacaggaggagggggccactctgcagttgtcacagatggaggagacctctttgtttgtggcctgaacaaagatgggcaactggggcttggtcacacagaggatatcccatattttaccccctgcaaatccctctttggctgtcccatccaacaggtggcctgtggctgggattttacgattatgctcacagaaaatggtcaagttctatcatgtggatccaactcctttggccagttaggagttcctcatggacctcgaagatgtgtggttccccaggccattgagctccataaagagaaggttgtttgtattgctgctggactgaggcatgcagtagctgctacagcgagtggcatcgtgttccagtgggggactggtttggcatcatgtggacgacggttgtgccctgggcagactcttccattgtttttcacagcaaaggaaccaagcagagtgacagatgcaggagaggtgtatgtttggggaagcaacaagcatgggcaactggctaatgaggctgctttccttcctgtgcccagttcttccgctctcgctccctctgtcctcgctcctgcccccggccgtggcctgcgcccccggg

SEQ ID NO: 320589 - DNA, 789 bp, Homo sapiens
aacgcgcgataccataggggtataggtacgaggcctgggtggcgcgtgggcagttcagggctgggcggctgaggtgtcttcaaaaacaaacatatttaaaagattttacttctcatctccaggaagaaccagctaggagtagggtgcaaatagctatgggcaacttggcctcggccataaggaagatgtgctgttgccccagcaactgaatgacttctgtaaacccaggagtgtcaggaggatcacaggaggagggggccactctgcagttgtcacagatggaggagacctctttgtttgtggcctgaacaaagatgggcaactggggcttggtcacacagaggatatcccatattttaccccctgcaaatccctctttggctgtcccatccaacaggtggcctgtggctgggattttacgattatgctcacagaaaatggtcaagttctatcatgtggatccaactcctttggccagttaggagttcctcatggacctcgaagatgtgtggttccccaggccattgagctccataaagagaaggttgtttgtattgctgctggactgaggcatgcagtagctgctacagcgagtggcatcgtgttccagtgggggactggtttggcatcatgtggacgacggttgtgccctgggcagactcttccattgtttttcacagcaaaggaaccaagcagagtgacaggtctagagaattctaaagcaatgtgtgttcttgctggctcagaccactcagcttcattaacaggtaggtaccagctctttcacgg

SEQ ID NO: 320590 - DNA, 4021 bp, Homo sapiens
gtacggaaaagggagaaacccaataactcgttccgagaccgtacaaattctcctggctagcagttatccatctagtgcatatgtatctagagctggccaggcctttagtttacaaaataaatagaaagccttgtccccactctggaggagcttgctgccttgttagaaggtgagatatgttcgaatagaacatttggggaaaccatttgagacctggtataatgaagtgctaagattgtgggcaaggtggggaggaggtaggccttcctgactagtttaggctacaatagttgggaagactgcaagaagccagcaggcttcagtcatgccctaaaagagcgattggtttagaaaaaaaacaaaagggaactactaacatgtattctattctaggcaggtgtcaggcaaagttgtatcttattttggtctcactagattcttgcaaagcttatctgcatatccaggttttataaaaggttaagaaactgaagctcctagaagtaaatgagcccttagttatcaaatattgtctgcattgtgcaacttcttttttagcccgtagtctttgttttcatactttagttttagagaattactccaaattcatcatgattgaagacaataaggagaacaaagaccattccttagaaaggggaagagcaagtctcattttttccttaaagaatgaagttggaggacttataaaagccctgaaaatctttcaggagaagcatgtgaatctgttacatatcgagtcccgaaaatcaaaaagaagaaactcagaatttgagatttttgttgactgtgacatcaacagagaacaattgaatgatatttttcatctgctgaagtctcataccaatgttctctctgtgaatctaccagataattttactttgaaggaagatggtatggaaactgttccttggtttccaaagaagatttctgacctggaccattgtgccaacagagttctgatgtatggatctgaactagatgcagaccatcctggcttcaaagacaatgtctaccgtaaacgtcgaaagtattttgcggacttggctatgaactataaacatggagaccccattccaaaggttgaattcactgaagaggagattaagacctggggaaccgtattccaagagctcaacaaactctacccaacccatgcttgcagagagtatctcaaaaacttacctttgctttctaaatattgtggatatcgggaggataatatcccacaattggaagatgtctccaactttttaaaagagcgtacaggtttttccatccgtcctgtggctggttacttatcaccaagagatttcttatcaggtttagcctttcgagtttttcactgcactcaatatgtgagacacagttcagatcccttctataccccagagccagatacctgccatgaactcttaggtcatgtcccgcttttggctgaacctagttttgcccaattctcccaagaaattggcttggcttctcttggcgcttcagaggaggctgttcaaaaactggcaacgtgctactttttcactgtggagtttggtctatgtaaacaagatggacagctaagagtctttggtgctggcttactttcttctatcagtgaactcaaacatgcactttctggacatgccaaagtaaagccctttgatcccaagattacctgcaaacaggaatgtcttatcacaacttttcaagatgtctactttgtatctgaaagttttgaagatgcaaaggagaagatgagagaatttaccaaaacaattaagcgtccatttggagtgaagtataatccatatacacggagtattcagatcctgaaagacaccaagagcataaccagtgccatgaatgagctgcagcatgatctcgatgttgtcagtgatgcccttgctaaggtcagcaggaagccgagtatctaacagtagccagtcatccaggaacatttgagcatcaattcggaggtctgggccatctcttgctttccttgaacacctgatcctggagggacagcatcttctggccaaacaatattatcgaattccactacttaaggaatcactagtctttgaaaatttgtacctggatattctatttaccacttatttttttgtttagttttatttctttttttttttggtagcagctttaatgagacaatttatataccatacaagccactgaccacccatttttaatagagaagttgtttgacccaatagatagatctaatctcagcctaactctattttccccaatcctccttgagtaaaatgaccctttaggatcgcttagaataacttgaggagtattatggcgctgactcatattgttacctaagatccccttatttctaaagtatctgttacttattgctgaatttgtgccaagctcaatcacattcacactaaaatttaacaggagaccctgctgtctttgttgctagcatgagcaaaagtatagaggcctttgcacatggaggatacctagtaaagagcaagtagtctagtttcaagtgtagtatcttgtagggaaatgggagtagctaagcctggaaaggttgaatggggcataatcattaagactaggctaaaaattcgagactttattttttaggcattagggagccccttcccaagtgactatcttccttgaaactttgttttctttcaatgacatcacacgatactggttttattctggactatctatcctactcatgggtccaagggaaacttagtagagatgcgacttgcatggggctgtactcagacatgtggtcctaggtattataatgggattgtccccagattaacaggaagcattgttatcaaaggaagagttcaaactgagatagataagagaagcacaaagtaaaagatagaaaaaacagtgctgagtactttatttctaaggtataaggtgaggccataaacagaaaggtatgcaatgagagtagaggctgcaaaaaaggggaggaaatagaatgtcagaaaggtcaagaagagtggtttaggactgagactgtaagtaatgtaaggattgccaaggaatggtttttatgcagagtcagctgtgtagcacagggagtaagcagtcctgttataaatgggtgaagctgaactccaaaatacaaacttatgtctctttaatttgcccctttcctccctctagtcactaaatgaagatgttcttcaagtttctgtctttgcacttctactctttttgccatctcttcatggggaatgtcacccagatacatgacttcagttcttattttgaatgactcctctatttgcagttataaccctgacatctttcttgaatttttttgccccttaattccaacgaactcctggatgtctatgtagatgtctcataatttaggccaatgctgtacaacttcatgtggcatcatccacatagaatgaataggggttgttcaatatgacagccctgccaagcatctcaaattgaacaggtctataaaggaactcagaatcacttgaatatcacagtccatcagcttcctttcccagtaatttaatttccattaatggtatattaaacatcgtattttcaatcatttttaggtttagtcagctacttaaaaataggctttttcttcacataaataaattgtataccatttaatgtgttttatttcaacagactaatagatcttttaacacttcttagtcctcaaaataaattattaaaaactttgtatttcatgtcatattatataaggaaatagaattttgaagaataattcatgctgttttaaatttttacattgtacattttaatagctaatcaactcttaagtatacatttgatggtaaatagatgctagctaatctggaatcatttgaaatattgattatctgatttatagtttggttgcaaggaaatctactgtaagcaaatcataatagatagcaaatcttagaacatgtagaaaaaaagaaattaaaaaaagcaaatcttagaacatgta

SEQ ID NO: 320591 - DNA, 4091 bp, Homo sapiens
aaggttaagtagcatgcccgaggtcatacactgataaacatgaggccaatgattagatatgtctgacttcacattccacatatttccttacactgttttgcagtgtaaataggtggttaagaagataccaaagtagatctctggttcatcttctgagaagcagaactagaattctcctggctagcagttatccatctagtgcatatgtatctagagctggccaggcctttagtttacaaaataaatagaaagccttgtccccactctggaggagcttgctgccttgttagaaggtgagatatgttcgaatagaacatttggggaaaccatttgagacctggtataatgaagtgctaagattgtgggcaaggtggggaggaggtaggccttcctgactagtttaggctacaatagttgggaagactgcaagaagccagcaggcttcagtcatgccctaaaagagcgattggtttagaaaaaaaacaaaagggaactactaacatgtattctattctaggcaggtgtcaggcaaagttgtatcttattttggtctcactagattcttgcaaagcttatctgcatatccaggttttataaaaggttaagaaactgaagctcctagaagtaaatgagcccttagttatcaaatattgtctgcattgtgcaacttcttttttagcccgtagtctttgttttcatactttagttttagagaattactccaaattcatcatgattgaagacaataaggagaacaaagaccattccttagaaaggggaagagcaagtctcattttttccttaaagaatgaagttggaggacttataaaagccctgaaaatctttcaggagaagcatgtgaatctgttacatatcgagtcccgaaaatcaaaaagaagaaactcagaatttgagatttttgttgactgtgacatcaacagagaacaattgaatgatatttttcatctgctgaagtctcataccaatgttctctctgtgaatctaccagataattttactttgaaggaagatggtatggaaactgttccttggtttccaaagaagatttctgacctggaccattgtgccaacagagttctgatgtatggatctgaactagatgcagaccatcctggcttcaaagacaatgtctaccgtaaacgtcgaaagtattttgcggacttggctatgaactataaacatggagaccccattccaaaggttgaattcactgaagaggagattaagacctggggaaccgtattccaagagctcaacaaactctacccaacccatgcttgcagagagtatctcaaaaacttacctttgctttctaaatattgtggatatcgggaggataatatcccacaattggaagatgtctccaactttttaaaagagcgtacaggtttttccatccgtcctgtggctggttacttatcaccaagagatttcttatcaggtttagcctttcgagtttttcactgcactcaatatgtgagacacagttcagatcccttctataccccagagccagatacctgccatgaactcttaggtcatgtcccgcttttggctgaacctagttttgcccaattctcccaagaaattggcttggcttctcttggcgcttcagaggaggctgttcaaaaactggcaacgtgctactttttcactgtggagtttggtctatgtaaacaagatggacagctaagagtctttggtgctggcttactttcttctatcagtgaactcaaacatgcactttctggacatgccaaagtaaagccctttgatcccaagattacctgcaaacaggaatgtcttatcacaacttttcaagatgtctactttgtatctgaaagttttgaagatgcaaaggagaagatgagagaatttaccaaaacaattaagcgtccatttggagtgaagtataatccatatacacggagtattcagatcctgaaagacaccaagagcataaccagtgccatgaatgagctgcagcatgatctcgatgttgtcagtgatgcccttgctaaggtcagcaggaagccgagtatctaacagtagccagtcatccaggaacatttgagcatcaattcggaggtctgggccatctcttgctttccttgaacacctgatcctggagggacagcatcttctggccaaacaatattatcgaattccactacttaaggaatcactagtctttgaaaatttgtacctggatattctatttaccacttatttttttgtttagttttatttctttttttttttggtagcagctttaatgagacaatttatataccatacaagccactgaccacccatttttaatagagaagttgtttgacccaatagatagatctaatctcagcctaactctattttccccaatcctccttgagtaaaatgaccctttaggatcgcttagaataacttgaggagtattatggcgctgactcatattgttacctaagatccccttatttctaaagtatctgttacttattgctgaatttgtgccaagctcaatcacattcacactaaaatttaacaggagaccctgctgtctttgttgctagcatgagcaaaagtatagaggcctttgcacatggaggatacctagtaaagagcaagtagtctagtttcaagtgtagtatcttgtagggaaatgggagtagctaagcctggaaaggttgaatggggcataatcattaagactaggctaaaaattcgagactttattttttaggcattagggagccccttcccaagtgactatcttccttgaaactttgttttctttcaatgacatcacacgatactggttttattctggactatctatcctactcatgggtccaagggaaacttagtagagatgcgacttgcatggggctgtactcagacatgtggtcctaggtattataatgggattgtccccagattaacaggaagcattgttatcaaaggaagagttcaaactgagatagataagagaagcacaaagtaaaagatagaaaggtatgcaatgagagtagaggctgcaaaaaaggggaggaaatagaatgtcagaaaggtcaagaagagtggtttaggactgagactgtaagtaatgtaaggattgccaaggaatggtttttatgcagagtcagctgtgtagcacagggagtaagcagtcctgttataaatgggtgaagctgaactccaaaatacaaacttatgtctctttaatttgcccctttcctccctctagtcactaaatgaagatgttcttcaagtttctgtctttgcacttctactctttttgccatctcttcatggggaatgtcacccagatacatgacttcagttcttattttgaatgactcctctatttgcagttataaccctgacatctttcttgaatttttttgccccttaattccaacgaactcctggatgtctatgtagatgtctcataatttaggccaatgctgtacaacttcatgtggcatcatccacatagaatgaataggggttgttcaatatgacagccctgccaagcatctcaaattgaacaggtctataaaggaactcagaatcacttgaatatcacagtccatcagcttcctttcccagtaatttaatttccattaatggtatattaaacatcgtattttcaatcatttttaggtttagtcagctacttaaaaataggctttttcttcacataaataaattgtataccatttaatgtgttttatttcaacagactaatagatcttttaacacttcttagtcctcaaaataaattattaaaaactttgtatttcatgtcatattatataaggaaatagaattttgaagaataattcatgctgttttaaatttttacattgtacattttaatagctaatcaactcttaagtatacatttgatggtaaatagatgctagctaatctggaatcatttgaaatattgattatctgatttatagtttggttgcaaggaaatctactgtaagcaaatcataatagatagcaaatcttagaacatgtagaaaaaaagaaattaaaaaaagcaaatcttagaacatgta

SEQ ID NO: 320592 - DNA, 1508 bp, Homo sapiens
agcgggccggtgcaggccctgaggggcgccgagatgtgggagctgctggccgcggcgtgggcagttcaggggctgggcggctgaggtgtcttcaaaaacaaacatatttaaaagattttacttctcatctccaggaagaaccagctaggagtagggtgcaaatagctatgggcaacttggcctcggccataaggaagatgtgctgttgccccagcaactgaatgacttctgtaaacccaggagtgtcaggaggatcacaggaggagggggccactctgcagttgtcacagatggaggagacctctttgtttgtggcctgaacaaagatgggcaactggggcttggtcacacagaggatatcccatattttaccccctgcaaatccctctttggctgtcccatccaacaggtggcctgtggctgggattttacgattatgctcacagaaaatggtcaagttctatcatgtggatccaactcctttggccagttaggagttcctcatggacctcgaagatgtgtggttccccaggccattgagctccataaagagaaggttgtttgtattgctgctggactgaggcatgcagtagctgctacagcgagtggcatcgtgttccagtgggggactggtttggcatcatgtggacgacggttgtgccctgggcagactcttccattgtttttcacagcaaaggaaccaagcagagtgacaggtctagagaattctaaagcaatgtgtgttcttgctggctcagaccactcagcttcattaacagatgcaggagaggtgtatgtttggggaagcaacaagcatgggcaactggctaatgaggctgctttccttcctgtgccccagaaaatagaagcacattgtttccagaatgaaaaggtcactgccatctggagtggatggacacacctggttgctcagacagaaactggcaagatgtttacctggggccgagcagactatggtcagctagggaggaagttggagacttatgaaggctggaaactagaaaagcaagattcatttctcccctgttcaagaccaccgaacagcatgccttcatctccgcattgcttaactggagcaactgaggtctcttgtggctcagagcataatttggcaataattggtggagtgtgttactcttggggctggaatgagcatggcatgtgcggagatggcactgaagccaacgtctgggccccaaagccggtgcaggctctgctgtcatcgtcaggactccttgtgggctgtggggctggccactccttggccctctgccagctgccagctcaccctgcattggtccaggaccccaaggtcacctacctttccccagatgccatcgaggacactgaatctcagaaagccatggacaaagagagaaactggaaggaaagacaatcagaaacttcaacccaaagccaatctgactggtccagaaatgggggactgtgatagagaatctttaataaagtggcttttcccaccaaaa

SEQ ID NO: 320593 - DNA, 1552 bp, Homo sapiens
agcgggccggtgcaggccctgaggggcgccgagatgtgggagctgctggccgcggcgtgggcagttcaggggctgggcggctgagggtgcaaatagctatgggcaacttggcctcggccataaggaagatgtgctgttgccccagcaactgaatgacttctgtaaacccaggagtgtcaggaggatcacaggaggagggggccactctgcagttgtcacagatggaggagacctctttgtttgtggcctgaacaaagatgggcaactggggcttggtcacacagaggatatcccatattttaccccctgcaaatccctctttggctgtcccatccaacaggtggcctgtggctgggattttacgattatgctcacagaaaatggtcaagttctatcatgtggatccaactcctttggccagttaggagttcctcatggacctcgaagatgtgtggttccccaggccattgagaagtatagtttccagaagaaggaaggccaaagctcagccctttctgctgttcagcctgcatctgggatgttgtgttttgttgtggatttggtgcttaggccctgggcataaagctccataaagagaaggttgtttgtattgctgctggactgaggcatgcagtagctgctacagcgagtggcatcgtgttccagtgggggactggtttggcatcatgtggacgacggttgtgccctgggcagactcttccattgtttttcacagcaaaggaaccaagcagagtgacaggtctagagaattctaaagcaatgtgtgttcttgctggctcagaccactcagcttcattaacagatgcaggagaggtgtatgtttggggaagcaacaagcatgggcaactggctaatgaggctgctttccttcctgtgccccagaaaatagaagcacattgtttccagaatgaaaaggtcactgccatctggagtggatggacacacctggttgctcagacagaaactggcaagatgtttacctggggccgagcagactatggtcagctagggaggaagttggagacttatgaaggctggaaactagaaaagcaagattcatttctcccctgttcaagaccaccgaacagcatgccttcatctccgcattgcttaactggagcaactgaggtctcttgtggctcagagcataatttggcaataattggtggagtgtgttactcttggggctggaatgagcatggcatgtgcggagatggcactgaagccaacgtctgggccccaaagccggtgcaggctctgctgtcatcgtcaggactccttgtgggctgtggggctggccactccttggccctctgccagctgccagctcaccctgcattggtccaggaccccaaggtcacctacctttccccagatgccatcgaggacactgaatctcagaaagccatggacaaagagagaaactggaaggaaagacaatcagaaacttcaacccaaagccaatctgactggtccagaaatgggggactgtgatagagaatctttaataaagtggcttttcccaccaaaa

SEQ ID NO: 320594 - DNA, 1297 bp, Homo sapiens
gcagttctggtatgccatccaggaagaaccagctaggaggtgcaaatagctatgggcaacttggcctcggccataaggaagatgtgctgttgccccagcaactgaatgacttctgtaaacccaggagtgtcaggaggatcacaggaggagggggccactctgcagttgtcacagatggaggagacctctttgtttgtggcctgaacaaagatgggcaactggggcttggtcacacagaggatatcccatattttaccccctgcaaatccctctttggctgtcccatccaacaggtggcctgtggctgggattttacgattatgctcacagctccataaagagaaggttgtttgtattgctgctggactgaggcatgcagtagctgctacagcgagtggcatcgtgttccagtgggggactggtttggcatcatgtggacgacggttgtgccctgggcagactcttccattgtttttcacagcaaaggaaccaagcagagtgacaggtctagagaattctaaagcaatgtgtgttcttgctggctcagaccactcagcttcattaacagatgcaggagaggtgtatgtttggggaagcaacaagcatgggcaactggctaatgaggctgctttccttcctgtgccccagaaaatagaagcacattgtttccagaatgaaaaggtcactgccatctggagtggatggacacacctggttgctcagacagaaactggcaagatgtttacctggggccgagcagactatggtcagctagggaggaagttggagacttatgaaggctggaaactagaaaagcaagattcatttctcccctgttcaagaccaccgaacagcatgccttcatctccgcattgcttaactggagcaactgaggtctcttgtggctcagagcataatttggcaataattggtggagtgtgttactcttggggctggaatgagcatggcatgtgcggagatggcactgaagccaacgtctgggccccaaagccggtgcaggctctgctgtcatcgtcaggactccttgtgggctgtggggctggccactccttggccctctgccagctgccagctcaccctgcattggtccaggaccccaaggtcacctacctttccccagatgccatcgaggacactgaatctcagaaagccatggacaaagagagaaactggaaggaaagacaatcagaaacttcaacccaaagccaatctgactggtccagaaatgggggactgtgatagagaatctttaataaagtggcttttcccaccaaaa

SEQ ID NO: 320595 - DNA, 2240 bp, Homo sapiens
agcgggcgtccgaggccggccgaactcccgcgctctcccgccgcctcgcctcgcctggtgtctctcccgaccatggagggggtcgcggtggtgacggcgggcagcgtaggcgctgccaaaaccgagggagctgcagccttgccgcctccgcctccgcctcctgtctccccgcccgccctcacccctgcacccgcagcgggtgaggagggaccggcgcctctgtctgagacgggggctcccggctgctccggctcccggccccctgagctggagccggagcgcagcctgggccgcttcagaggccgcttcgaggacgaggacgaggagttggaagaagaagaggagctggaggaggaagaagaggaggaggaggaggacatgagtcacttctcgttgaggctggagggaggccggcaggactcggaggacgaggaggagcgcctgattaatctctctgagctgaccccatacatcttgtgttccatttgcaaaggttacttaatagatgcaactaccatcacagaatgtcttcataccttttgtaaaagctgcatcgtaagacatttttactacagcaacagatgtccaaaatgcaatatagtagtacatcagacacaacctctttataacataaggttggaccgacagttacaagacatagtgtacaaattagtgatcaatctagaggaaagagaaaaaaagcaaatgcatgatttctataaagaaagaggtctagaagtacctaaacctgctgttccacagccagtcccttcaagcaaaggaagatctaaaaaagtcctagaatcagtgtttcgtattccacctgaacttgatatgtctttattactggagttcattggtgctaatgaaggcacgggacattttaagccattggaaaagaagtttgttcgagtttcaggagaagcaactattggacatgtagaaaaattcctcagaagaaaaatgggtcttgatccagcttgtcaggtagatataatctgtggtgatcacctgttggagcagtatcaaactctaagggaaatccgacgtgcaataggtgatgcagcaatgcaggatggtctgcttgtccttcattatggtcttgtggtttctcctctgaagataacttgaagattctaggcacattatgaggagggaaacaaaggaggcttctgcaggactgcatctcaccaaagatttccatgaaatgtaattgctaccactttgctgttcaagacataacttacctatttttagcaccaagaattatagcgtttataagtacaacttggaacgatggaatgcatctgttactagagactgtatataaaaagcagccaaagctcaggggaaatttttcaaaaattgaattttaaaatttcttatgattttaaataccttgacattgattttgcttcccatctttgaagtaattggttagttttctttgttcagccatttcaagttggtggttgggatatctgctctctgggatggcatcagttgggcagtcatctttttggaagagaagtgtgcttttgagtggaagattcaaagccagtctttgttaaactgcagggtgtactctcaaagaccaaaactattggccacttttgtatgttgccagcatattttgaacttgtacctttttttatactagcaacactacaaaggagaagttactcatttcaaaatggatgaattgttattatgtgtgaagagactctgagtttatgatctgtgccataaaatttcagtgtaataagacttcttcaatacatcttccaataaggggtgcttctttgtgacagtatttttatttctgacattcattttatttgggtacatagtgtggttgttgataccttgcaatagtattgcttctgaaagtaataaaaaattttaggagaatttgagaagtttacagaattacttattcattgttttcttagtaagtcagtttaatgtttatttttctcattatttcatcactgcaataaagaataagggtgtttgagctcacctccatgcaaagacttcagttttaaaacattatttgcctaaaattagcattgtgatgctttctgaaagaaatattttataaatcctgtttaacagcagaatttctgaatgtgtagagactactacaaaattggaaaaagattggcaattctttgtaaagaatttgtgaattgtgtataaatttattctaacatttaataaaaatgtattttaaccta

SEQ ID NO: 320596 - DNA, 2262 bp, Homo sapiens
agcgggcgtccgaggccggccgaactcccgcgctctcccgccgcctcgcctcgcctggtgtctctcccgaccatggagggggtcgcggtggtgacggcgggcagcgtaggcgctgccaaaaccgagggagctgcagccttgccgcctccgcctccgcctcctgtctccccgcccgccctcacccctgcacccgcagcgggtgaggagggaccggcgcctctgtctgagacgggggctcccggctgctccggctcccggccccctgagctggagccggagcgcagcctgggccgcttcagaggccgcttcgaggacgaggacgaggagttggaagaagaagaggagctggaggaggaagaagaggaggaggaggaggacatgagtcacttctcgttgaggctggagggaggccggcaggactcggaggacgaggaggagcgcctgattaatctctctgagctgaccccatacatcttgtgttccatttgcaaaggttacttaatagatgcaactaccatcacagaatgtcttcataccttttgtaaaagctgcatcgtaagacatttttactacagcaacagatgtccaaaatgcaatatagtagtacatcagacacaacctctttataacataaggttggaccgacagttacaagacatagtgtacaaattagtgatcaatctagaggaaatctgtgttttatcattttttaggagaaaaaaagcaaatgcatgatttctataaagaaagaggtctagaagtacctaaacctgctgttccacagccagtcccttcaagcaaaggaagatctaaaaaagtcctagaatcagtgtttcgtattccacctgaacttgatatgtctttattactggagttcattggtgctaatgaaggcacgggacattttaagccattggaaaagaagtttgttcgagtttcaggagaagcaactattggacatgtagaaaaattcctcagaagaaaaatgggtcttgatccagcttgtcaggtagatataatctgtggtgatcacctgttggagcagtatcaaactctaagggaaatccgacgtgcaataggtgatgcagcaatgcaggatggtctgcttgtccttcattatggtcttgtggtttctcctctgaagataacttgaagattctaggcacattatgaggagggaaacaaaggaggcttctgcaggactgcatctcaccaaagatttccatgaaatgtaattgctaccactttgctgttcaagacataacttacctatttttagcaccaagaattatagcgtttataagtacaacttggaacgatggaatgcatctgttactagagactgtatataaaaagcagccaaagctcaggggaaatttttcaaaaattgaattttaaaatttcttatgattttaaataccttgacattgattttgcttcccatctttgaagtaattggttagttttctttgttcagccatttcaagttggtggttgggatatctgctctctgggatggcatcagttgggcagtcatctttttggaagagaagtgtgcttttgagtggaagattcaaagccagtctttgttaaactgcagggtgtactctcaaagaccaaaactattggccacttttgtatgttgccagcatattttgaacttgtacctttttttatactagcaacactacaaaggagaagttactcatttcaaaatggatgaattgttattatgtgtgaagagactctgagtttatgatctgtgccataaaatttcagtgtaataagacttcttcaatacatcttccaataaggggtgcttctttgtgacagtatttttatttctgacattcattttatttgggtacatagtgtggttgttgataccttgcaatagtattgcttctgaaagtaataaaaaattttaggagaatttgagaagtttacagaattacttattcattgttttcttagtaagtcagtttaatgtttatttttctcattatttcatcactgcaataaagaataagggtgtttgagctcacctccatgcaaagacttcagttttaaaacattatttgcctaaaattagcattgtgatgctttctgaaagaaatattttataaatcctgtttaacagcagaatttctgaatgtgtagagactactacaaaattggaaaaagattggcaattctttgtaaagaatttgtgaattgtgtataaatttattctaacatttaataaaaatgtattttaaccta

SEQ ID NO: 320597 - DNA, 1162 bp, Homo sapiens
  misc_feature (1118)..(1118): n is a, c, g, or t
agcgggcgtccgaggccggccgaactcccgcgctctcccgccgcctcgcctcgcctggtgtctctcccgaccatggagggggtcgcggtggtgacggcgggcagcgtaggcgctgccaaaaccgagggagctgcagccttgccgcctccgcctccgcctcctgtctccccgcccgccctcacccctgcacccgcagcgggtgaggagggaccggcgcctctgtctgagacgggggctcccggctgctccggctcccggccccctgagctggagccggagcgcagcctgggccgcttcagaggccgcttcgaggacgaggacgaggagttggaagaagaagaggagctggaggaggaagaagaggaggaggaggaggacatgagtcacttctcgttgaggctggagggaggccggcaggactcggaggacgaggaggagcgcctgattaatctctctgagctgaccccatacatcttgtgttccatttgcaaaggttacttaatagatgcaactaccatcacagaatgtcttcataccttttgtaaaagctgcatcgtaagacatttttactacagcaacagatgtccaaaatgcaatatagtagtacatcagacacaacctctttataacataagctgttccacagccagtcccttcaagcaaaggaagatctaaaaaagtcctagaatcagtgtttcgtattccacctgaacttgatatgtctttattactggagttcattggtgctaatgaaggcacgggacattttaagccattggaaaagaagtttgttcgagtttcaggagaagcaactattggacatgtagaaaaattcctcagaagaaaaatgggtcttgatccagcttgtcaggtagatataatctgtggtgatcacctgttggagcagtatcaaactctaagggaaatccgacgtgcaataggtgatgcagcaatgcaggatggtctgcttgtccttcattatggtcttgtggtttctcctctgaagataacttgaagattctaggcacattatgaggagggaaacaaaggaggcttctgcaggactgcatctcaccaaagatttccatgaaatgtaattgctaccactttgctgttcnagacataacttacctatttttagcaccaagaattatagcgttta

SEQ ID NO: 320598 - DNA, 1131 bp, Homo sapiens
agcgggcgtccgaggccggccgaactcccgcgctctcccgccgcctcgcctcgcctggtgtctctcccgaccatggagggggtcgcggtggtgacggcgggcagcgtaggcgctgccaaaaccgagggagctgcagccttgccgcctccgcctccgcctcctgtctccccgcccgccctcacccctgcacccgcagcgggtgaggagggaccggcgcctctgtctgagacgggggctcccggctgctccggctcccggccccctgagctggagccggagcgcagcctgggccgcttcagaggccgcttcgaggacgaggacgaggagttggaagaagaagaggagctggaggaggaagaagaggaggaggaggaggacatgagtcacttctcgttgaggctggagggaggccggcaggactcggaggacgaggaggagcgcctgattaatctctctgagctgaccccatacatcttgtgttccatttgcaaaggttacttaatagatgcaactaccatcacagaatgtcttcataccttttgtaaaagctgcatcgtaagacatttttactacagcaacagatgtccaaaatgcaatatagtagtacatcagacacaacctctttataacataaggttggaccgacagttacaagacatagtgtacaaattagtgatcaatctagaggaaagagaaaaaaagcaaatgcatgatttctataaagaaagaggtctagaagtacctaaacctgctgttccacagccagtcccttcaagcaaaggaagatctaaaaaagtcctagaatcagtgtttcgtattccacctgaacttgatatgtctttattactggagttcattgggtgagtaccctaaaaatttaccttttaacttaaagaatgttaaaagtcctaataggaaatcattgtgaactcaggtaaaatcaagttttctgacatccccttggaaaattatgaaataactgaatattagaaataattagaaaaagggattacaggcgtgagccaccgtgcccagctttatgatcttaagatagactcttatcctttttgttctatagtttctatgtgtaaagtagattataaaaagaaataacccaagacagacagtatg

SEQ ID NO: 320599 - DNA, 348 bp, Homo sapiens
aacatttttgtttgactattaaatagctgttccacagccagtcccttcaagcaaaggaagatctaaaaaagtcctagaatcagtgtttcgtattccacctgaacttgatatgtctttattactggagttcattgggtgagtaccctaaaaatttaccttttaacttaaagaatgttaaaagtcctaataggaaatcattgtgaactcaggtaaaatcaagttttctgacatccccttggaaaattatgaaataactgaatattagaaataattagaaaaaggtataaagggccgggtgcagtggctcacgcctgtaatcccaacactttgggaggccgaggtgagtgg

SEQ ID NO: 320600 - DNA, 2396 bp, Homo sapiens
agcgggcgtccgaggccggccgaactcccgcgctctcccgccgcctcgcctcgcctggtgtctctcccgaccatggagggggtcgcggtggtgacggcgggcagcgtaggcgctgccaaaaccgagggagctgcagccttgccgcctccgcctccgcctcctgtctccccgcccgccctcacccctgcacccgcagcgggtgaggagggaccggcgcctctgtctgagacgggggctcccggctgctccggctcccggccccctgagctggagccggagcgcagcctgggccgcttcagaggccgcttcgaggacgaggacgaggagttggaagaagaagaggagctggaggaggaagaagaggaggaggaggaggacatgagtcacttctcgttgaggctggagggaggccggcaggactcggaggacgaggaggagcgcctgattaatctctctgagctgaccccatacatcttgtgttccatttgcaaaggttacttaatagatgcaactaccatcacagaatgtcttcataccttttgtaaaagctgcatcgtaagacatttttactacagcaacagatgtccaaaatgcaatatagtagtacatcagacacaacctctttataacataaggttggaccgacagttacaagacatagtgtacaaattagtgatcaatctagaggaaagagaaaaaaagcaaatgcatgatttctataaagaaagaggtctagaagtacctaaacctgctgttccacagccagtcccttcaagcaaaggaagatctaaaaaagtcctagaatcagtgtttcgtattccacctgaacttgatatgtctttattactggagttcattggtgctaatgaaggcacgggacattttaagccattggaaaagaagtttgttcgagtttcaggagaagcaactattggacatgtagaaaaattcctcagaagaaaaatgggtcttgatccagcttgtcaggtagatataatctgtggtgatcacctgttggagcagtatcaaactctaagggaaatccgacgtgcaataggtgatgcagcaatgcaggatggtctgcttgtccttcattatggtcttgtggtttctcctctgaagataacttgaagattctaggcacattatgaggagggaaacaaaggaggcttctgcaggactgcatctcaccaaagatttccatgaaatgtaattgctaccactttgctgttcaagacataacttacctatttttagcaccaagaattatagcgtttataagtacaacttggaacgatggaatgcatctgttactagagactgtatataaaaagcagccaaagctcaggggaaatttttcaaaaattgaattttaaaatttcttatgattttaaataccttgacattgattttgcttcccatctttgaagtaattggttagttttctttgttcagccatttcaagttggtggttgggatatctgctctctgggatggcatcagttgggcagtcatctttttggaagagaagtgtgcttttgagtggaagattcaaagccagtctttgttaaactgcagggtgtactctcaaagaccaaaactattggccacttttgtatgttgccagcatattttgaacttgtacctttttttatactagcaacactacaaaggagaagttactcatttcaaaatggatgaattgttattatgtgtgaagagactctgagtttatgatctgtgccataaaatttcagtgtaataagacttcttcaatacatcttccaataaggggtgcttctttgtgacagtatttttatttctgacattcattttatttgggtacatagtgtggttgttgataccttgcaatagtattgcttctgaaagtaataaaaaattttaggagaatttgagaagtttacagaattacttattcattgttttcttagtaagtcagtttaatgtttatttttctcattatttcatcactgcaataaagaataagggtgtttgagctcacctccatgcaaagacttcagttttaaaacattatttgcctaaaattagcattgtgatgctttctgaaagaaatattttataaatcctgtttaacagcagaatttctgaatgtgtagagactactacaaaattggaaaaagattggcaattctttgtaaagaatttgtgaattgtgtataaatttattctaacatttaataaaaatgtattttaacctaaaaaaaaaaaaaaaaaaaaccagaaaccacacccaaaaaaacacccaaaaagcaaagcaacacccacacctgacagacaaggacaacaaaacgacgcgcgcccggctttaccgcggcgcccccctggccccgtctccccccgcacgagcgcccccc

SEQ ID NO: 320601 - DNA, 2016 bp, Homo sapiens
agcgggcgtccgaggccggccgaactcccgcgctctcccgccgcctcgcctcgcctggtgtctctcccgaccatggagggggtcgcggtggtgacggcgggcagcgtaggcgctgccaaaaccgagggagctgcagccttgccgcctccgcctccgcctcctgtctccccgcccgccctcacccctgcacccgcagcgggtgaggagggaccggcgcctctgtctgagacgggggctcccggctgctccggctcccggccccctgagctggagccggagcgcagcctgggccgcttcagaggccgcttcgaggacgaggacgaggagttggaagaagaagaggagctggaggaggaagaagaggaggaggaggaggacatgagtcacttctcgttgaggctggagggaggccggcaggactcggaggacgaggaggagcgcctgattaatctctctgagctgaccccatacatcttgtgttccatttgcaaaggttacttaatagatgcaactaccatcacagaatgtcttcataccttttgtaaaagctgcatcgtaagacatttttactacagcaacagatgtccaaaatgcaatatagtagtacatcagacacaacctctttataacataaggtgctaatgaaggcacgggacattttaagccattggaaaagaagtttgttcgagtttcaggagaagcaactattggacatgtagaaaaattcctcagaagaaaaatgggtcttgatccagcttgtcaggtagatataatctgtggtgatcacctgttggagcagtatcaaactctaagggaaatccgacgtgcaataggtgatgcagcaatgcaggatggtctgcttgtccttcattatggtcttgtggtttctcctctgaagataacttgaagattctaggcacattatgaggagggaaacaaaggaggcttctgcaggactgcatctcaccaaagatttccatgaaatgtaattgctaccactttgctgttcaagacataacttacctatttttagcaccaagaattatagcgtttataagtacaacttggaacgatggaatgcatctgttactagagactgtatataaaaagcagccaaagctcaggggaaatttttcaaaaattgaattttaaaatttcttatgattttaaataccttgacattgattttgcttcccatctttgaagtaattggttagttttctttgttcagccatttcaagttggtggttgggatatctgctctctgggatggcatcagttgggcagtcatctttttggaagagaagtgtgcttttgagtggaagattcaaagccagtctttgttaaactgcagggtgtactctcaaagaccaaaactattggccacttttgtatgttgccagcatattttgaacttgtacctttttttatactagcaacactacaaaggagaagttactcatttcaaaatggatgaattgttattatgtgtgaagagactctgagtttatgatctgtgccataaaatttcagtgtaataagacttcttcaatacatcttccaataaggggtgcttctttgtgacagtatttttatttctgacattcattttatttgggtacatagtgtggttgttgataccttgcaatagtattgcttctgaaagtaataaaaaattttaggagaatttgagaagtttacagaattacttattcattgttttcttagtaagtcagtttaatgtttatttttctcattatttcatcactgcaataaagaataagggtgtttgagctcacctccatgcaaagacttcagttttaaaacattatttgcctaaaattagcattgtgatgctttctgaaagaaatattttataaatcctgtttaacagcagaatttctgaatgtgtagagactactacaaaattggaaaaagattggcaattctttgtaaagaatttgtgaattgtgtataaatttattctaacatttaataaaaatgtattttaaccta

SEQ ID NO: 320602 - DNA, 996 bp, Homo sapiens
agcgggcgtccgaggccggccgaactcccgcgctctcccgccgcctcgcctcgcctggtgtctctcccgaccatggagggggtcgcggtggtgacggcgggcagcgtaggcgctgccaaaaccgagggagctgcagccttgccgcctccgcctccgcctcctgtctccccgcccgccctcacccctgcacccgcagcgggtgaggagggaccggcgcctctgtctgagacgggggctcccggctgctccggctcccggccccctgagctggagccggagcgcagcctgggccgcttcagaggccgcttcgaggacgaggacgaggagttggaagaagaagaggagctggaggaggaagaagaggaggaggaggaggacatgagtcacttctcgttgaggctggagggaggccggcaggactcggaggacgaggaggagcgcctgattaatctctctgagctgaccccatacatcttgtgttccatttgcaaaggttacttaatagatgcaactaccatcacagaatgtcttcataccttttgtaaaagctgcatcgtaagacatttttactacagcaacagatgtccaaaatgcaatatagtagtacatcagacacaacctctttataacataaggtaagaagaatatataaattacaattgtattttaaatatactttttctgaaagcttgaagttatatagttggaataaattattgacctctcaggatgggttcagtggctaatgccataatcccagcactttgggaggccgaggtgagtggatcacttcagatcaggagttcaagaccaacctggccaacatggtgaaaccccatctccactattagccaggagtggcggcacatgcctgtaatcccagctacttgggaggttgaggcaggagaatcgcttgaacctgggaggcagaggttgcaggagccaagatcgtgccactgtattccagcctgggcgacagactgatgagagtatctc

SEQ ID NO: 320603 - DNA, 1108 bp, Homo sapiens
tgcggccgccgtggccgagctgccggtgctggacgcccgcgggcagcgggtaccgttcggcgcgctgttccgggagcgccgcgccgtggtggtgttcgtgcggcatttcctgtgttacatctgcaaggaatacgtagaggatctggccaaaatccccaggagtttcttacaagaagcaaatgtcacccttatagtgattggacagtcatcctaccatcatattgagcctttttgcaagctgactggatattctcatgaaatctatgtcgatcctgagagagaaatttataaaagattgggaatgaaaagaggtgaagaaattgcttcctcaggacagagcccccacataaaatcaaatctactctcaggaagccttcagagcctgtggcgggcagtgactggccctctctttgattttcaaggagacccagctcagcaaggtggaaccctcattttaggtccaggtaacaacatccattttatacaccgcgataggaataggttggatcacaaacctatcaactctgttttacagcttgtaggagttcagcatgtgaactttacaaacagaccttcagttatccatgtgtgacttaaaatgcactcagtcactttcaactggaccttctggaatgtgaccttcaatgcctgggtgtaatatcctcgtgcagtgtctaacctgctgtcccttcccagcctttgaggagttagggaagcataaagggggcttgaacctgttgaattgcatgctgggaagcatcagttgtcaaaatatgttatatacttccattttataacttttaacattttatacaaaaaaaatgaatatacaaaatataactttaaaagctataaaatcataaatactctaaattattttacattatggtatattcagtcaatgaaagagttttttggcaatataaattctgacagtatataaggggacaggagaacaacacaagaccattatattcagtgaagaaggcaaaatatcaaatctgtcaacaatgtaactgcatttttatatgtatatatttgtatttttgtatgctttggaaaaagacaggaaataaacaccaaaatgttgccagtaggaaaaaaaaaa

SEQ ID NO: 320604 - DNA, 949 bp, Homo sapiens
  misc_feature (70)..(71): n is a, c, g, or t
  misc_feature (98)..(98): n is a, c, g, or t
  misc_feature (100)..(100): n is a, c, g, or t
  misc_feature (104)..(104): n is a, c, g, or t
  misc_feature (108)..(108): n is a, c, g, or t
  misc_feature (116)..(117): n is a, c, g, or t
  misc_feature (155)..(155): n is a, c, g, or t
  misc_feature (937)..(937): n is a, c, g, or t
ctctctcacacgtacttctcttcccgtttgtgtttgtgttgtcatctaaggtcccgcgcttatactactnnttggttgtgttagacataccactgatnangccnaaangttttcgnngccatggataatcacggggaatccagtatttttgccanaagcttctgcagactgtttaggcaactttgatttcacccatatagagcgattttatggcaacagtcaggaatacgtccgggagcagacagcacatggttgagtatagcctcatatagggggccaggtaacaacatccattttatacaccgcgataggaataggttggatcacaaacctatcaactctgttttacagcttgtaggagttcagcatgtgaactttacaaacagaccttcagttatccatgtgtgacttaaaatgcactcagtcactttcaactggaccttctggaatgtgaccttcaatgcctgggtgtaatatcctcgtgcagtgtctaacctgctgtcccttcccagcctttgaggagttagggaagcataaagggggcttgaacctgttgaattgcatgctgggaagcatcagttgtcaaaatatgttatatacttccattttataacttttaacattttatacaaaaaaaatgaatatacaaaatataactttaaaagctataaaatcataaatactctaaattattttacattatggtatattcagtcaatgaaagagttttttggcaatataaattctgacagtatataaggggacaggagaacaacacaagaccattatattcagtgaagaaggcaaaatatcaaatctgtcaacaatgtaactgcatttttatatgtatatatttgtatttttgtatgctttggaaaaagacaggaaataaacacctggcctcgttggcctcagcggtggagctctgcggcagaanccccaaaaaacc

SEQ ID NO: 320605 - DNA, 1133 bp, Homo sapiens
  misc_feature (1121)..(1121): n is a, c, g, or t
tgcggccgccgtggccgagctgccggtgctggacgcccgcgggcagcgggtaccgttcggcgcgctgttccgggagcgccgcgccgtggtggtgttcgtgcggcatttcctgtgttacatctgcaaggaatacgtagaggatctggccaaaatccccaggagtttcttacaagaagcaaatgtcacccttatagtgattggacagtcatcctaccatcatattgagcctttttgcaagctgactggatattctcatgaaatctatgtcgatcctgagagagaaatttataaaagattgggaatgaaaagaggtgaagaaattgcttcctcaggacagagcccccacataaaatcaaatctactctcaggaagccttcagagcctgtggcgggcagtgactggccctctctttgattttcaaggagacccagctcagcaaggtggaaccctcattttaggtccaggtaacaacatccattttatacaccgcgataggaataggttggatcacaaacctatcaactctgttttacagcttgtaggagttcagcatgtgaactttacaaacagaccttcagttatccatgtgtgacttaaaatgcactcagtcactttcaactggaccttctggaatgtgaccttcaatgcctgggtgtaatatcctcgtgcagtgtctaacctgctgtcccttcccagcctttgaggagttagggaagcataaagggggcttgaacctgttgaattgcatgctgggaagcatcagttgtcaaaatatgttatatacttccattttataacttttaacattttatacaaaaaaaatgaatatacaaaatataactttaaaagctataaaatcataaatactctaaattattttacattatggtatattcagtcaatgaaagagttttttggcaatataaattctgacagtatataaggggacaggagaacaacacaagaccattatattcagtgaagaaggcaaaatatcaaatctgtcaacaatgtaactgcatttttatatgtatatatttgtatttttgtatgctttggaaaaagacaggaaataaacacctggcctcgttggcctcagcggtggagctctgcggcagaanccccaaaaaacc

SEQ ID NO: 320606 - DNA, 1229 bp, Homo sapiens
  misc_feature (1217)..(1217): n is a, c, g, or t
gcggccgcttcccaactagggcggggcagggagagggcgagggcgaggcccgcttcccacgcgccgggcgcccgagccgccggtcccggccccgcgggcgtcgcctttgctcgcgtcacgcacggcgaagtacagggatccttcggggcccgagggtgctgctttactaacttgccctttctgccgttttggctttcagcatttcctgtgttacatctgcaaggaatacgtagaggatctggccaaaatccccaggagtttcttacaagaagcaaatgtcacccttatagtgattggacagtcatcctaccatcatattgagcctttttgcaagctgactggatattctcatgaaatctatgtcgatcctgagagagaaatttataaaagattgggaatgaaaagaggtgaagaaattgcttcctcaggacagagcccccacataaaatcaaatctactctcaggaagccttcagagcctgtggcgggcagtgactggccctctctttgattttcaaggagacccagctcagcaaggtggaaccctcattttaggtccaggtaacaacatccattttatacaccgcgataggaataggttggatcacaaacctatcaactctgttttacagcttgtaggagttcagcatgtgaactttacaaacagaccttcagttatccatgtgtgacttaaaatgcactcagtcactttcaactggaccttctggaatgtgaccttcaatgcctgggtgtaatatcctcgtgcagtgtctaacctgctgtcccttcccagcctttgaggagttagggaagcataaagggggcttgaacctgttgaattgcatgctgggaagcatcagttgtcaaaatatgttatatacttccattttataacttttaacattttatacaaaaaaaatgaatatacaaaatataactttaaaagctataaaatcataaatactctaaattattttacattatggtatattcagtcaatgaaagagttttttggcaatataaattctgacagtatataaggggacaggagaacaacacaagaccattatattcagtgaagaaggcaaaatatcaaatctgtcaacaatgtaactgcatttttatatgtatatatttgtatttttgtatgctttggaaaaagacaggaaataaacacctggcctcgttggcctcagcggtggagctctgcggcagaanccccaaaaaacc

SEQ ID NO: 320607 - DNA, 1001 bp, Homo sapiens
  misc_feature (989)..(989): n is a, c, g, or t
tgcggccgccgtggccgagctgccggtgctggacgcccgcgggcagcgggtaccgttcggcgcgctgttccgggagcgccgcgccgtggtggtgttcgtgcggcatttcctgtgttacatctgcaaggaatacgtagaggatctggccaaaatccccaggagtttcttacaagaagcaaatgtcacccttatagtgattggacagtcatcctaccatcatattgagcctttttgcaagctgactggatattctcatgaaatctatgtcgatcctgagagagaaatttataaaagattgggaatgaaaagaggtgaagaaattgcttcctcaggtaacaacatccattttatacaccgcgataggaataggttggatcacaaacctatcaactctgttttacagcttgtaggagttcagcatgtgaactttacaaacagaccttcagttatccatgtgtgacttaaaatgcactcagtcactttcaactggaccttctggaatgtgaccttcaatgcctgggtgtaatatcctcgtgcagtgtctaacctgctgtcccttcccagcctttgaggagttagggaagcataaagggggcttgaacctgttgaattgcatgctgggaagcatcagttgtcaaaatatgttatatacttccattttataacttttaacattttatacaaaaaaaatgaatatacaaaatataactttaaaagctataaaatcataaatactctaaattattttacattatggtatattcagtcaatgaaagagttttttggcaatataaattctgacagtatataaggggacaggagaacaacacaagaccattatattcagtgaagaaggcaaaatatcaaatctgtcaacaatgtaactgcatttttatatgtatatatttgtatttttgtatgctttggaaaaagacaggaaataaacacctggcctcgttggcctcagcggtggagctctgcggcagaanccccaaaaaacc

SEQ ID NO: 320608 - DNA, 733 bp, Homo sapiens
  misc_feature (48)..(48): n is a, c, g, or t
  misc_feature (52)..(53): n is a, c, g, or t
  misc_feature (721)..(721): n is a, c, g, or t
tgttaggtggaggataattacatataagtaatgttttagaaggaagangggnngctttgtttacgtaacaacatccattttatacaccgcgataggaataggttggatcacaaacctatcaactctgttttacagcttgtaggagttcagcatgtgaactttacaaacagaccttcagttatccatgtgtgacttaaaatgcactcagtcactttcaactggaccttctggaatgtgaccttcaatgcctgggtgtaatatcctcgtgcagtgtctaacctgctgtcccttcccagcctttgaggagttagggaagcataaagggggcttgaacctgttgaattgcatgctgggaagcatcagttgtcaaaatatgttatatacttccattttataacttttaacattttatacaaaaaaaatgaatatacaaaatataactttaaaagctataaaatcataaatactctaaattattttacattatggtatattcagtcaatgaaagagttttttggcaatataaattctgacagtatataaggggacaggagaacaacacaagaccattatattcagtgaagaaggcaaaatatcaaatctgtcaacaatgtaactgcatttttatatgtatatatttgtatttttgtatgctttggaaaaagacaggaaataaacacctggcctcgttggcctcagcggtggagctctgcggcagaanccccaaaaaacc

SEQ ID NO: 320609 - DNA, 421 bp, Homo sapiens
tgattttagtaagcagtaaatctgatgaataatactatgcctcagccttttattcttattctcttctagggtaacaacatccattttatacaccgcgataggaataggttggatcacaaacctatcaactctgttttacagcttgtaggagttcagcatgtgaactttacaaacagaccttcagttatccatgtgtgacttaaaatgcactcagtcactttcaactggaccttctggaatgtgaccttcaatgcctgggtgtaatatcctcgtgcagtgtctaacctgctgtcccttcccagcctttgaggagttagggaagcataaagggggcttgaacctgttgaattgcatgctgggaagcatcagttgtcaaaatatgttatatacttccattttataacttttaacattttataca

SEQ ID NO: 320610 - DNA, 1082 bp, Homo sapiens
  misc_feature (1070)..(1070): n is a, c, g, or t
aggccctcggccgccccgcgtcatggccgcgccggccccggtcacgcggcagcatttcctgtgttacatctgcaaggaatacgtagaggatctggccaaaatccccaggagtttcttacaagaagcaaatgtcacccttatagtgattggacagtcatcctaccatcatattgagcctttttgcaagctgactggatattctcatgaaatctatgtcgatcctgagagagaaatttataaaagattgggaatgaaaagaggtgaagaaattgcttcctcaggacagagcccccacataaaatcaaatctactctcaggaagccttcagagcctgtggcgggcagtgactggccctctctttgattttcaaggagacccagctcagcaaggtggaaccctcattttaggtccaggtaacaacatccattttatacaccgcgataggaataggttggatcacaaacctatcaactctgttttacagcttgtaggagttcagcatgtgaactttacaaacagaccttcagttatccatgtgtgacttaaaatgcactcagtcactttcaactggaccttctggaatgtgaccttcaatgcctgggtgtaatatcctcgtgcagtgtctaacctgctgtcccttcccagcctttgaggagttagggaagcataaagggggcttgaacctgttgaattgcatgctgggaagcatcagttgtcaaaatatgttatatacttccattttataacttttaacattttatacaaaaaaaatgaatatacaaaatataactttaaaagctataaaatcataaatactctaaattattttacattatggtatattcagtcaatgaaagagttttttggcaatataaattctgacagtatataaggggacaggagaacaacacaagaccattatattcagtgaagaaggcaaaatatcaaatctgtcaacaatgtaactgcatttttatatgtatatatttgtatttttgtatgctttggaaaaagacaggaaataaacacctggcctcgttggcctcagcggtggagctctgcggcagaanccccaaaaaacc

SEQ ID NO: 320611 - DNA, 619 bp, Homo sapiens
tttctctgttttagagatgggatctcactttgttgtccagactgttctcaaactcttgtgctcaagtaatcctcccaccttaacctcccaaatgctagtattataggcatgagccaccatgcgtggcccttcccaagcttggaacttccttacctgggtcgtagatggactctaggagatctccaaacctcctgaaattgtgtgcaaaatattgtgtctgtatatgcattttctagggatgcggtttaatattttcatgtgattcctaaaagaatctgaggctcaagaaaagagggcatcttaatatcctgcactttcagtcattgagggcatgatcacaaagatcaaagccatttttaggcaggtgagttggagtggcagtcagaagtaggtaagattttctatttgtgaggcaggaacaagggattggaccattgttcttaaatactgctttcttacccaaaatgcaaatctgtgcgtaatcagtacacagcaaaaatatttactgtattttgtttttccccttgggtacatttggcaagtgcctttttctactataaccggcgtttttgtatctctttatttgtatctcaaactcactgggacttacaatcttaaa

SEQ ID NO: 320612 - DNA, 725 bp, Homo sapiens
tccgtgcgcgatcacggcccggcgcgtggctcgggctcgggcggagctggagacgtgtggagctgttcgaggactcgcgggtgtgcagtgcacctatgatatgtgttttagaaatagccgttaaactttggtttgaatgaagaatgtctctcaatccacctatatttctcaaacgaagtgaagaaaatagttcaaaatttgtggaaacaaaacagtcacaaactacttccatagcttcagaagatccccttcaaaacttatgtttagcatctcaagaagttcttcaaaaagctcagcaaagtgggagatcaaaatgtctcaaatgtggtggttccagaatgttctactgctatacatgttatgttccagttgaaaatgtacctattgaacagattccacttgtgaagtttagcctatatcatcttggccagtccatggtctcctcagcatctaaaatcacatgtataggctaatggaaagtttactagccaagaataagtaagtgtggaatttaatatgatcttcacagtttgctccgaaaaaacaagaacttgaggataatactgatgtggtgctcagagaccctagggagagggaaggtagtttcaactgagaccgagcgtcatgaggaaactctgatgtagtgttcagccagaagtagactgatgtaaaatcatttgtgaactgcctacttaaatggtaaattttccataactagaagttgg

SEQ ID NO: 320613 - DNA, 204 bp, Homo sapiens
  misc_feature (28)..(28): n is a, c, g, or t
  misc_feature (30)..(30): n is a, c, g, or t
ggcgcgatggggacggtgtattttaatncncccgggttgttacaagttgagttgaaaacaagaaaaacttgcttttggcgccatcaaaaaggaaagccagatactttcctttctacaattgaagccatttactactttctggtagactaccatactgatatattaaaagagaaatacagaggtggcctcgttggcctcaagggg

SEQ ID NO: 320614 - DNA, 382 bp, Homo sapiens
taagtttcacataaactctctttgggtttgtcctggtgttgcctgaggttcttacagagaaacattttgaggctttaatagtcctgagttattcagatgatgggattcatcctaaaaaatgaaatttgagagttggagtggcagtcagaagtaggtaagattttctatttgtgaggcaggaacaagggattggaccattgttcttaaatactgctttcttacccaaaatgcaaatctgtgcgtaatcagtacacagcaaaaatatttactgtattttgtttttccccttgggtacatttggcaagtgcctttttctactataaccggcgtttttgtatctctttatttgtatctcaaactcactgggacttacaatcttaaa

SEQ ID NO: 320615 - DNA, 1668 bp, Homo sapiens
tccgtgcgcgatcacggcccggcgcgtggctcgggctcgggcggagctggagacgtgtggagctgttcgaggactcgcgggtgtgcagtgcacctatgatatgtgttttagaaatagccgttaaactttggtttgaatgaagaatgtctctcaatccacctatatttctcaaacgaagtgaagaaaatagttcaaaatttgtggaaacaaaacagtcacaaactacttccatagcttcagaagatccccttcaaaacttatgtttagcatctcaagaagttcttcaaaaagctcagcaaagtgggagatcaaaatgtctcaaatgtggtggttccagaatgttctactgctatacatgttatgttccagttgaaaatgtacctattgaacagattccacttgtgaagcttccattgaagattgacatcattaaacatccaaatgaaacagatggcaaaagtactgctatacatgcaaaactcttagcacctgaatttgtaaacatttacacgtatccgtgtattccagaatatgaagaaaaggaccatgaagttgcactcatttttcctggacctcagtctatctcaataaaagatatttcttttcatctgcaaaaaaggattcaaaataatgttagaggcaaaaatgatgaccctgacaagccatcttttaaacgcaaaagaactgaagaacaagagttctgtgattgtgaatgacaggcaagtgcaaaggcacaacactgaaaaaaattatatttatagatagcacctggaaccaaacaaacaaaatattcactgatgagcgacttcaagggttgttacaagttgagttgaaaacaagaaaaacttgcttttggcgccatcaaaaaggaaagccagatactttcctttctacaattgaagccatttactactttctggtagactaccatactgatatattaaaagagaaatacagagggcaatatgacaatcttttatttttctattcttttatgtaccagttgataaagaatgccaaatgctctggagataaggaaacaggaaaacttacacattagtttttaacaagccacttatgtctttttattttgctaacattaataaacttatatttgtgctttgttttttcttgaaaaaaaaaaaaaaaaaaaaaaaaaaaaaaaaaaaaaaaaaaaaaaaaaaaagagagagagagagaagaagagacacgagaagaattcccagagggggcccccagaaggaactaccccctttttcggcgaaggggggccccccaaggggggccccgtataaagcacgaacggggccggcttaaacacacgttgataacggggaacaaacgggggcagcagggagaacctcggggaagaacaacccaaaaacaccccggggagctgagccaataatggggaacaaaacaccccaacaaaatatataagagcgccctaagaggacacctatataacactttcacagagacgttaaaggggcgtggaacaccaagccagagaaatacacgccgcgccgcagcaagaacacattggcgcgcaaccacggggatcatcctactgacgcaaattcttctaccaccggacactagtaacgacaaccccgcgacctacgcaccgagcaaagtacaagcaactagcacaacccaaagacaggg

SEQ ID NO: 320616 - DNA, 1166 bp, Homo sapiens
tccgtgcgcgatcacggcccggcgcgtggctcgggctcgggcggagctggagacgtgtggagctgttcgaggactcgcgggtgtgcagtgcacctatgatatgtgttttagaaatagccgttaaactttggtttgaatgaagaatgtctctcaatccacctatatttctcaaacgaagtgaagaaaatagttcaaaatttgtggaaacaaaacagtcacaaactacttccatagcttcagaagatccccttcaaaacttatgtttagcatctcaagaagttcttcaaaaagctcagcaaagtgggagatcaaaatgtctcaaatgtggtggttccagaatgttctactgctatacatgttatgttccagttgaaaatgtacctattgaacagattccacttgtgaagcttccattgaagattgacatcattaaacatccaaatgaaacagatggcaaaagtactgctatacatgcaaaactcttagcacctgaatttgtaaacatttacacgtatccgtgtattccagaatatgaagaaaaggaccatgaagttgcactcatttttcctggacctcagtctatctcaataaaagatatttcttttcatctgcaaaaaaggattcaaaataatgttagaggcaaaaatgatgaccctgacaagccatcttttaaacgcaaaagaactgaagaacaagagttctgtgattgtgaatgacaggcaagtgcaaaggcacaacactgaaaaaaattatatttatagatagcacctggaaccaaacaaacaaaatattcactgatgagcgacttcaagggttgttacaagttgagttgaaaacaagaaaaacttgcttttggcgccatcaaaaaggaaagccagatactttcctttctacaattgaagccatttactactttctggtagactaccatactgatatattaaaagagaaatacagagggcaatatgacaatcttttatttttctattcttttatgtaccagttgataaagaatgccaaatgctctggagataaggaaacaggaaaacttacacattagtttttaacaagccacttatgtctttttattttgctaacattaataaacttatatttgtgctttgttttttcttaaaaaagtcgacgcggccgcgaatttagtagta

SEQ ID NO: 320617 - DNA, 1452 bp, Homo sapiens
tccgtgcgcgatcacggcccggcgcgtggctcgggctcgggcggagctggagacgtgtggagctgttcgaggactcgcgggtgtgcagtgcacctatgatatgtgttttagaaatagccgttaaactttggtttgaatgaagaatgtctctcaatccacctatatttctcaaacgaagtgaagaaaatagttcaaaatttgtggaaacaaaacagtcacaaactacttccatagcttcagaagatccccttcaaaacttatgtttagcatctcaagaagttcttcaaaaagctcagcaaagtgggagatcaaaatgtctcaaatgtggtggttccagaatgttctactgctatacatgttatgttccagttgaaaatgtacctattgaacagattccacttgtgaagcttccattgaagattgacatcattaaacatccaaatgaaacagatggcaaaagtactgctatacatgcaaaactcttagcacctgaatttgtaaacatttacacgtatccgtgtattccagaatatgaagaaaaggaccatgaagttgcactcatttttcctggacctcagtctatctcaataaaagatatttcttttcatctgcaaaaaaggattcaaaataatgttagaggcaaaaatgatgaccctgacaagccatcttttaaacgcaaaagaactgaagaacaagagttctgtgattgtgaatgacaggcaagtgcaaaggcacaacactgaaaaaaattatatttatagatagcacctggaaccaaacaaacaaaatattcactgatgagcgacttcaaggtaaaaaaaaaatgtttttttggactgctcctccctcagacttattttgaaaaaacttcaaacttacagataatttgaaagaggagttacactgaatacctgtacattttgccatatttactttatttctctctttttattatatatgtgagtgtgtatttatatattatatattttttggttgatcaattgaaagtaagtttcaggctttgtaacacttcacccttaaatattaagtgtacattttcctttttttcctgggtgacagagtgagacctcatctctaaataaacaaaaaagtcagtttgtcaaggaaatgaaacccttctgaaaattggtgaatgcagtcctgtcagagatttagatttttgaagatgctgatacatagaagattggaagacatgaatatcttaaatgttaactacttttaattcattggtctaagactcagtgttaactgtcatgtataagattttattatttgttttatgttgcttctgtatataccttgaggtgtttaagaaaatatcttgtttcaaactgggattgaaggaagttatctgcagtctttaaaaaaaaattcttagaataattaagagaaatcattattattgtaccaagcctgtggttaagaagaaat

SEQ ID NO: 320618 - DNA, 2694 bp, Homo sapiens
tccgtgcgcgatcacggcccggcgcgtggctcgggctcgggcggagctggagacgtgtggagctgttcgaggactcgcgggtgtgcaggtctgagtaccactccgatccctggtggaggtccccgcgcctctctggagaccagtggtctggccccagagtgcacctatgatatgtgttttagaaatagccgttaaactttggtttgaatgaagaatgtctctcaatccacctatatttctcaaacgaagtgaagaaaatagttcaaaatttgtggaaacaaaacagtcacaaactacttccatagcttcagaagatccccttcaaaacttatgtttagcatctcaagaagttcttcaaaaagctcagcaaagtgggagatcaaaatgtctcaaatgtggtggttccagaatgttctactgctatacatgttatgttccagttgaaaatgtacctattgaacagattccacttgtgaagcttccattgaagattgacatcattaaacatccaaatgaaacagatggcaaaagtactgctatacatgcaaaactcttagcacctgaatttgtaaacatttacacgtatccgtgtattccagaatatgaagaaaaggaccatgaagttgcactcatttttcctggacctcagtctatctcaataaaagatatttcttttcatctgcaaaaaaggattcaaaataatgttagaggcaaaaatgatgaccctgacaagccatcttttaaacgcaaaagaactgaagaacaagagttctgtgattgtgaatgacaggcaagtgcaaaggcacaacactgaaaaaaattatatttatagatagcacctggaaccaaacaaacaaaatattcactgatgagcgacttcaagggttgttacaagttgagttgaaaacaagaaaaacttgcttttggcgccatcaaaaaggaaagccagatactttcctttctacaattgaagccatttactactttctggtagactaccatactgatatattaaaagagaaatacagagggcaatatgacaatcttttatttttctattcttttatgtaccagttgataaagaatgccaaatgctctggagataaggaaacaggaaaacttacacattagtttttaacaagccacttatgtctttttattttgctaacattaataaacttatatttgtgctttgttttttcttaagaaataatcatatataatgcctgtaagaccatttgaaaaaattccagtttcatatatatcacttcatatttcttgaaggaaattgtatctgggggaatttttcagagatactgttgattgaaaaacttacttcagaagttatttgctcagtgaaacctcagtttcattactacattttaatatagtgtgttatgtctctgtgattagatataacatattccattagatctaattagctatttatttcaacatctttatatcttttcacctgtactcatgaccacctttagaagtaaatggggttacaatctgctggctgaaaaataggtcataagtgatttttcttgaggttagtagcaaacataggcagaactagaattagaattccggtatctagggctgtttctttaagtcctaaggttgttaaaagcagagactctggagctagactacctgaatctaaatctcagcctttctgcttatcagccatgtcattttcttccatttgtacaaagcaggcaatactgagcaactaccttataggaataactgagttaatatctaaggggctttcagcagtacctgaaatatagtaagtgttacatatatgtttactctttttattttatttggaattgtgaactgataataattgaagcctacctgctagtggccatctctgctgccaggtgaaaagagcctgacttagaatgaagtcagcgaaggaaagcagagtggagagaaaaagagagactgagtcctgatgacatcatttatttacctagacctagctgcttgtgaatagagccctactgtgctgaatagcttctgtctgctcttttctattctgctccctgctctgtgaggtaggttcctttgctctcttgcttttggttgggttcaacaaatgggaagcaccagtgggagattagaagttgagaggaaaatgaaatgatgttatttatttccctggctcctttcctgccatgtcatcatcagttggctgtgttcctctactaaatagtaccttatcaggaatcctatctcttctgttcccaagcagttaccccagttacctcactaggtttagttcctgctccctccctttaccccttttcacttagggttggtaatagcttacagttattactagccccagtatagttcactacaacttgttgctttacctaaaccctgctcatacatttgtaaatactgtagttgttttattacactcttctcaaatgtccccacttgaaatagccttctatttcttttggggactctgataaattcacctgtttgggtgaaataatagcacatttcctgaagtatatacagtgggacacatgatgttttatgggggaaagagttcttggtgaaattagtttgctgtacattacgttgtttccctcccagggattcagaaggcaaaacatattaaaggttctgaaaagtcctgaaataaacattttgaactttatttaa

SEQ ID NO: 320619 - DNA, 2474 bp, Homo sapiens
ctcctagagtatccccactatcgctaagaaacccaaaatagttcaaaatttgtggaaacaaaacagtcacaaactacttccatagcttcagaagatccccttcaaaacttatgtttagcatctcaagaagttcttcaaaaagctcagcaaagtgggagatcaaaatgtctcaaatgtggtggttccagaatgttctactgctatacatgttatgttccagttgaaaatgtacctattgaacagattccacttgtgaagcttccattgaagattgacatcattaaacatccaaatgaaacagatggcaaaagtactgctatacatgcaaaactcttagcacctgaatttgtaaacatttacacgtatccgtgtattccagaatatgaagaaaaggaccatgaagttgcactcatttttcctggacctcagtctatctcaataaaagatatttcttttcatctgcaaaaaaggattcaaaataatgttagaggcaaaaatgatgaccctgacaagccatcttttaaacgcaaaagaactgaagaacaagagttctgtgattgtgaatgacaggcaagtgcaaaggcacaacactgaaaaaaattatatttatagatagcacctggaaccaaacaaacaaaatattcactgatgagcgacttcaagggttgttacaagttgagttgaaaacaagaaaaacttgcttttggcgccatcaaaaaggaaagccagatactttcctttctacaattgaagccatttactactttctggtagactaccatactgatatattaaaagagaaatacagagggcaatatgacaatcttttatttttctattcttttatgtaccagttgataaagaatgccaaatgctctggagataaggaaacaggaaaacttacacattagtttttaacaagccacttatgtctttttattttgctaacattaataaacttatatttgtgctttgttttttcttaagaaataatcatatataatgcctgtaagaccatttgaaaaaattccagtttcatatatatcacttcatatttcttgaaggaaattgtatctgggggaatttttcagagatactgttgattgaaaaacttacttcagaagttatttgctcagtgaaacctcagtttcattactacattttaatatagtgtgttatgtctctgtgattagatataacatattccattagatctaattagctatttatttcaacatctttatatcttttcacctgtactcatgaccacctttagaagtaaatggggttacaatctgctggctgaaaaataggtcataagtgatttttcttgaggttagtagcaaacataggcagaactagaattagaattccggtatctagggctgtttctttaagtcctaaggttgttaaaagcagagactctggagctagactacctgaatctaaatctcagcctttctgcttatcagccatgtcattttcttccatttgtacaaagcaggcaatactgagcaactaccttataggaataactgagttaatatctaaggggctttcagcagtacctgaaatatagtaagtgttacatatatgtttactctttttattttatttggaattgtgaactgataataattgaagcctacctgctagtggccatctctgctgccaggtgaaaagagcctgacttagaatgaagtcagcgaaggaaagcagagtggagagaaaaagagagactgagtcctgatgacatcatttatttacctagacctagctgcttgtgaatagagccctactgtgctgaatagcttctgtctgctcttttctattctgctccctgctctgtgaggtaggttcctttgctctcttgcttttggttgggttcaacaaatgggaagcaccagtgggagattagaagttgagaggaaaatgaaatgatgttatttatttccctggctcctttcctgccatgtcatcatcagttggctgtgttcctctactaaatagtaccttatcaggaatcctatctcttctgttcccaagcagttaccccagttacctcactaggtttagttcctgctccctccctttaccccttttcacttagggttggtaatagcttacagttattactagccccagtatagttcactacaacttgttgctttacctaaaccctgctcatacatttgtaaatactgtagttgttttattacactcttctcaaatgtccccacttgaaatagccttctatttcttttggggactctgataaattcacctgtttgggtgaaataatagcacatttcctgaagtatatacagtgggacacatgatgttttatgggggaaagagttcttggtgaaattagtttgctgtacattacgttgtttccctcccagggattcagaaggcaaaacatattaaaggttctgaaaagtcctgaaataaacattttgaactttatttaa

SEQ ID NO: 320620 - DNA, 3122 bp, Homo sapiens
agacagttttgtgatataaagattacacctcttaggtctattgttactattttttaattgataattatttaatttgtgctattgaaaatgtgatgccgaaaatcatgatgtttcctgcaaaggataacagttttgacttgaaagtatgtctaaggaacagaatttcaacttgaattttagatctgaagctttttgcccaaacttacatttctttttaaaatagcgtaagaggccaggtgtggtggctcactggtaatctcagcactttgggaggctgaggcaggcagatcgcttgaggtcaggagttcaagaccaacctggccaacatggtgaaaacctgtctctactaaaaaaatacaacaattagctgggcatggtggcaggtgcctgtaatgccagctacttgggaggctggggcagaattgcttaacccaggagacggaggttgcagtgagccgagatcacaccactgcactgcagcctgggtggcagagtgagagtccatctcaagataaataaataaaaataaaataaaatggcataaaataggcaaacctaaagtttataggatttattaaaatgtccttggcacacatggtgaaatgcaaagaattggagttaatataacttaagtgaaaatgacattggagctttgctttaagagaagattctctgttaaatgagttgaaaatagttgtcctaatacatgaataacaatgccaaggaagaaatttgggttggttttgtaacaatcaccattcttaatattatggtatatcttttaaaccatatgcatatttataggagtttattgtgagcttcctatttagctttaaagaccctttttattaacataaaaattaaaatgtttatatatttttttatttgtgctttttttacctttagcttccattgaagattgacatcattaaacatccaaatgaaacagatggcaaaagtactgctatacatgcaaaactcttagcacctgaatttgtaaacatttacacgtatccgtgtattccagaatatgaagaaaaggaccatgaagttgcactcatttttcctggacctcagtctatctcaataaaagatatttcttttcatctgcaaaaaaggattcaaaataatgttagaggcaaaaatgatgaccctgacaagccatcttttaaacgcaaaagaactgaagaacaagagttctgtgattgtgaatgacaggcaagtgcaaaggcacaacactgaaaaaaattatatttatagatagcacctggaaccaaacaaacaaaatattcactgatgagcgacttcaagggttgttacaagttgagttgaaaacaagaaaaacttgcttttggcgccatcaaaaaggaaagccagatactttcctttctacaattgaagccatttactactttctggtagactaccatactgatatattaaaagagaaatacagagggcaatatgacaatcttttatttttctattcttttatgtaccagttgataaagaatgccaaatgctctggagataaggaaacaggaaaacttacacattagtttttaacaagccacttatgtctttttattttgctaacattaataaacttatatttgtgctttgttttttcttaagaaataatcatatataatgcctgtaagaccatttgaaaaaattccagtttcatatatatcacttcatatttcttgaaggaaattgtatctgggggaatttttcagagatactgttgattgaaaaacttacttcagaagttatttgctcagtgaaacctcagtttcattactacattttaatatagtgtgttatgtctctgtgattagatataacatattccattagatctaattagctatttatttcaacatctttatatcttttcacctgtactcatgaccacctttagaagtaaatggggttacaatctgctggctgaaaaataggtcataagtgatttttcttgaggttagtagcaaacataggcagaactagaattagaattccggtatctagggctgtttctttaagtcctaaggttgttaaaagcagagactctggagctagactacctgaatctaaatctcagcctttctgcttatcagccatgtcattttcttccatttgtacaaagcaggcaatactgagcaactaccttataggaataactgagttaatatctaaggggctttcagcagtacctgaaatatagtaagtgttacatatatgtttactctttttattttatttggaattgtgaactgataataattgaagcctacctgctagtggccatctctgctgccaggtgaaaagagcctgacttagaatgaagtcagcgaaggaaagcagagtggagagaaaaagagagactgagtcctgatgacatcatttatttacctagacctagctgcttgtgaatagagccctactgtgctgaatagcttctgtctgctcttttctattctgctccctgctctgtgaggtaggttcctttgctctcttgcttttggttgggttcaacaaatgggaagcaccagtgggagattagaagttgagaggaaaatgaaatgatgttatttatttccctggctcctttcctgccatgtcatcatcagttggctgtgttcctctactaaatagtaccttatcaggaatcctatctcttctgttcccaagcagttaccccagttacctcactaggtttagttcctgctccctccctttaccccttttcacttagggttggtaatagcttacagttattactagccccagtatagttcactacaacttgttgctttacctaaaccctgctcatacatttgtaaatactgtagttgttttattacactcttctcaaatgtccccacttgaaatagccttctatttcttttggggactctgataaattcacctgtttgggtgaaataatagcacatttcctgaagtatatacagtgggacacatgatgttttatgggggaaagagttcttggtgaaattagtttgctgtacattacgttgtttccctcccagggattcagaaggcaaaacatattaaaggttctgaaaagtcctgaaataaacattttgaactttatttaa

SEQ ID NO: 320621 - DNA, 887 bp, Homo sapiens
tccgtgcgcgatcacggcccggcgcgtggctcgggctcgggcggagctggagacgtgtggagctgttcgaggactcgcgggtgtgcagtgcacctatgatatgtgttttagaaatagccgttaaactttggtttgaatgaagaatgtctctcaatccacctatatttctcaaacgaagtgaagaaaatagttcaaaatttgtggaaacaaaacagtcacaaactacttccatagcttcagaagatccccttcaaaacttatgtttagcatctcaagaagttcttcaaaaagctcagcaaagtgggagatcaaaatgtctcaaatgtggtggttccagaatgttctactgctatacatgttatgttccagttgaaaatgtacctattgaacagattccacttgtgaagcttccattgaagattgacatcattaaacatccaaatgaaacagatggcaaaagtactgctatacatgcaaaactcttagcacctgaatttgtaaacatttacacgtatccgtgtattccagaatatgaagaaaaggaccatgaagttgcactcatttttcctggacctcagtctatctcaataaaagatatttcttttcatctgcaaaaaaggattcaaaataatgttagaggcaaaaatgatgaccctgacaagccatcttttaaacgcaaaagaactgaagaacaagagttctgtgattgtgaatgacaggcaagtgcaaaggcacaacactgaaaatttttttgattggctggacaaaacaaaaaaaaaaaaaaaattgggggggcccgaaaatttaaactttggggggccagaagaaggaggcaagaaagggaggtgttcacaaaaagggggggtgaaggtgtgttgatacgcgaa

SEQ ID NO: 320622 - DNA, 871 bp, Homo sapiens
  misc_feature (686)..(686): n is a, c, g, or t
  misc_feature (695)..(695): n is a, c, g, or t
  misc_feature (697)..(698): n is a, c, g, or t
  misc_feature (703)..(703): n is a, c, g, or t
  misc_feature (709)..(709): n is a, c, g, or t
  misc_feature (728)..(730): n is a, c, g, or t
  misc_feature (736)..(736): n is a, c, g, or t
  misc_feature (751)..(751): n is a, c, g, or t
tccgtgcgcgatcacggcccggcgcgtggctcgggctcgggcggagctggagacgtgtggagctgttcgaggactcgcgggtgtgcagggatgcggtttaatattttcatgtgattcctaaaagaatctgaggctcaagaaaagagggcatcttaatatcctgcactttcagtcattgagggcatgatcacaaagatcaaagccatttttaggcaggttgcacctatgatatgtgttttagaaatagccgttaaactttggtttgaatgaagaatgtctctcaatccacctatatttctcaaacgaagtgaagaaaatagttcaaaatttgtggaaacaaaacagtcacaaactacttccatagcttcagaagatccccttcaaaacttatgtttagcatctcaagaagttcttcaaaaagctcagcaaagtgggagatcaaaatgtctcaaatgtggtggttccagaatgttctactgctatacatgttatgttccagttgaaaatgtacctattgaacagattccacttgtgaagcttccattgaagattgacatcattaaacatccaaatgaaacagatggcaaaagtactgctatacatgcaaaactcttagcacctgaatttgtaaacatttacacgtatccgtgtattccagaatatgaagaaaaggaccatgaagttgnatcattttncnnggacncagtanctcataaagaatttttcannngcaaangggtccatatggtgnggaaatgtacctggagccatttaagcagaattgaaaagtcgggttgtgatagacgggggccctgaaattttgaggcggcccaaaattggggccgggcgttggaaaactggcaaacacttg

SEQ ID NO: 320623 - DNA, 2623 bp, Homo sapiens
tccgtgcgcgatcacggcccggcgcgtggctcgggctcgggcggagctggagacgtgtggagctgttcgaggactcgcgggtgtgcagtgcacctatgatatgtgttttagaaatagccgttaaactttggtttgaatgaagaatgtctctcaatccacctatatttctcaaacgaagtgaagaaaatagttcaaaatttgtggaaacaaaacagtcacaaactacttccatagcttcagaagatccccttcaaaacttatgtttagcatctcaagaagttcttcaaaaagctcagcaaagtgggagatcaaaatgtctcaaatgtggtggttccagaatgttctactgctatacatgttatgttccagttgaaaatgtacctattgaacagattccacttgtgaagcttccattgaagattgacatcattaaacatccaaatgaaacagatggcaaaagtactgctatacatgcaaaactcttagcacctgaatttgtaaacatttacacgtatccgtgtattccagaatatgaagaaaaggaccatgaagttgcactcatttttcctggacctcagtctatctcaataaaagatatttcttttcatctgcaaaaaaggattcaaaataatgttagaggcaaaaatgatgaccctgacaagccatcttttaaacgcaaaagaactgaagaacaagagttctgtgattgtgaatgacaggcaagtgcaaaggcacaacactgaaaaaaattatatttatagatagcacctggaaccaaacaaacaaaatattcactgatgagcgacttcaagggttgttacaagttgagttgaaaacaagaaaaacttgcttttggcgccatcaaaaaggaaagccagatactttcctttctacaattgaagccatttactactttctggtagactaccatactgatatattaaaagagaaatacagagggcaatatgacaatcttttatttttctattcttttatgtaccagttgataaagaatgccaaatgctctggagataaggaaacaggaaaacttacacattagtttttaacaagccacttatgtctttttattttgctaacattaataaacttatatttgtgctttgttttttcttaagaaataatcatatataatgcctgtaagaccatttgaaaaaattccagtttcatatatatcacttcatatttcttgaaggaaattgtatctgggggaatttttcagagatactgttgattgaaaaacttacttcagaagttatttgctcagtgaaacctcagtttcattactacattttaatatagtgtgttatgtctctgtgattagatataacatattccattagatctaattagctatttatttcaacatctttatatcttttcacctgtactcatgaccacctttagaagtaaatggggttacaatctgctggctgaaaaataggtcataagtgatttttcttgaggttagtagcaaacataggcagaactagaattagaattccggtatctagggctgtttctttaagtcctaaggttgttaaaagcagagactctggagctagactacctgaatctaaatctcagcctttctgcttatcagccatgtcattttcttccatttgtacaaagcaggcaatactgagcaactaccttataggaataactgagttaatatctaaggggctttcagcagtacctgaaatatagtaagtgttacatatatgtttactctttttattttatttggaattgtgaactgataataattgaagcctacctgctagtggccatctctgctgccaggtgaaaagagcctgacttagaatgaagtcagcgaaggaaagcagagtggagagaaaaagagagactgagtcctgatgacatcatttatttacctagacctagctgcttgtgaatagagccctactgtgctgaatagcttctgtctgctcttttctattctgctccctgctctgtgaggtaggttcctttgctctcttgcttttggttgggttcaacaaatgggaagcaccagtgggagattagaagttgagaggaaaatgaaatgatgttatttatttccctggctcctttcctgccatgtcatcatcagttggctgtgttcctctactaaatagtaccttatcaggaatcctatctcttctgttcccaagcagttaccccagttacctcactaggtttagttcctgctccctccctttaccccttttcacttagggttggtaatagcttacagttattactagccccagtatagttcactacaacttgttgctttacctaaaccctgctcatacatttgtaaatactgtagttgttttattacactcttctcaaatgtccccacttgaaatagccttctatttcttttggggactctgataaattcacctgtttgggtgaaataatagcacatttcctgaagtatatacagtgggacacatgatgttttatgggggaaagagttcttggtgaaattagtttgctgtacattacgttgtttccctcccagggattcagaaggcaaaacatattaaaggttctgaaaagtcctgaaataaacattttgaactttatttaa

SEQ ID NO: 320624 - DNA, 982 bp, Homo sapiens
tccgtgcgcgatcacggcccggcgcgtggctcgggctcgggcggagctggagacgtgtggagctgttcgaggactcgcgggtgtgcagtgcacctatgatatgtgttttagaaatagccgttaaactttggtttgaatgaagaatgtctctcaatccacctatatttctcaaacgaagtgaagaaaatagttcaaaatttgtggaaacaaaacagtcacaaactacttccatagcttcagaagatccccttcaaaacttatgtttagcatctcaagaagttcttcaaaaagctcagcaaagtgggagatcaaaatgtctcaaatgtggtggttccagaatgttctactgctatacatgttatgttccagttgaaaatgtacctattgaacagattccacttgtgaagcttccattgaagattgacatcattaaacatccaaatgaaacagatggcaaaagtactgctatacatgcaaaactcttagcacctgaatttgtaaacatttacacgtatccgtgtattccagaatatgaagaaaaggaccatgaagttgcactcatttttcctggacctcagtctatctcaataaaagatatttcttttcatctgcaaaaaaggattcaaaataatgttagaggcaaaaatgatgaccctgacaagccatcttttaaacgcaaaagaactgaagaacaagagttctgtgattgtgaatgacaggcaagtgcaaaggcacaacactgaaaaaaattatatttatagatagcacctggaaccaaacaaacaaaatattcactgatgagcgacttcaagggttgttacaagttgagttgaaaacaagaaaaacttgcttttggcgccatcaaaaaggaaagccagatactttcctttctacaattgaagccatttactactttctggtagactaccatactgatatattaaaagagaaatacagaggtggcctcgttggcctcaagggg

SEQ ID NO: 320625 - DNA, 2681 bp, Homo sapiens
tccgtgcgcgatcacggcccggcgcgtggctcgggctcgggcggagctggagacgtgtggagctgttcgaggactcgcgggtgtgcagtgcacctatgatatgtgttttagaaatagccgttaaactttggtttgaatgaagaatgtctctcaatccacctatatttctcaaacgaagtgaagaaaatagttcaaaatttgtggaaacaaaacagtcacaaactacttccatagcttcagaagatccccttcaaaacttatgtttagcatctcaagaagttcttcaaaaagctcagcaaagtgggagatcaaaatgtctcaaatgtggtggttccagaatgttctactgctatacatgttatgttccagttgaaaatgtacctattgaacagattccacttgtgaagatgggaccatcaagttgcaggaaaaccagctcagggatcctgctgattttacattatgcttccattgaagattgacatcattaaacatccaaatgaaacagatggcaaaagtactgctatacatgcaaaactcttagcacctgaatttgtaaacatttacacgtatccgtgtattccagaatatgaagaaaaggaccatgaagttgcactcatttttcctggacctcagtctatctcaataaaagatatttcttttcatctgcaaaaaaggattcaaaataatgttagaggcaaaaatgatgaccctgacaagccatcttttaaacgcaaaagaactgaagaacaagagttctgtgattgtgaatgacaggcaagtgcaaaggcacaacactgaaaaaaattatatttatagatagcacctggaaccaaacaaacaaaatattcactgatgagcgacttcaagggttgttacaagttgagttgaaaacaagaaaaacttgcttttggcgccatcaaaaaggaaagccagatactttcctttctacaattgaagccatttactactttctggtagactaccatactgatatattaaaagagaaatacagagggcaatatgacaatcttttatttttctattcttttatgtaccagttgataaagaatgccaaatgctctggagataaggaaacaggaaaacttacacattagtttttaacaagccacttatgtctttttattttgctaacattaataaacttatatttgtgctttgttttttcttaagaaataatcatatataatgcctgtaagaccatttgaaaaaattccagtttcatatatatcacttcatatttcttgaaggaaattgtatctgggggaatttttcagagatactgttgattgaaaaacttacttcagaagttatttgctcagtgaaacctcagtttcattactacattttaatatagtgtgttatgtctctgtgattagatataacatattccattagatctaattagctatttatttcaacatctttatatcttttcacctgtactcatgaccacctttagaagtaaatggggttacaatctgctggctgaaaaataggtcataagtgatttttcttgaggttagtagcaaacataggcagaactagaattagaattccggtatctagggctgtttctttaagtcctaaggttgttaaaagcagagactctggagctagactacctgaatctaaatctcagcctttctgcttatcagccatgtcattttcttccatttgtacaaagcaggcaatactgagcaactaccttataggaataactgagttaatatctaaggggctttcagcagtacctgaaatatagtaagtgttacatatatgtttactctttttattttatttggaattgtgaactgataataattgaagcctacctgctagtggccatctctgctgccaggtgaaaagagcctgacttagaatgaagtcagcgaaggaaagcagagtggagagaaaaagagagactgagtcctgatgacatcatttatttacctagacctagctgcttgtgaatagagccctactgtgctgaatagcttctgtctgctcttttctattctgctccctgctctgtgaggtaggttcctttgctctcttgcttttggttgggttcaacaaatgggaagcaccagtgggagattagaagttgagaggaaaatgaaatgatgttatttatttccctggctcctttcctgccatgtcatcatcagttggctgtgttcctctactaaatagtaccttatcaggaatcctatctcttctgttcccaagcagttaccccagttacctcactaggtttagttcctgctccctccctttaccccttttcacttagggttggtaatagcttacagttattactagccccagtatagttcactacaacttgttgctttacctaaaccctgctcatacatttgtaaatactgtagttgttttattacactcttctcaaatgtccccacttgaaatagccttctatttcttttggggactctgataaattcacctgtttgggtgaaataatagcacatttcctgaagtatatacagtgggacacatgatgttttatgggggaaagagttcttggtgaaattagtttgctgtacattacgttgtttccctcccagggattcagaaggcaaaacatattaaaggttctgaaaagtcctgaaataaacattttgaactttatttaa

SEQ ID NO: 320626 - DNA, 2753 bp, Homo sapiens
tccgtgcgcgatcacggcccggcgcgtggctcgggctcgggcggagctggagacgtgtggagctgttcgaggactcgcgggtgtgcagggatgcggtttaatattttcatgtgattcctaaaagaatctgaggctcaagaaaagagggcatcttaatatcctgcactttcagtcattgagggcatgatcacaaagatcaaagccatttttaggcaggttgcacctatgatatgtgttttagaaatagccgttaaactttggtttgaatgaagaatgtctctcaatccacctatatttctcaaacgaagtgaagaaaatagttcaaaatttgtggaaacaaaacagtcacaaactacttccatagcttcagaagatccccttcaaaacttatgtttagcatctcaagaagttcttcaaaaagctcagcaaagtgggagatcaaaatgtctcaaatgtggtggttccagaatgttctactgctatacatgttatgttccagttgaaaatgtacctattgaacagattccacttgtgaagcttccattgaagattgacatcattaaacatccaaatgaaacagatggcaaaagtactgctatacatgcaaaactcttagcacctgaatttgtaaacatttacacgtatccgtgtattccagaatatgaagaaaaggaccatgaagttgcactcatttttcctggacctcagtctatctcaataaaagatatttcttttcatctgcaaaaaaggattcaaaataatgttagaggcaaaaatgatgaccctgacaagccatcttttaaacgcaaaagaactgaagaacaagagttctgtgattgtgaatgacaggcaagtgcaaaggcacaacactgaaaaaaattatatttatagatagcacctggaaccaaacaaacaaaatattcactgatgagcgacttcaagggttgttacaagttgagttgaaaacaagaaaaacttgcttttggcgccatcaaaaaggaaagccagatactttcctttctacaattgaagccatttactactttctggtagactaccatactgatatattaaaagagaaatacagagggcaatatgacaatcttttatttttctattcttttatgtaccagttgataaagaatgccaaatgctctggagataaggaaacaggaaaacttacacattagtttttaacaagccacttatgtctttttattttgctaacattaataaacttatatttgtgctttgttttttcttaagaaataatcatatataatgcctgtaagaccatttgaaaaaattccagtttcatatatatcacttcatatttcttgaaggaaattgtatctgggggaatttttcagagatactgttgattgaaaaacttacttcagaagttatttgctcagtgaaacctcagtttcattactacattttaatatagtgtgttatgtctctgtgattagatataacatattccattagatctaattagctatttatttcaacatctttatatcttttcacctgtactcatgaccacctttagaagtaaatggggttacaatctgctggctgaaaaataggtcataagtgatttttcttgaggttagtagcaaacataggcagaactagaattagaattccggtatctagggctgtttctttaagtcctaaggttgttaaaagcagagactctggagctagactacctgaatctaaatctcagcctttctgcttatcagccatgtcattttcttccatttgtacaaagcaggcaatactgagcaactaccttataggaataactgagttaatatctaaggggctttcagcagtacctgaaatatagtaagtgttacatatatgtttactctttttattttatttggaattgtgaactgataataattgaagcctacctgctagtggccatctctgctgccaggtgaaaagagcctgacttagaatgaagtcagcgaaggaaagcagagtggagagaaaaagagagactgagtcctgatgacatcatttatttacctagacctagctgcttgtgaatagagccctactgtgctgaatagcttctgtctgctcttttctattctgctccctgctctgtgaggtaggttcctttgctctcttgcttttggttgggttcaacaaatgggaagcaccagtgggagattagaagttgagaggaaaatgaaatgatgttatttatttccctggctcctttcctgccatgtcatcatcagttggctgtgttcctctactaaatagtaccttatcaggaatcctatctcttctgttcccaagcagttaccccagttacctcactaggtttagttcctgctccctccctttaccccttttcacttagggttggtaatagcttacagttattactagccccagtatagttcactacaacttgttgctttacctaaaccctgctcatacatttgtaaatactgtagttgttttattacactcttctcaaatgtccccacttgaaatagccttctatttcttttggggactctgataaattcacctgtttgggtgaaataatagcacatttcctgaagtatatacagtgggacacatgatgttttatgggggaaagagttcttggtgaaattagtttgctgtacattacgttgtttccctcccagggattcagaaggcaaaacatattaaaggttctgaaaagtcctgaaataaacattttgaactttatttaa

SEQ ID NO: 320627 - DNA, 963 bp, Homo sapiens
gacaaagccaggtgagggctggaagcgggctagggggatcaagctgcctccctcccttgtgtgccaggggtggtccccagaaggagctgatctgaacaggccggagagtaggaccggccgtcacacccccacacctccagcctcggccccactccttgggctcttaaggtcctgcctcaagaaccacttcctgagtcttagtgtatgtgtgtacacaaagaatgaaagaagtctctagagctaaaggaaggagatccgggctgggctgagaagcatcttccaggatcacggccttcccgcgggacacaccaagcccattccggatcttgctcttcctgaccatggctggcaggctgtggaggaggagcggagagcagaagaaaggagtattcatcaggttccttattgtgctgccactagatgccaggcatgtgctaggcttgggggctgcaaggagaggaagacagcggccctgccctctgctagcaggcagaaccgagttctggccacactgtgaagaaaggcagaagcctgcggtggcagctggttaagctcagagggagggaaagggagaggagaatggatttcacggagcagaaggatgtgctcaaggtgaccttggagaataaaggggagagctccagggacagagaagcagtcgactgtggaaaaaaaaggagcattttgtaaagtacatggcaggttggggttggctggctcaaagggcttgggacggatgtggtgagatgggctgaaggtggtctgaagatcaagattgagagactagatacataacaaccaactgcaatgtttggtccttcattgaatggttgaacaaaccagctgtgaaagacattttgggacatacagacatggactgagaattagacataagaaaattattttgttaactgttatcatggttaacaaaacggtcatataatatgattatgtagagaagtt

SEQ ID NO: 320628 - DNA, 474 bp, Homo sapiens
atggagagaggctgccccacaacagagatgacgatttaatagctgtgtttgagtctctttagggttgttagccagaaggtggagaaacagctgtttgccactccactgaagattgaatgagtagaaataggttcaccctgacatgtgagatgactgtcattatccctaacaacaacaatgacagcaataataacagctaatactattgagtctttataatgttattaattatttttacgtattttgctctcccaataaccatatgagagcagtattactattatctgtgttttgtagctgaggaagcctgctcagagcttaccactgatcagtggagaatttgggattcagactggcagtgagctgaccagtgtctgctcttgcctatcattttccactgggattgccactggaggcatttgggagcctgaaatgccttccctggaaggtggagaaatctccttccacaacctc

SEQ ID NO: 320629 - DNA, 417 bp, Homo sapiens
acccaacagtaacaaatttattttgcgttgtgatcccaaatgagcatgcacattggaaaccgaagcatcactttctcttacgatgtgcaagtctctctcatcttttgcatttttttcattttattctattttgttctttttttcaaaactgacgttgtgactcactaaattaatatcaatgatgggtcaccaccgggtgggtcccagagtttgacctaacaccaggtgatgagtctgtgtcatgtaggagccgagacagggtgacaggccaggactggggaagtggacgtttgctcagggaagactcccttctcctggtgcagtgaccttcatcacagcccttcccttctttcttctcagaattgattttaccctctccatgcagctaaactatgaaattcaggtgtgtgggtcaat

SEQ ID NO: 320630 - DNA, 3128 bp, Homo sapiens
agtcccatggggaatgtcaacaggcaggggcagcactgcagagatttcatcatggtctcccaggccctcaggctcctctgccttctgcttgggcttcagggctgcctggctgcaggcggggtcgctaaggcctcaggaggagaaacacgggacatgccgtggaagccggggcctcacagagtcttcgtaacccaggaggaagcccacggcgtcctgcaccggcgccggcgcgccaacgcgttcctggaggagctgcggccgggctccctggagagggagtgcaaggaggagcagtgctccttcgaggaggcccgggagatcttcaaggacgcggagaggacgaagctgttctggatttcttacagtgatggggaccagtgtgcctcaagtccatgccagaatgggggctcctgcaaggaccagctccagtcctatatctgcttctgcctccctgccttcgagggccggaactgtgagacgcacaaggatgaccagctgatctgtgtgaacgagaacggcggctgtgagcagtactgcagtgaccacacgggcaccaagcgctcctgtcggtgccacgaggggtactctctgctggcagacggggtgtcctgcacacccacagttgaatatccatgtggaaaaatacctattctagaaaaaagaaatgccagcaaaccccaaggccgaattgtggggggcaaggtgtgccccaaaggggagtgtccatggcaggtcctgttgttggtgaatggagctcagttgtgtggggggaccctgatcaacaccatctgggtggtctccgcggcccactgtttcgacaaaatcaagaactggaggaacctgatcgcggtgctgggcgagcacgacctcagcgagcacgacggggatgagcagagccggcgggtggcgcaggtcatcatccccagcacgtacgtcccgggcaccaccaaccacgacatcgcgctgctccgcctgcaccagcccgtggtcctcactgaccatgtggtgcccctctgcctgcccgaacggacgttctctgagaggacgctggccttcgtgcgcttctcattggtcagcggctggggccagctgctggaccgtggcgccacggccctggagctcatggtgctcaacgtgccccggctgatgacccaggactgcctgcagcagtcacggaaggtgggagactccccaaatatcacggagtacatgttctgtgccggctactcggatggcagcaaggactcctgcaagggggacagtggaggcccacatgccacccactaccggggcacgtggtacctgacgggcatcgtcagctggggccagggctgcgcaaccgtgggccactttggggtgtacaccagggtctcccagtacatcgagtggctgcaaaagctcatgcgctcagagccacgcccaggagtcctcctgcgagccccatttccctagcccagcagccctggcctgtggagagaaagccaaggctgcgtcgaactgtcctggcaccaaatcccatatattcttctgcagttaatggggtagaggagggcatgggagggagggagaggtggggagggagacagagacagaaacagagagagacagagacagagagagactgagggagagactctgaggacatggagagagactcaaagagactccaagattcaaagagactaatagagacacagagatggaatagaaaagatgagaggcagaggcagacaggcgctggacagaggggcaggggagtgccaaggttgtcctggaggcagacagcccagctgagcctccttacctcccttcagccaagccccacctgcacgtgatctgctggccctcaggctgctgctctgccttcattgctggagacagtagaggcatgaacacacatggatgcacacacacacacgccaatgcacacacacagagatatgcacacacacggatgcacacacagatggtcacacagagatacgcaaacacaccgatgcacacgcacatagagatatgcacacacagatgcacacacagatatacacatggatgcacgcacatgccaatgcacgcacacatcagtgcacacggatgcacagagatatgcacacaccgatgtgcgcacacacagatatgcacacacatggatgagcacacacacaccaagtgcgcacacacaccgatgtacacacacagatgcacacacagatgcacacacaccgatgctgactccatgtgtgctgtcctctgaaggcggttgtttagctctcacttttctggttcttatccattatcatcttcacttcagacaattcagaagcatcaccatgcatggtggcgaatgcccccaaactctcccccaaatgtatttctcccttcgctgggtgccgggctgcacagactattccccacctgcttcccagcttcacaataaacggctgcgtctcctccgcacacctgtggtgcctgccacccactgggttgcccatgattcatttttggagcccccggtgctcatcctctgagatgctcttttctttcacaattttcaacatcactgaaatgaaccctcacatggaagctattttttaaaaacaaaagctgtttgatagatgtttgaggctgtagctcccaggatcctgtggaattggatgttctctccctgccacagcccttgtcaatgatatttcacagagaccctgggagcacctgctcaagagtcagggacacacgcatcactaaatgcaagttcccaggccctggctgcagtgggaggacctggcaagctgcactcttgctgagtccccagggtggtggaagaagaatgagaaacacatgaacagagaaatggggaggtgacaaacagtgcccccactcagactccggcaagcacggctcagagagtggactcgatgccatccctgcagggccgtcctgggcaccactggcactcacagcagcaaggtgggcaccattggcactcacagcagcaaggcaggcaccagcaacccacctcgggggcactcaggcatcatctacttcagagcagacagggtctatgaactacagccgtgggctgcttccaaggcaccctgctcttgtaaataaagttttatgggaacaca

SEQ ID NO: 320631 - DNA, 2737 bp, Homo sapiens
cttctgtgttgtttaagcaagatgtatctgtactgatgtctcagtgaatcagtctgtttattaagcacttatcagggcttccacacacttatttattttgccctagttaatcctgttgtttgctgccattggcatgaaatggccaactgtggctgttacagttctttcattcaattataacttgtaaaccagtgactcctaatctttttcaagttaagacaccttaccattgcttatttggttttatgagacttgttcctttttttctccctaaggaaaaagaaagctttatgacatatttatttttttaataaaactaagcaaaaataaaaaaaaaaaactgagactagttctctcctcgtgccgaattcggcacgaggtcctgttgttggtgaatggagctcagttgtgtggggggaccctgatcaacaccatctgggtggtctccgcggcccactgtttcgagcgagcacgacctcagcgagcacgacggggatgagcagagccggcgggtggcgcaggtcatcatccccagcacgtacgtcccgggcaccaccaaccacgacatcgcgctgctccgcctgcaccagcccgtggtcctcactgaccatgtggtgcccctctgcctgcccgaacggacgttctctgagaggacgctggccttcgtgcgcttctcattggtcagcggctggggccagctgctggaccgtggcgccacggccctggagctcatggtgctcaacgtgccccggctgatgacccaggactgcctgcagcagtcacggaaggtgggagactccccaaatatcacggagtacatgttctgtgccggctactcggatggcagcaaggactcctgcaagggggacagtggaggcccacatgccacccactaccggggcacgtggtacctgacgggcatcgtcagctggggccagggctgcgcaaccgtgggccactttggggtgtacaccagggtctcccagtacatcgagtggctgcaaaagctcatgcgctcagagccacgcccaggagtcctcctgcgagccccatttccctagcccagcagccctggcctgtggagagaaagccaaggctgcgtcgaactgtcctggcaccaaatcccatatattcttctgcagttaatggggtagaggagggcatgggagggagggagaggtggggagggagacagagacagaaacagagagagacagagacagagagagactgagggagagactctgaggacatggagagagactcaaagagactccaagattcaaagagactaatagagacacagagatggaatagaaaagatgagaggcagaggcagacaggcgctggacagaggggcaggggagtgccaaggttgtcctggaggcagacagcccagctgagcctccttacctcccttcagccaagccccacctgcacgtgatctgctggccctcaggctgctgctctgccttcattgctggagacagtagaggcatgaacacacatggatgcacacacacacacgccaatgcacacacacagagatatgcacacacacggatgcacacacagatggtcacacagagatacgcaaacacaccgatgcacacgcacatagagatatgcacacacagatgcacacacagatatacacatggatgcacgcacatgccaatgcacgcacacatcagtgcacacggatgcacagagatatgcacacaccgatgtgcgcacacacagatatgcacacacatggatgagcacacacacaccaagtgcgcacacacaccgatgtacacacacagatgcacacacagatgcacacacaccgatgctgactccatgtgtgctgtcctctgaaggcggttgtttagctctcacttttctggttcttatccattatcatcttcacttcagacaattcagaagcatcaccatgcatggtggcgaatgcccccaaactctcccccaaatgtatttctcccttcgctgggtgccgggctgcacagactattccccacctgcttcccagcttcacaataaacggctgcgtctcctccgcacacctgtggtgcctgccacccactgggttgcccatgattcatttttggagcccccggtgctcatcctctgagatgctcttttctttcacaattttcaacatcactgaaatgaaccctcacatggaagctattttttaaaaacaaaagctgtttgatagatgtttgaggctgtagctcccaggatcctgtggaattggatgttctctccctgccacagcccttgtcaatgatatttcacagagaccctgggagcacctgctcaagagtcagggacacacgcatcactaaatgcaagttcccaggccctggctgcagtgggaggacctggcaagctgcactcttgctgagtccccagggtggtggaagaagaatgagaaacacatgaacagagaaatggggaggtgacaaacagtgcccccactcagactccggcaagcacggctcagagagtggactcgatgccatccctgcagggccgtcctgggcaccactggcactcacagcagcaaggtgggcaccattggcactcacagcagcaaggcaggcaccagcaacccacctcgggggcactcaggcatcatctacttcagagcagacagggtctatgaactacagccgtgggctgcttccaaggcaccctgctcttgtaaataaagttttatgggaacaca

SEQ ID NO: 320632 - DNA, 305 bp, Homo sapiens
attggatcaaagctatgtgaagatcctgtgaggtgaacagtgaaatctcacagcgacatttgtattcttgggccgtgcccaagagcacgtctcggctagagaggggcacagcctcccagagccaggtctgagcagctttgcctgggagggatctgcaaagaccccaggatttcagaaagaaattgtgcaatgccagaggttccttggcatgcccgggagggcgagtcatcagagaaacaatgacagcaatgtgacttccacacctcctgtccccccgcccaggtcctgttgttggtgaatggagc

SEQ ID NO: 320633 - DNA, 3062 bp, Homo sapiens
agtcccatggggaatgtcaacaggcaggggcagcactgcagagatttcatcatggtctcccaggccctcaggctcctctgccttctgcttgggcttcagggctgcctggctgcagtcttcgtaacccaggaggaagcccacggcgtcctgcaccggcgccggcgcgccaacgcgttcctggaggagctgcggccgggctccctggagagggagtgcaaggaggagcagtgctccttcgaggaggcccgggagatcttcaaggacgcggagaggacgaagctgttctggatttcttacagtgatggggaccagtgtgcctcaagtccatgccagaatgggggctcctgcaaggaccagctccagtcctatatctgcttctgcctccctgccttcgagggccggaactgtgagacgcacaaggatgaccagctgatctgtgtgaacgagaacggcggctgtgagcagtactgcagtgaccacacgggcaccaagcgctcctgtcggtgccacgaggggtactctctgctggcagacggggtgtcctgcacacccacagttgaatatccatgtggaaaaatacctattctagaaaaaagaaatgccagcaaaccccaaggccgaattgtggggggcaaggtgtgccccaaaggggagtgtccatggcaggtcctgttgttggtgaatggagctcagttgtgtggggggaccctgatcaacaccatctgggtggtctccgcggcccactgtttcgacaaaatcaagaactggaggaacctgatcgcggtgctgggcgagcacgacctcagcgagcacgacggggatgagcagagccggcgggtggcgcaggtcatcatccccagcacgtacgtcccgggcaccaccaaccacgacatcgcgctgctccgcctgcaccagcccgtggtcctcactgaccatgtggtgcccctctgcctgcccgaacggacgttctctgagaggacgctggccttcgtgcgcttctcattggtcagcggctggggccagctgctggaccgtggcgccacggccctggagctcatggtgctcaacgtgccccggctgatgacccaggactgcctgcagcagtcacggaaggtgggagactccccaaatatcacggagtacatgttctgtgccggctactcggatggcagcaaggactcctgcaagggggacagtggaggcccacatgccacccactaccggggcacgtggtacctgacgggcatcgtcagctggggccagggctgcgcaaccgtgggccactttggggtgtacaccagggtctcccagtacatcgagtggctgcaaaagctcatgcgctcagagccacgcccaggagtcctcctgcgagccccatttccctagcccagcagccctggcctgtggagagaaagccaaggctgcgtcgaactgtcctggcaccaaatcccatatattcttctgcagttaatggggtagaggagggcatgggagggagggagaggtggggagggagacagagacagaaacagagagagacagagacagagagagactgagggagagactctgaggacatggagagagactcaaagagactccaagattcaaagagactaatagagacacagagatggaatagaaaagatgagaggcagaggcagacaggcgctggacagaggggcaggggagtgccaaggttgtcctggaggcagacagcccagctgagcctccttacctcccttcagccaagccccacctgcacgtgatctgctggccctcaggctgctgctctgccttcattgctggagacagtagaggcatgaacacacatggatgcacacacacacacgccaatgcacacacacagagatatgcacacacacggatgcacacacagatggtcacacagagatacgcaaacacaccgatgcacacgcacatagagatatgcacacacagatgcacacacagatatacacatggatgcacgcacatgccaatgcacgcacacatcagtgcacacggatgcacagagatatgcacacaccgatgtgcgcacacacagatatgcacacacatggatgagcacacacacaccaagtgcgcacacacaccgatgtacacacacagatgcacacacagatgcacacacaccgatgctgactccatgtgtgctgtcctctgaaggcggttgtttagctctcacttttctggttcttatccattatcatcttcacttcagacaattcagaagcatcaccatgcatggtggcgaatgcccccaaactctcccccaaatgtatttctcccttcgctgggtgccgggctgcacagactattccccacctgcttcccagcttcacaataaacggctgcgtctcctccgcacacctgtggtgcctgccacccactgggttgcccatgattcatttttggagcccccggtgctcatcctctgagatgctcttttctttcacaattttcaacatcactgaaatgaaccctcacatggaagctattttttaaaaacaaaagctgtttgatagatgtttgaggctgtagctcccaggatcctgtggaattggatgttctctccctgccacagcccttgtcaatgatatttcacagagaccctgggagcacctgctcaagagtcagggacacacgcatcactaaatgcaagttcccaggccctggctgcagtgggaggacctggcaagctgcactcttgctgagtccccagggtggtggaagaagaatgagaaacacatgaacagagaaatggggaggtgacaaacagtgcccccactcagactccggcaagcacggctcagagagtggactcgatgccatccctgcagggccgtcctgggcaccactggcactcacagcagcaaggtgggcaccattggcactcacagcagcaaggcaggcaccagcaacccacctcgggggcactcaggcatcatctacttcagagcagacagggtctatgaactacagccgtgggctgcttccaaggcaccctgctcttgtaaataaagttttatgggaacaca

SEQ ID NO: 320634 - DNA, 3196 bp, Homo sapiens
ccggggccgcgccgccttctcctcgccggcatcgacccgcagcctcacgtttacgcggcggcgcccgcagcccccttcggcccggcttccgcgcgtgcccccgagcgcgccctcgggatcagcccccggaagcagagaggccaggccgggaaggatgggcgacgggggtggctgacccgggagcacggcagggaggacacccagccaggcccgcgagcagcgccgctcccctcctccaggacgggcgggaacctgcgatgcccccgccgcgtgggccgtggggcggtctccgaggcactgggcggggcacgcggtgggcgcttcacggaactcgcatttcccagtcttcgtaacccaggaggaagcccacggcgtcctgcaccggcgccggcgcgccaacgcgttcctggaggagctgcggccgggctccctggagagggagtgcaaggaggagcagtgctccttcgaggaggcccgggagatcttcaaggacgcggagaggacgggtgagtggatgatcaccaccagtcctgcctgcaacccttctcagcttactgacaccagcccactccacagatggggaccagtgtgcctcaagtccatgccagaatgggggctcctgcaaggaccagctccagtcctatatctgcttctgcctccctgccttcgagggccggaactgtgagacgcttgaatatccatgtggaaaaatacctattctagaaaaaagaaatgccagcaaaccccaaggccgaattgtggggggcaaggtgtgccccaaaggggagtgtccatggcaggtcctgttgttggtgaatggagctcagttgtgtggggggaccctgatcaacaccatctgggtggtctccgcggcccactgtttcgacaaaatcaagaactggaggaacctgatcgcggtgctgggcgagcacgacctcagcgagcacgacggggatgagcagagccggcgggtggcgcaggtcatcatccccagcacgtacgtcccgggcaccaccaaccacgacatcgcgctgctccgcctgcaccagcccgtggtcctcactgaccatgtggtgcccctctgcctgcccgaacggacgttctctgagaggacgctggccttcgtgcgcttctcattggtcagcggctggggccagctgctggaccgtggcgccacggccctggagctcatggtgctcaacgtgccccggctgatgacccaggactgcctgcagcagtcacggaaggtgggagactccccaaatatcacggagtacatgttctgtgccggctactcggatggcagcaaggactcctgcaagggggacagtggaggcccacatgccacccactaccggggcacgtggtacctgacgggcatcgtcagctggggccagggctgcgcaaccgtgggccactttggggtgtacaccagggtctcccagtacatcgagtggctgcaaaagctcatgcgctcagagccacgcccaggagtcctcctgcgagccccatttccctagcccagcagccctggcctgtggagagaaagccaaggctgcgtcgaactgtcctggcaccaaatcccatatattcttctgcagttaatggggtagaggagggcatgggagggagggagaggtggggagggagacagagacagaaacagagagagacagagacagagagagactgagggagagactctgaggacatggagagagactcaaagagactccaagattcaaagagactaatagagacacagagatggaatagaaaagatgagaggcagaggcagacaggcgctggacagaggggcaggggagtgccaaggttgtcctggaggcagacagcccagctgagcctccttacctcccttcagccaagccccacctgcacgtgatctgctggccctcaggctgctgctctgccttcattgctggagacagtagaggcatgaacacacatggatgcacacacacacacgccaatgcacacacacagagatatgcacacacacggatgcacacacagatggtcacacagagatacgcaaacacaccgatgcacacgcacatagagatatgcacacacagatgcacacacagatatacacatggatgcacgcacatgccaatgcacgcacacatcagtgcacacggatgcacagagatatgcacacaccgatgtgcgcacacacagatatgcacacacatggatgagcacacacacaccaagtgcgcacacacaccgatgtacacacacagatgcacacacagatgcacacacaccgatgctgactccatgtgtgctgtcctctgaaggcggttgtttagctctcacttttctggttcttatccattatcatcttcacttcagacaattcagaagcatcaccatgcatggtggcgaatgcccccaaactctcccccaaatgtatttctcccttcgctgggtgccgggctgcacagactattccccacctgcttcccagcttcacaataaacggctgcgtctcctccgcacacctgtggtgcctgccacccactgggttgcccatgattcatttttggagcccccggtgctcatcctctgagatgctcttttctttcacaattttcaacatcactgaaatgaaccctcacatggaagctattttttaaaaacaaaagctgtttgatagatgtttgaggctgtagctcccaggatcctgtggaattggatgttctctccctgccacagcccttgtcaatgatatttcacagagaccctgggagcacctgctcaagagtcagggacacacgcatcactaaatgcaagttcccaggccctggctgcagtgggaggacctggcaagctgcactcttgctgagtccccagggtggtggaagaagaatgagaaacacatgaacagagaaatggggaggtgacaaacagtgcccccactcagactccggcaagcacggctcagagagtggactcgatgccatccctgcagggccgtcctgggcaccactggcactcacagcagcaaggtgggcaccattggcactcacagcagcaaggcaggcaccagcaacccacctcgggggcactcaggcatcatctacttcagagcagacagggtctatgaactacagccgtgggctgcttccaaggcaccctgctcttgtaaataaagttttatgggaacaca

SEQ ID NO: 320635 - DNA, 590 bp, Homo sapiens
gtgaagagaaccaggaagctaaactttaaaatggagaatcaaagaataagagagctgaacatactgacatactgattctttgaagagaaacttggggttcactatatttaacaggatcaaagacactcctagaatatgcagagaaatggaaaacttcagaagatcctttacctttattggaggtatacacagtggctatccaaagttatgttaaagcccgaccttatcttacctctgaatgtgaaaatgtagccttggttctggaacgcttggcattaagctgtgttgaacttttactgtgtctgcctgttgagttatcagataaacagtgggaacaatttcagacactggtgcaggtagctcatgaaaagctgatggagaatggcagctgtgaattgcattttttagctactctagctcaagagactggggtgtggaaaaacccggtactgtgcactattctttcccaggaaccattggataaggataaaggattccatccaggataccacattacatttagtcgtcatgtcttcttaggctcctcttggctgtgacagtttttcagactttccttgtttttgatgacc

SEQ ID NO: 320636 - DNA, 8476 bp, Homo sapiens
  misc_feature (1443)..(1443): n is a, c, g, or t
aacagttaagagagaggggatttatatctgctcggtttaggaattggcaagcctacatgcagtattgtgtgttgtgtgacaaagaattccttggtcacagaatagtacgacatgctcagaaacattacaaagatggaatttatagttgccccatatgtgcaaagaactttaattctaaagaaacttttgtccctcatgtcacactgcatgttaaacaatctagtaaagagagactagcagctatgaaaccattaagaagattgggaaggcctccaaagatcacaactaccaatgaaaatcagaagactaatactgtggctaaacaggagcagcgacctataaaaaagaatagtctctattcaacagattttatagtgtttaatgacaatgatggttcagatgatgagaatgatgacaaagataaatcctatgagccagaagtgattccagtccagaaaccagtacctgttaatgaatttaattgccctgtaactttttgtaaaaagggctttaagtactttaaaaatttaattgctcatgtgaaggggcataaagataatgaagacgccaagcgctttcttgaaatgcagagcaaaaaagttatttgccagtactgtaggcggcattttgtgagtgttactcatctcaatgatcacttacagatgcactgtggcagtaaaccatatatctgtatacagatgaaatgtaaagctggttttaatagttacgccgagcttttaacccaccgaaaggagcatcaagtctttagagcaaaatgtatgtttcctaaatgtggaagaattttttcggaagcttatttactatatgatcatgaagcacaacattataatacgtacacttgtaagttcacaggttgtggtaaagtttatcgttctcagggtgagctggaaaagcatctggatgatcacagtactcctcctgaaaaagtgctgcctcctgaagcccaacttaattcatctggagattccattcagccttctgaagtgaatcagaacacagcagagaatattgagaaagaaagatctatgcttccttcagaaaataacattgaaaacagcttactagcagatagaagtgatgcttgggataaaagcaaagcagaatcagctgtgaccaaacaagaccagatttctgcctctgagctcaggcaagctaatggaccattgtcaaatggtttggaaaaccctgctactactcctctacttcaatccagtgaagtagctgtgtccattaaggtgtctctcaatcaggggattgaggataactttggaaagcaagaaaactcaactgtggaaggcagtggtgaagcactggtcacagacttacatacgccagttgaagatacttgtaatgatttgtgtcatccaggtttccaggagagaaaagaacaagattgctttaatgatgcccatgttactcagnattctttagtaaattcagaaactctcaaaataggtgaccttaccccacaaaacttagaaagacaagtgaacaacttgatgaccttttctgtgcaaaatcaggcagcatttcaaaacaatttaccaacttccaaatttgaatgtggagataatgttaaaacatcatccaatctttataatttacctcttaagacattagaaagtattgcatttgttccaccgcagtccgacctaagtaattcattaggaactccatcagtgcctccaaaagctccagttcagaaattcagctgccaggtcgagggatgtactcgaacctataattcttcacagagtattgggaaacacatgaagacagcacaccctgaccaatatgctgcatttaaaatgcagcgcaaaagtaaaaaaggtcagaaagctaacaacttttgtttattttttgccatcaccggtgaacagctcaaatccattttttacatcacagaccaaagccaatgggaatcctgcttgttcggcccagttgcagcatgtctcgccacccatttttccagctcatttagcaagtgtgtcaactccattgttgtcctcaatggaaagtgtcataaatccaaatataacttctcaggataaaaatgaacaaggtggtatgttatgttcccaaatggaaaatttacctagtactgccttgccagcacaaatggaagatctaaccaaaacagttctgcctttgaatattgacagtggctcagatcctttccttcctttacctgcagaaagtagttcaatgtctctcttcccttcaccagcagatagtgggactaattctgttttttcccaactggaaaataatacaaatcattattcctcacagattgaaggaaacactaattcctcctttctaaaggggggtaatggtgaaaatgcagtttttccttcacaagtgaatgttgcaaataacttcagtagcaccaatgcccaacagtctgcacctgaaaaagttaaaaaagaccgtgggcggggcccaaatgggaaggaaagaaaacctaagcacaacaaaagggctaaatggcctgcaattatcagagatgggaaatttatctgtagcaggtgttacagggcttttactaatcccagatcactgggtgggcacttatccaagcgatcttactgtaaaccactggatggagccgaaattgctcaagaacttctacagagtaatggacagccttctcttcttgccagcatgattctctccacaaatgcagtaaatttgcagcagccacaacaatctaccttcaatccagaagcatgttttaaagatccatcatttctacagcttcttgctgaaaatcgctcgccagcatttttaccaaatacatttcctcgatctggtgtgactaactttaataccagtgtcagtcaagaaggtagtgaaattattaaacaggctttggaaactgctggcattcccagtacatttgagggtgccgaaatgctttctcatgtttcaacaggttgtgtctctgatgcatcacaagtaaatgcaacggtgatgccaaatccaactgtaccacccctgttgcacactgtatgccatccaaacaccttgctgaccaaccagaataggacgtcaaactccaaaacttcctccattgaggaatgtagcagcttgcctgtttttccaacgaatgacttactactgaagactgttgaaaatggtttgtgctctagttcatttcctaattctggtgggccatcacaaaattttaccagtaacagttctcgtgtttctgttataagtggtcctcagaacacaagatccagtcatttaaataaaaagggaaacagtgcttctaagagaagaaagaaagttgctcctccactaattgcacctaacgcttcccaaaacttggtaacaagtgacttaacaacaatgggactcatagcaaagagtgttgaaatcccaactactaaccttcattcaaatgtaattccaacttgtgaacctcagagtttggtggaaaatctaacacagaaattaaataatgttaacaatcagttatttatgactgatgtaaaagagaatttcaaaaccagtcttgagtcccatacagtgttagcccctttaacattaaaaactgaaaatggtgattcccaaatgatggctttgaattcatgcacaacttcaataaattctgatttgcagatttctgaagacaatgttatacaaaactttgaaaagactcttgaaattattaaaactgctatgaattctcaaatacttgaggtaaaaagtggatctcagggtgctggtgaaacttcacaaaatgctcaaataaattataacattcagcttccttcagtaaacactgtgcaaaataacaaattacccgattcttctccgttttcctcctttataagtgtcatgccaacaaaaagtaacattcctcagtctgaagtatcacataaggaggatcaaatacaggaaattttagaaggcttacagaaattaaaattagaaaatgacctatccactccagcatcccaatgtgtactgataaatacatcagtgacactgactcccacgcctgttaaatcaactgcagatatcacagttattcagccagtttctgaaatgataaacattcaatttaatgacaaagttaataaaccctttgtgtgtcaaaaccaaggctgtaactacagtgctatgacaaaggatgcactatttaagcactatggtaaaattcatcaatacactccagaaatgattcttgaaattaagaagaatcaattgaaatttgctccctttaaatgtgtagtacctacatgtacaaaaacatttacaagaaattctaacctccgggcacactgtcagttggtgcatcattttacaactgaagaaatggtaaagttaaaaattaaaaggccttatggaagaaaatctcagagtgaaaatgtgccggcctcacgaagtacacaagtgaaaaaacagctagctatgacagaggaaaataaaaaggaatctcagcctgctttagaattgagagcagagacccaaaatacccacagtaatgtagcagtgatcccagaaaaacaacttgtagaaaaaaaaagtcctgacaaaacagaaagttctttacaagtgattacagttacttcagaacaatgtaatacaaatgcactcacaaacacacaaaccaaaggacggaagattaggaggcataaaaaagaaaaggaggagaaaaaacgaaagaagccagtttcccaatcccttgagtttccaacaagatacagtccttacagaccttatcgatgtgttcaccagggatgctttgctgcctttacgatacagcaaaatttgattctccattaccaggctgtacacaaatcagatctacctgcattttcagcagaggtcgaagaggaaagtgaagctggtaaagaaagtgaagaaactgaaactaaacaaactttgaaagaatttcgatgtcaggtaagtgactgttctcgaattttccaagcaattactggcctaatacaacactacatgaaacttcatgaaatgactcctgaagaaattgaaagtatgactgcttcagtggatgttgggaagtttccatgtgaccagttagagtgtaaatcttcatttactacatatttgaactatgttgttcatctagaggcagaccacgggattggactaagggcaagtaaaacagaagaagatggtgtatacaaatgtgattgtgaaggctgtgaccgtatatatgcaacccggtcgaatctcctccgacacatttttaataagcataatgacaaacataaggctcatttgattcgtccaagaagattaacaccaggccaggaaaatatgtcaagcaaggcaaaccaagaaaaatcaaagtctaaacatcgggggaccaagcacagcagatgtggaaaggaaggaataaaaatgcccaagaccaaacgaaagaaaaaaaataatttagaaaacaagaatgcaaagattgtgcagattgaagaaaataagccttattctctgaaacgtgggaagcatgtatattctataaaggctagaaatgatgccctgtctgagtgtacaagcagatttgtaacccagtatccatgtatgataaagggatgtacttcagttgttacaagtgaaagcaatataattagacattataagtgccataaattatctaaggcatttacatcacaacaccgaaatcttcttattgtattcaaacggtgttgcaactcacaagtaaaggaaacgtctgagcaagaaggtgctaagaatgatgtgaaagattctgacacgtgtgtatcagagagcaatgataattcaagaacaacagctacagtttcacaaaaggaagttgaaaaaaatgaaaaagatgaaatggatgaactaacagaattgtttattacaaaattaataaatgaagatagcacaagtgtagagacccaagctaatacttcttcaaatgtaagtaatgattttcaggaagataacctctgccagtcagaaagacaaaaagcaagtaatttgaagagagttaataaggaaaaaaatgtctcacaaaataaaaaaaggaaagttgaaaaagctgaaccagcatcagcagctgagttaagtagcgtgcgtaaagaagaagaaactgctgttgccattcaaaccattgaggagcatcctgcatcttttgactggagctcttttaagccaatgggatttgaagtatcatttctgaagtttcttgaggagtctgcagtgaagcagaagaaaaatactgacaaagaccatccgaatactggaaacaaaaaaggatcccattcaaattcaagaaaaaatattgataagactgctgtgactagtggaaatcatgtatgtccttgtaaagaaagcgaaacgtttgtacagtttgccaatccatcacagcttcagtgcagtgataatgtaaaaattgttttagacaagaatcttaaagattgcactgagcttgtcttaaagcaacttcaggaaatgaaacctaccgtcagtctgaaaaaacttgaagtacattcaaatgatccagatatgtctgttatgaaagatatcagtataggtaaagccacaggcagaggtcagtactgataattaatgtagtataaatacatcatttaccattttattttaaataggaagccatcaagcatgctagaattgtgaaactttcattatatttttttgttgttgacatgaattaacctggccaaaaacaaaaaagaaaaaaaaaacatgacatttgtcatgtaaaacttttttttatccctatgggacttgaggaacagaatcagtacttcagttattgtaaatagtgagctaaacctcaaatttctatcacccagttgcccttttcatgaactaaacaattatctgtgtgattggtatgtttcaccaggtcactgctcatgtataacagtactctttatttgtagataccttttttgtatatatttattattgtaaatcatgtgctgccaccagcagtctgtaagtctaaactattaaatgacacatttatatttggaattttaatttttaactaagcgatcaagttttttaaattgttcttttattgttttaaattaagaactttttgaactaaaaccagaaactctgccatagttcattgatttttacatgaaacatttatttacaagatgatatcaagattacttttcacaaaataggcacattatatcaacactttgctctgctttgtaaatttgccatccaggattttggggtggtattcatgtgaaattaaagcagattctctagcagtttcctatagctacagtttttttttttcattgcttctaattggatatagttactatgagtccatgaaatacaatggaaatgtgaataaagaatttactacattgaagattttaaacatttggtattaaaaaaaaatcctttgtgaatgtgatagaaaactagtagtgtggagcagtgtaaatatttgaggtggtgatttgtgaagtagcccagtattgccttaaataaaatcacatttcatttcttgttttatacatgtgatcttataaagattttttgttttgttttgttttccattttctgagatttatagattggtgtatagctttaaactgtataaagttttgtggaaagatttttttaaacatttttataaatcttaaaattgatatcatcaaagtgagcccatcttgtgtttataaaatacaagagtccttaacatttataattacatagataaaacactttctataaggaagttggatgttttgattttactgtttatagatgttagattgtacagatttgtctgtatttctcaccatatctaatgatacttttttcattagattggtcttcaagaacagtattagttataattattttggttattcagtatatagttagctcttacagtttagctttattcaccatatttatactgtggattcacagcgagaggtagaggttattccaggagagttgatgaccttcatttaaagtccaactaaaatcagtagtagaaacataagaaaacatctttgcaatatttacttttgtttctgtttgccgtaaatagtaacattgtttttttttattttgtgtttgttataaaacagttgcattcacaatattattggcctgagatattgatgatattgtgatggtatgaaaatgtgtacattccctgtgcaacatcagatttgcaggaaaaatgaagcacttactgaaatcgctggtactctgaataaataagcatggtcaaggagtgaactattttcttttggaaatttctttttaatttttattattaaagtattttatttttagggccttttgggttttattgaatagttcatttcacctgtttaagacttactaccaataagcataaaacctgacacgttaaaatccctgccctttggtgagcccactgttatttattaaaataaaagttattttatgggtgattaaaaca

SEQ ID NO: 320637 - DNA, 6841 bp, Homo sapiens
gactagaggatccccaccggcaggtgtactggaactccatcagtgcctccaaaagctccagttcagaaattcagctgccaggtcgagggatgtactcgaacctataattcttcacagagtattgggaaacacatgaagacagcacaccctgaccaatatgctgcatttaaaatgcagcgcaaaagtaaaaaaggtcagaaagctaacaacttaaatacaccaaataatggaaagtttgtttattttttgccatcaccggtgaacagctcaaatccattttttacatcacagaccaaagccaatgggaatcctgcttgttcggcccagttgcagcatgtctcgccacccatttttccagctcatttagcaagtgtgtcaactccattgttgtcctcaatggaaagtgtcataaatccaaatataacttctcaggataaaaatgaacaaggtggtatgttatgttcccaaatggaaaatttacctagtactgccttgccagcacaaatggaagatctaaccaaaacagttctgcctttgaatattgacagtggctcagatcctttccttcctttacctgcagaaagtagttcaatgtctctcttcccttcaccagcagatagtgggactaattctgttttttcccaactggaaaataatacaaatcattattcctcacagattgaaggaaacactaattcctcctttctaaaggggggtaatggtgaaaatgcagtttttccttcacaagtgaatgttgcaaataacttcagtagcaccaatgcccaacagtctgcacctgaaaaagttaaaaaagaccgtgggcggggcccaaatgggaaggaaagaaaacctaagcacaacaaaagggctaaatggcctgcaattatcagagatgggaaatttatctgtagcaggtgttacagggcttttactaatcccagatcactgggtgggcacttatccaagcgatcttactgtaaaccactggatggagccgaaattgctcaagaacttctacagagtaatggacagccttctcttcttgccagcatgattctctccacaaatgcagtaaatttgcagcagccacaacaatctaccttcaatccagaagcatgttttaaagatccatcatttctacagcttcttgctgaaaatcgctcgccagcatttttaccaaatacatttcctcgatctggtgtgactaactttaataccagtgtcagtcaagaaggtagtgaaattattaaacaggctttggaaactgctggcattcccagtacatttgagggtgccgaaatgctttctcatgtttcaacaggttgtgtctctgatgcatcacaagtaaatgcaacggtgatgccaaatccaactgtaccacccctgttgcacactgtatgccatccaaacaccttgctgaccaaccagaataggacgtcaaactccaaaacttcctccattgaggaatgtagcagcttgcctgtttttccaacgaatgacttactactgaagactgttgaaaatggtttgtgctctagttcatttcctaattctggtgggccatcacaaaattttaccagtaacagttctcgtgtttctgttataagtggtcctcagaacacaagatccagtcatttaaataaaaagggaaacagtgcttctaagagaagaaagaaagttgctcctccactaattgcacctaacgcttcccaaaacttggtaacaagtgacttaacaacaatgggactcatagcaaagagtgttgaaatcccaactactaaccttcattcaaatgtaattccaacttgtgaacctcagagtttggtggaaaatctaacacagaaattaaataatgttaacaatcagttatttatgactgatgtaaaagagaatttcaaaaccagtcttgagtcccatacagtgttagcccctttaacattaaaaactgaaaatggtgattcccaaatgatggctttgaattcatgcacaacttcaataaattctgatttgcagatttctgaagacaatgttatacaaaactttgaaaagactcttgaaattattaaaactgctatgaattctcaaatacttgaggtaaaaagtggatctcagggtgctggtgaaacttcacaaaatgctcaaataaattataacattcagcttccttcagtaaacactgtgcaaaataacaaattacccgattcttctccgttttcctcctttataagtgtcatgccaacaaaaagtaacattcctcagtctgaagtatcacataaggaggatcaaatacaggaaattttagaaggcttacagaaattaaaattagaaaatgacctatccactccagcatcccaatgtgtactgataaatacatcagtgacactgactcccacgcctgttaaatcaactgcagatatcacagttattcagccagtttctgaaatgataaacattcaatttaatgacaaagttaataaaccctttgtgtgtcaaaaccaaggctgtaactacagtgctatgacaaaggatgcactatttaagcactatggtaaaattcatcaatacactccagaaatgattcttgaaattaagaagaatcaattgaaatttgctccctttaaatgtgtagtacctacatgtacaaaaacatttacaagaaattctaacctccgggcacactgtcagttggtgcatcattttacaactgaagaaatggtaaagttaaaaattaaaaggccttatggaagaaaatctcagagtgaaaatgtgccggcctcacgaagtacacaagtgaaaaaacagctagctatgacagaggaaaataaaaaggaatctcagcctgctttagaattgagagcagagacccaaaatacccacagtaatgtagcagtgatcccagaaaaacaacttgtagaaaaaaaaagtcctgacaaaacagaaagttctttacaagtgattacagttacttcagaacaatgtaatacaaatgcactcacaaacacacaaaccaaaggacggaagattaggaggcataaaaaagaaaaggaggagaaaaaacgaaagaagccagtttcccaatcccttgagtttccaacaagatacagtccttacagaccttatcgatgtgttcaccagggatgctttgctgcctttacgatacagcaaaatttgattctccattaccaggctgtacacaaatcagatctacctgcattttcagcagaggtcgaagaggaaagtgaagctggtaaagaaagtgaagaaactgaaactaaacaaactttgaaagaatttcgatgtcaggtaagtgactgttctcgaattttccaagcaattactggcctaatacaacactacatgaaacttcatgaaatgactcctgaagaaattgaaagtatgactgcttcagtggatgttgggaagtttccatgtgaccagttagagtgtaaatcttcatttactacatatttgaactatgttgttcatctagaggcagaccacgggattggactaagggcaagtaaaacagaagaagatggtgtatacaaatgtgattgtgaaggctgtgaccgtatatatgcaacccggtcgaatctcctccgacacatttttaataagcataatgacaaacataaggctcatttgattcgtccaagaagattaacaccaggccaggaaaatatgtcaagcaaggcaaaccaagaaaaatcaaagtctaaacatcgggggaccaagcacagcagatgtggaaaggaaggaataaaaatgcccaagaccaaacgaaagaaaaaaaataatttagaaaacaagaatgcaaagattgtgcagattgaagaaaataagccttattctctgaaacgtgggaagcatgtatattctataaaggctagaaatgatgccctgtctgagtgtacaagcagatttgtaacccagtatccatgtatgataaagggatgtacttcagttgttacaagtgaaagcaatataattagacattataagtgccataaattatctaaggcatttacatcacaacaccgaaatcttcttattgtattcaaacggtgttgcaactcacaagtaaaggaaacgtctgagcaagaaggtgctaagaatgatgtgaaagattctgacacgtgtgtatcagagagcaatgataattcaagaacaacagctacagtttcacaaaaggaagttgaaaaaaatgaaaaagatgaaatggatgaactaacagaattgtttattacaaaattaataaatgaagatagcacaagtgtagagacccaagctaatacttcttcaaatgtaagtaatgattttcaggaagataacctctgccagtcagaaagacaaaaagcaagtaatttgaagagagttaataaggaaaaaaatgtctcacaaaataaaaaaaggaaagttgaaaaagctgaaccagcatcagcagctgagttaagtagcgtgcgtaaagaagaagaaactgctgttgccattcaaaccattgaggagcatcctgcatcttttgactggagctcttttaagccaatgggatttgaagtatcatttctgaagtttcttgaggagtctgcagtgaagcagaagaaaaatactgacaaagaccatccgaatactggaaacaaaaaaggatcccattcaaattcaagaaaaaatattgataagactgctgtgactagtggaaatcatgtatgtccttgtaaagaaagcgaaacgtttgtacagtttgccaatccatcacagcttcagtgcagtgataatgtaaaaattgttttagacaagaatcttaaagattgcactgagcttgtcttaaagcaacttcaggaaatgaaacctaccgtcagtctgaaaaaacttgaagtacattcaaatgatccagatatgtctgttatgaaagatatcagtataggtaaagccacaggcagaggtcagtactgataattaatgtagtataaatacatcatttaccattttattttaaataggaagccatcaagcatgctagaattgtgaaactttcattatatttttttgttgttgacatgaattaacctggccaaaaacaaaaaagaaaaaaaaaacatgacatttgtcatgtaaaacttttttttatccctatgggacttgaggaacagaatcagtacttcagttattgtaaatagtgagctaaacctcaaatttctatcacccagttgcccttttcatgaactaaacaattatctgtgtgattggtatgtttcaccaggtcactgctcatgtataacagtactctttatttgtagataccttttttgtatatatttattattgtaaatcatgtgctgccaccagcagtctgtaagtctaaactattaaatgacacatttatatttggaattttaatttttaactaagcgatcaagttttttaaattgttcttttattgttttaaattaagaactttttgaactaaaaccagaaactctgccatagttcattgatttttacatgaaacatttatttacaagatgatatcaagattacttttcacaaaataggcacattatatcaacactttgctctgctttgtaaatttgccatccaggattttggggtggtattcatgtgaaattaaagcagattctctagcagtttcctatagctacagtttttttttttcattgcttctaattggatatagttactatgagtccatgaaatacaatggaaatgtgaataaagaatttactacattgaagattttaaacatttggtattaaaaaaaaatcctttgtgaatgtgatagaaaactagtagtgtggagcagtgtaaatatttgaggtggtgatttgtgaagtagcccagtattgccttaaataaaatcacatttcatttcttgttttatacatgtgatcttataaagattttttgttttgttttgttttccattttctgagatttatagattggtgtatagctttaaactgtataaagttttgtggaaagatttttttaaacatttttataaatcttaaaattgatatcatcaaagtgagcccatcttgtgtttataaaatacaagagtccttaacatttataattacatagataaaacactttctataaggaagttggatgttttgattttactgtttatagatgttagattgtacagatttgtctgtatttctcaccatatctaatgatacttttttcattagattggtcttcaagaacagtattagttataattattttggttattcagtatatagttagctcttacagtttagctttattcaccatatttatactgtggattcacagcgagaggtagaggttattccaggagagttgatgaccttcatttaaagtccaactaaaatcagtagtagaaacataagaaaacatctttgcaatatttacttttgtttctgtttgccgtaaatagtaacattgtttttttttattttgtgtttgttataaaacagttgcattcacaatattattggcctgagatattgatgatattgtgatggtatgaaaatgtgtacattccctgtgcaacatcagatttgcaggaaaaatgaagcacttactgaaatcgctggtactctgaataaataagcatggtcaaggagtgaactattttcttttggaaatttctttttaatttttattattaaagtattttatttttagggccttttgggttttattgaatagttcatttcacctgtttaagacttactaccaataagcataaaacctgacacgttaaaatccctgccctttggtgagcccactgttatttattaaaataaaagttattttatgggtgattaaaaca

SEQ ID NO: 320638 - DNA, 3720 bp, Homo sapiens
agcccactctagagtatccccctcctaccccacggatacagcaaaatttgattctccattaccaggctgtacacaaatcagatctacctgcattttcagcagaggtcgaagaggaaagtgaagctggtaaagaaagtgaagaaactgaaactaaacaaactttgaaagaatttcgatgtcaggtaagtgactgttctcgaattttccaagcaattactggcctaatacaacactacatgaaacttcatgaaatgactcctgaagaaattgaaagtatgactgcttcagtggatgttgggaagtttccatgtgaccagttagagtgtaaatcttcatttactacatatttgaactatgttgttcatctagaggcagaccacgggattggactaagggcaagtaaaacagaagaagatggtgtatacaaatgtgattgtgaaggctgtgaccgtatatatgcaacccggtcgaatctcctccgacacatttttaataagcataatgacaaacataaggctcatttgattcgtccaagaagattaacaccaggccaggaaaatatgtcaagcaaggcaaaccaagaaaaatcaaagtctaaacatcgggggaccaagcacagcagatgtggaaaggaaggaataaaaatgcccaagaccaaacgaaagaaaaaaaataatttagaaaacaagaatgcaaagattgtgcagattgaagaaaataagccttattctctgaaacgtgggaagcatgtatattctataaaggctagaaatgatgccctgtctgagtgtacaagcagatttgtaacccagtatccatgtatgataaagggatgtacttcagttgttacaagtgaaagcaatataattagacattataagtgccataaattatctaaggcatttacatcacaacaccgaaatcttcttattgtattcaaacggtgttgcaactcacaagtaaaggaaacgtctgagcaagaaggtgctaagaatgatgtgaaagattctgacacgtgtgtatcagagagcaatgataattcaagaacaacagctacagtttcacaaaaggaagttgaaaaaaatgaaaaagatgaaatggatgaactaacagaattgtttattacaaaattaataaatgaagatagcacaagtgtagagacccaagctaatacttcttcaaatgtaagtaatgattttcaggaagataacctctgccagtcagaaagacaaaaagcaagtaatttgaagagagttaataaggaaaaaaatgtctcacaaaataaaaaaaggaaagttgaaaaagctgaaccagcatcagcagctgagttaagtagcgtgcgtaaagaagaagaaactgctgttgccattcaaaccattgaggagcatcctgcatcttttgactggagctcttttaagccaatgggatttgaagtatcatttctgaagtttcttgaggagtctgcagtgaagcagaagaaaaatactgacaaagaccatccgaatactggaaacaaaaaaggatcccattcaaattcaagaaaaaatattgataagactgctgtgactagtggaaatcatgtatgtccttgtaaagaaagcgaaacgtttgtacagtttgccaatccatcacagcttcagtgcagtgataatgtaaaaattgttttagacaagaatcttaaagattgcactgagcttgtcttaaagcaacttcaggaaatgaaacctaccgtcagtctgaaaaaacttgaagtacattcaaatgatccagatatgtctgttatgaaagatatcagtataggtaaagccacaggcagaggtcagtactgataattaatgtagtataaatacatcatttaccattttattttaaataggaagccatcaagcatgctagaattgtgaaactttcattatatttttttgttgttgacatgaattaacctggccaaaaacaaaaaagaaaaaaaaaacatgacatttgtcatgtaaaacttttttttatccctatgggacttgaggaacagaatcagtacttcagttattgtaaatagtgagctaaacctcaaatttctatcacccagttgcccttttcatgaactaaacaattatctgtgtgattggtatgtttcaccaggtcactgctcatgtataacagtactctttatttgtagataccttttttgtatatatttattattgtaaatcatgtgctgccaccagcagtctgtaagtctaaactattaaatgacacatttatatttggaattttaatttttaactaagcgatcaagttttttaaattgttcttttattgttttaaattaagaactttttgaactaaaaccagaaactctgccatagttcattgatttttacatgaaacatttatttacaagatgatatcaagattacttttcacaaaataggcacattatatcaacactttgctctgctttgtaaatttgccatccaggattttggggtggtattcatgtgaaattaaagcagattctctagcagtttcctatagctacagtttttttttttcattgcttctaattggatatagttactatgagtccatgaaatacaatggaaatgtgaataaagaatttactacattgaagattttaaacatttggtattaaaaaaaaatcctttgtgaatgtgatagaaaactagtagtgtggagcagtgtaaatatttgaggtggtgatttgtgaagtagcccagtattgccttaaataaaatcacatttcatttcttgttttatacatgtgatcttataaagattttttgttttgttttgttttccattttctgagatttatagattggtgtatagctttaaactgtataaagttttgtggaaagatttttttaaacatttttataaatcttaaaattgatatcatcaaagtgagcccatcttgtgtttataaaatacaagagtccttaacatttataattacatagataaaacactttctataaggaagttggatgttttgattttactgtttatagatgttagattgtacagatttgtctgtatttctcaccatatctaatgatacttttttcattagattggtcttcaagaacagtattagttataattattttggttattcagtatatagttagctcttacagtttagctttattcaccatatttatactgtggattcacagcgagaggtagaggttattccaggagagttgatgaccttcatttaaagtccaactaaaatcagtagtagaaacataagaaaacatctttgcaatatttacttttgtttctgtttgccgtaaatagtaacattgtttttttttattttgtgtttgttataaaacagttgcattcacaatattattggcctgagatattgatgatattgtgatggtatgaaaatgtgtacattccctgtgcaacatcagatttgcaggaaaaatgaagcacttactgaaatcgctggtactctgaataaataagcatggtcaaggagtgaactattttcttttggaaatttctttttaatttttattattaaagtattttatttttagggccttttgggttttattgaatagttcatttcacctgtttaagacttactaccaataagcataaaacctgacacgttaaaatccctgccctttggtgagcccactgttatttattaaaataaaagttattttatgggtgattaaaaca

SEQ ID NO: 320639 - DNA, 3817 bp, Homo sapiens
gttgagttgcggcgaaggcggctgcgtcgcggagctgcagcgcctgggcgagcggctccaggagctggagctacagctgcgggagagccgggtaccggccgtggaagcggccaccgactactgtcagcagctgtgccagacactcctagaatatgcagagaaatggaaaacttcagaagatcctttacctttattggagaggtcgaagaggaaagtgaagctggtaaagaaagtgaagaaactgaaactaaacaaactttgaaagaatttcgatgtcaggtaagtgactgttctcgaattttccaagcaattactggcctaatacaacactacatgaaacttcatgaaatgactcctgaagaaattgaaagtatgactgcttcagtggatgttgggaagtttccatgtgaccagttagagtgtaaatcttcatttactacatatttgaactatgttgttcatctagaggcagaccacgggattggactaagggcaagtaaaacagaagaagatggtgtatacaaatgtgattgtgaaggctgtgaccgtatatatgcaacccggtcgaatctcctccgacacatttttaataagcataatgacaaacataaggctcatttgattcgtccaagaagattaacaccaggccaggaaaatatgtcaagcaaggcaaaccaagaaaaatcaaagtctaaacatcgggggaccaagcacagcagatgtggaaaggaaggaataaaaatgcccaagaccaaacgaaagaaaaaaaataatttagaaaacaagaatgcaaagattgtgcagattgaagaaaataagccttattctctgaaacgtgggaagcatgtatattctataaaggctagaaatgatgccctgtctgagtgtacaagcagatttgtaacccagtatccatgtatgataaagggatgtacttcagttgttacaagtgaaagcaatataattagacattataagtgccataaattatctaaggcatttacatcacaacaccgaaatcttcttattgtattcaaacggtgttgcaactcacaagtaaaggaaacgtctgagcaagaaggtgctaagaatgatgtgaaagattctgacacgtgtgtatcagagagcaatgataattcaagaacaacagctacagtttcacaaaaggaagttgaaaaaaatgaaaaagatgaaatggatgaactaacagaattgtttattacaaaattaataaatgaagatagcacaagtgtagagacccaagctaatacttcttcaaatgtaagtaatgattttcaggaagataacctctgccagtcagaaagacaaaaagcaagtaatttgaagagagttaataaggaaaaaaatgtctcacaaaataaaaaaaggaaagttgaaaaagctgaaccagcatcagcagctgagttaagtagcgtgcgtaaagaagaagaaactgctgttgccattcaaaccattgaggagcatcctgcatcttttgactggagctcttttaagccaatgggatttgaagtatcatttctgaagtttcttgaggagtctgcagtgaagcagaagaaaaatactgacaaagaccatccgaatactggaaacaaaaaaggatcccattcaaattcaagaaaaaatattgataagactgctgtgactagtggaaatcatgtatgtccttgtaaagaaagcgaaacgtttgtacagtttgccaatccatcacagcttcagtgcagtgataatgtaaaaattgttttagacaagaatcttaaagattgcactgagcttgtcttaaagcaacttcaggaaatgaaacctaccgtcagtctgaaaaaacttgaagtacattcaaatgatccagatatgtctgttatgaaagatatcagtataggtaaagccacaggcagaggtcagtactgataattaatgtagtataaatacatcatttaccattttattttaaataggaagccatcaagcatgctagaattgtgaaactttcattatatttttttgttgttgacatgaattaacctggccaaaaacaaaaaagaaaaaaaaaacatgacatttgtcatgtaaaacttttttttatccctatgggacttgaggaacagaatcagtacttcagttattgtaaatagtgagctaaacctcaaatttctatcacccagttgcccttttcatgaactaaacaattatctgtgtgattggtatgtttcaccaggtcactgctcatgtataacagtactctttatttgtagataccttttttgtatatatttattattgtaaatcatgtgctgccaccagcagtctgtaagtctaaactattaaatgacacatttatatttggaattttaatttttaactaagcgatcaagttttttaaattgttcttttattgttttaaattaagaactttttgaactaaaaccagaaactctgccatagttcattgatttttacatgaaacatttatttacaagatgatatcaagattacttttcacaaaataggcacattatatcaacactttgctctgctttgtaaatttgccatccaggattttggggtggtattcatgtgaaattaaagcagattctctagcagtttcctatagctacagtttttttttttcattgcttctaattggatatagttactatgagtccatgaaatacaatggaaatgtgaataaagaatttactacattgaagattttaaacatttggtattaaaaaaaaatcctttgtgaatgtgatagaaaactagtagtgtggagcagtgtaaatatttgaggtggtgatttgtgaagtagcccagtattgccttaaataaaatcacatttcatttcttgttttatacatgtgatcttataaagattttttgttttgttttgttttccattttctgagatttatagattggtgtatagctttaaactgtataaagttttgtggaaagatttttttaaacatttttataaatcttaaaattgatatcatcaaagtgagcccatcttgtgtttataaaatacaagagtccttaacatttataattacatagataaaacactttctataaggaagttggatgttttgattttactgtttatagatgttagattgtacagatttgtctgtatttctcaccatatctaatgatacttttttcattagattggtcttcaagaacagtattagttataattattttggttattcagtatatagttagctcttacagtttagctttattcaccatatttatactgtggattcacagcgagaggtagaggttattccaggagagttgatgaccttcatttaaagtccaactaaaatcagtagtagaaacataagaaaacatctttgcaatatttacttttgtttctgtttgccgtaaatagtaacattgtttttttttattttgtgtttgttataaaacagttgcattcacaatattattggcctgagatattgatgatattgtgatggtatgaaaatgtgtacattccctgtgcaacatcagatttgcaggaaaaatgaagcacttactgaaatcgctggtactctgaataaataagcatggtcaaggagtgaactattttcttttggaaatttctttttaatttttattattaaagtattttatttttagggccttttgggttttattgaatagttcatttcacctgtttaagacttactaccaataagcataaaacctgacacgttaaaatccctgccctttggtgagcccactgttatttattaaaataaaagttattttatgggtgattaaaaca

SEQ ID NO: 320640 - DNA, 8499 bp, Homo sapiens
  misc_feature (1443)..(1443): n is a, c, g, or t
aacagttaagagagaggggatttatatctgctcggtttaggaattggcaagcctacatgcagtattgtgtgttgtgtgacaaagaattccttggtcacagaatagtacgacatgctcagaaacattacaaagatggaatttatagttgccccatatgtgcaaagaactttaattctaaagaaacttttgtccctcatgtcacactgcatgttaaacaatctagtaaagagagactagcagctatgaaaccattaagaagattgggaaggcctccaaagatcacaactaccaatgaaaatcagaagactaatactgtggctaaacaggagcagcgacctataaaaaagaatagtctctattcaacagattttatagtgtttaatgacaatgatggttcagatgatgagaatgatgacaaagataaatcctatgagccagaagtgattccagtccagaaaccagtacctgttaatgaatttaattgccctgtaactttttgtaaaaagggctttaagtactttaaaaatttaattgctcatgtgaaggggcataaagataatgaagacgccaagcgctttcttgaaatgcagagcaaaaaagttatttgccagtactgtaggcggcattttgtgagtgttactcatctcaatgatcacttacagatgcactgtggcagtaaaccatatatctgtatacagatgaaatgtaaagctggttttaatagttacgccgagcttttaacccaccgaaaggagcatcaagtctttagagcaaaatgtatgtttcctaaatgtggaagaattttttcggaagcttatttactatatgatcatgaagcacaacattataatacgtacacttgtaagttcacaggttgtggtaaagtttatcgttctcagggtgagctggaaaagcatctggatgatcacagtactcctcctgaaaaagtgctgcctcctgaagcccaacttaattcatctggagattccattcagccttctgaagtgaatcagaacacagcagagaatattgagaaagaaagatctatgcttccttcagaaaataacattgaaaacagcttactagcagatagaagtgatgcttgggataaaagcaaagcagaatcagctgtgaccaaacaagaccagatttctgcctctgagctcaggcaagctaatggaccattgtcaaatggtttggaaaaccctgctactactcctctacttcaatccagtgaagtagctgtgtccattaaggtgtctctcaatcaggggattgaggataactttggaaagcaagaaaactcaactgtggaaggcagtggtgaagcactggtcacagacttacatacgccagttgaagatacttgtaatgatttgtgtcatccaggtttccaggagagaaaagaacaagattgctttaatgatgcccatgttactcagnattctttagtaaattcagaaactctcaaaataggtgaccttaccccacaaaacttagaaagacaagtgaacaacttgatgaccttttctgtgcaaaatcaggcagcatttcaaaacaatttaccaacttccaaatttgaatgtggagataatgttaaaacatcatccaatctttataatttacctcttaagacattagaaagtattgcatttgttccaccgcagtccgacctaagtaattcattaggaactccatcagtgcctccaaaagctccagttcagaaattcagctgccaggtcgagggatgtactcgaacctataattcttcacagagtattgggaaacacatgaagacagcacaccctgaccaatatgctgcatttaaaatgcagcgcaaaagtaaaaaaggtcagaaagctaacaacttaaatacaccaaataatggaaagtttgtttattttttgccatcaccggtgaacagctcaaatccattttttacatcacagaccaaagccaatgggaatcctgcttgttcggcccagttgcagcatgtctcgccacccatttttccagctcatttagcaagtgtgtcaactccattgttgtcctcaatggaaagtgtcataaatccaaatataacttctcaggataaaaatgaacaaggtggtatgttatgttcccaaatggaaaatttacctagtactgccttgccagcacaaatggaagatctaaccaaaacagttctgcctttgaatattgacagtggctcagatcctttccttcctttacctgcagaaagtagttcaatgtctctcttcccttcaccagcagatagtgggactaattctgttttttcccaactggaaaataatacaaatcattattcctcacagattgaaggaaacactaattcctcctttctaaaggggggtaatggtgaaaatgcagtttttccttcacaagtgaatgttgcaaataacttcagtagcaccaatgcccaacagtctgcacctgaaaaagttaaaaaagaccgtgggcggggcccaaatgggaaggaaagaaaacctaagcacaacaaaagggctaaatggcctgcaattatcagagatgggaaatttatctgtagcaggtgttacagggcttttactaatcccagatcactgggtgggcacttatccaagcgatcttactgtaaaccactggatggagccgaaattgctcaagaacttctacagagtaatggacagccttctcttcttgccagcatgattctctccacaaatgcagtaaatttgcagcagccacaacaatctaccttcaatccagaagcatgttttaaagatccatcatttctacagcttcttgctgaaaatcgctcgccagcatttttaccaaatacatttcctcgatctggtgtgactaactttaataccagtgtcagtcaagaaggtagtgaaattattaaacaggctttggaaactgctggcattcccagtacatttgagggtgccgaaatgctttctcatgtttcaacaggttgtgtctctgatgcatcacaagtaaatgcaacggtgatgccaaatccaactgtaccacccctgttgcacactgtatgccatccaaacaccttgctgaccaaccagaataggacgtcaaactccaaaacttcctccattgaggaatgtagcagcttgcctgtttttccaacgaatgacttactactgaagactgttgaaaatggtttgtgctctagttcatttcctaattctggtgggccatcacaaaattttaccagtaacagttctcgtgtttctgttataagtggtcctcagaacacaagatccagtcatttaaataaaaagggaaacagtgcttctaagagaagaaagaaagttgctcctccactaattgcacctaacgcttcccaaaacttggtaacaagtgacttaacaacaatgggactcatagcaaagagtgttgaaatcccaactactaaccttcattcaaatgtaattccaacttgtgaacctcagagtttggtggaaaatctaacacagaaattaaataatgttaacaatcagttatttatgactgatgtaaaagagaatttcaaaaccagtcttgagtcccatacagtgttagcccctttaacattaaaaactgaaaatggtgattcccaaatgatggctttgaattcatgcacaacttcaataaattctgatttgcagatttctgaagacaatgttatacaaaactttgaaaagactcttgaaattattaaaactgctatgaattctcaaatacttgaggtaaaaagtggatctcagggtgctggtgaaacttcacaaaatgctcaaataaattataacattcagcttccttcagtaaacactgtgcaaaataacaaattacccgattcttctccgttttcctcctttataagtgtcatgccaacaaaaagtaacattcctcagtctgaagtatcacataaggaggatcaaatacaggaaattttagaaggcttacagaaattaaaattagaaaatgacctatccactccagcatcccaatgtgtactgataaatacatcagtgacactgactcccacgcctgttaaatcaactgcagatatcacagttattcagccagtttctgaaatgataaacattcaatttaatgacaaagttaataaaccctttgtgtgtcaaaaccaaggctgtaactacagtgctatgacaaaggatgcactatttaagcactatggtaaaattcatcaatacactccagaaatgattcttgaaattaagaagaatcaattgaaatttgctccctttaaatgtgtagtacctacatgtacaaaaacatttacaagaaattctaacctccgggcacactgtcagttggtgcatcattttacaactgaagaaatggtaaagttaaaaattaaaaggccttatggaagaaaatctcagagtgaaaatgtgccggcctcacgaagtacacaagtgaaaaaacagctagctatgacagaggaaaataaaaaggaatctcagcctgctttagaattgagagcagagacccaaaatacccacagtaatgtagcagtgatcccagaaaaacaacttgtagaaaaaaaaagtcctgacaaaacagaaagttctttacaagtgattacagttacttcagaacaatgtaatacaaatgcactcacaaacacacaaaccaaaggacggaagattaggaggcataaaaaagaaaaggaggagaaaaaacgaaagaagccagtttcccaatcccttgagtttccaacaagatacagtccttacagaccttatcgatgtgttcaccagggatgctttgctgcctttacgatacagcaaaatttgattctccattaccaggctgtacacaaatcagatctacctgcattttcagcagaggtcgaagaggaaagtgaagctggtaaagaaagtgaagaaactgaaactaaacaaactttgaaagaatttcgatgtcaggtaagtgactgttctcgaattttccaagcaattactggcctaatacaacactacatgaaacttcatgaaatgactcctgaagaaattgaaagtatgactgcttcagtggatgttgggaagtttccatgtgaccagttagagtgtaaatcttcatttactacatatttgaactatgttgttcatctagaggcagaccacgggattggactaagggcaagtaaaacagaagaagatggtgtatacaaatgtgattgtgaaggctgtgaccgtatatatgcaacccggtcgaatctcctccgacacatttttaataagcataatgacaaacataaggctcatttgattcgtccaagaagattaacaccaggccaggaaaatatgtcaagcaaggcaaaccaagaaaaatcaaagtctaaacatcgggggaccaagcacagcagatgtggaaaggaaggaataaaaatgcccaagaccaaacgaaagaaaaaaaataatttagaaaacaagaatgcaaagattgtgcagattgaagaaaataagccttattctctgaaacgtgggaagcatgtatattctataaaggctagaaatgatgccctgtctgagtgtacaagcagatttgtaacccagtatccatgtatgataaagggatgtacttcagttgttacaagtgaaagcaatataattagacattataagtgccataaattatctaaggcatttacatcacaacaccgaaatcttcttattgtattcaaacggtgttgcaactcacaagtaaaggaaacgtctgagcaagaaggtgctaagaatgatgtgaaagattctgacacgtgtgtatcagagagcaatgataattcaagaacaacagctacagtttcacaaaaggaagttgaaaaaaatgaaaaagatgaaatggatgaactaacagaattgtttattacaaaattaataaatgaagatagcacaagtgtagagacccaagctaatacttcttcaaatgtaagtaatgattttcaggaagataacctctgccagtcagaaagacaaaaagcaagtaatttgaagagagttaataaggaaaaaaatgtctcacaaaataaaaaaaggaaagttgaaaaagctgaaccagcatcagcagctgagttaagtagcgtgcgtaaagaagaagaaactgctgttgccattcaaaccattgaggagcatcctgcatcttttgactggagctcttttaagccaatgggatttgaagtatcatttctgaagtttcttgaggagtctgcagtgaagcagaagaaaaatactgacaaagaccatccgaatactggaaacaaaaaaggatcccattcaaattcaagaaaaaatattgataagactgctgtgactagtggaaatcatgtatgtccttgtaaagaaagcgaaacgtttgtacagtttgccaatccatcacagcttcagtgcagtgataatgtaaaaattgttttagacaagaatcttaaagattgcactgagcttgtcttaaagcaacttcaggaaatgaaacctaccgtcagtctgaaaaaacttgaagtacattcaaatgatccagatatgtctgttatgaaagatatcagtataggtaaagccacaggcagaggtcagtactgataattaatgtagtataaatacatcatttaccattttattttaaataggaagccatcaagcatgctagaattgtgaaactttcattatatttttttgttgttgacatgaattaacctggccaaaaacaaaaaagaaaaaaaaaacatgacatttgtcatgtaaaacttttttttatccctatgggacttgaggaacagaatcagtacttcagttattgtaaatagtgagctaaacctcaaatttctatcacccagttgcccttttcatgaactaaacaattatctgtgtgattggtatgtttcaccaggtcactgctcatgtataacagtactctttatttgtagataccttttttgtatatatttattattgtaaatcatgtgctgccaccagcagtctgtaagtctaaactattaaatgacacatttatatttggaattttaatttttaactaagcgatcaagttttttaaattgttcttttattgttttaaattaagaactttttgaactaaaaccagaaactctgccatagttcattgatttttacatgaaacatttatttacaagatgatatcaagattacttttcacaaaataggcacattatatcaacactttgctctgctttgtaaatttgccatccaggattttggggtggtattcatgtgaaattaaagcagattctctagcagtttcctatagctacagtttttttttttcattgcttctaattggatatagttactatgagtccatgaaatacaatggaaatgtgaataaagaatttactacattgaagattttaaacatttggtattaaaaaaaaatcctttgtgaatgtgatagaaaactagtagtgtggagcagtgtaaatatttgaggtggtgatttgtgaagtagcccagtattgccttaaataaaatcacatttcatttcttgttttatacatgtgatcttataaagattttttgttttgttttgttttccattttctgagatttatagattggtgtatagctttaaactgtataaagttttgtggaaagatttttttaaacatttttataaatcttaaaattgatatcatcaaagtgagcccatcttgtgtttataaaatacaagagtccttaacatttataattacatagataaaacactttctataaggaagttggatgttttgattttactgtttatagatgttagattgtacagatttgtctgtatttctcaccatatctaatgatacttttttcattagattggtcttcaagaacagtattagttataattattttggttattcagtatatagttagctcttacagtttagctttattcaccatatttatactgtggattcacagcgagaggtagaggttattccaggagagttgatgaccttcatttaaagtccaactaaaatcagtagtagaaacataagaaaacatctttgcaatatttacttttgtttctgtttgccgtaaatagtaacattgtttttttttattttgtgtttgttataaaacagttgcattcacaatattattggcctgagatattgatgatattgtgatggtatgaaaatgtgtacattccctgtgcaacatcagatttgcaggaaaaatgaagcacttactgaaatcgctggtactctgaataaataagcatggtcaaggagtgaactattttcttttggaaatttctttttaatttttattattaaagtattttatttttagggccttttgggttttattgaatagttcatttcacctgtttaagacttactaccaataagcataaaacctgacacgttaaaatccctgccctttggtgagcccactgttatttattaaaataaaagttattttatgggtgattaaaaca

SEQ ID NO: 320641 - DNA, 7625 bp, Homo sapiens
  misc_feature (569)..(569): n is a, c, g, or t
ggcatttaggtccatgcccaagtgacatcactgcccaggagcctgagaacctgcccacctgcccagcttaccactgccactaccagcacccaagcaagccacctggagttccaaggatcagccttctgaagtgaatcagaacacagcagagaatattgagaaagaaagatctatgcttccttcagaaaataacattgaaaacagcttactagcagatagaagtgatgcttgggataaaagcaaagcagaatcagctgtgaccaaacaagaccagatttctgcctctgagctcaggcaagctaatggaccattgtcaaatggtttggaaaaccctgctactactcctctacttcaatccagtgaagtagctgtgtccattaaggtgtctctcaatcaggggattgaggataactttggaaagcaagaaaactcaactgtggaaggcagtggtgaagcactggtcacagacttacatacgccagttgaagatacttgtaatgatttgtgtcatccaggtttccaggagagaaaagaacaagattgctttaatgatgcccatgttactcagnattctttagtaaattcagaaactctcaaaataggtgaccttaccccacaaaacttagaaagacaagtgaacaacttgatgaccttttctgtgcaaaatcaggcagcatttcaaaacaatttaccaacttccaaatttgaatgtggagataatgttaaaacatcatccaatctttataatttacctcttaagacattagaaagtattgcatttgttccaccgcagtccgacctaagtaattcattaggaactccatcagtgcctccaaaagctccagttcagaaattcagctgccaggtcgagggatgtactcgaacctataattcttcacagagtattgggaaacacatgaagacagcacaccctgaccaatatgctgcatttaaaatgcagcgcaaaagtaaaaaaggtcagaaagctaacaacttaaatacaccaaataatggaaagtttgtttattttttgccatcaccggtgaacagctcaaatccattttttacatcacagaccaaagccaatgggaatcctgcttgttcggcccagttgcagcatgtctcgccacccatttttccagctcatttagcaagtgtgtcaactccattgttgtcctcaatggaaagtgtcataaatccaaatataacttctcaggataaaaatgaacaaggtggtatgttatgttcccaaatggaaaatttacctagtactgccttgccagcacaaatggaagatctaaccaaaacagttctgcctttgaatattgacagtggctcagatcctttccttcctttacctgcagaaagtagttcaatgtctctcttcccttcaccagcagatagtgggactaattctgttttttcccaactggaaaataatacaaatcattattcctcacagattgaaggaaacactaattcctcctttctaaaggggggtaatggtgaaaatgcagtttttccttcacaagtgaatgttgcaaataacttcagtagcaccaatgcccaacagtctgcacctgaaaaagttaaaaaagaccgtgggcggggcccaaatgggaaggaaagaaaacctaagcacaacaaaagggctaaatggcctgcaattatcagagatgggaaatttatctgtagcaggtgttacagggcttttactaatcccagatcactgggtgggcacttatccaagcgatcttactgtaaaccactggatggagccgaaattgctcaagaacttctacagagtaatggacagccttctcttcttgccagcatgattctctccacaaatgcagtaaatttgcagcagccacaacaatctaccttcaatccagaagcatgttttaaagatccatcatttctacagcttcttgctgaaaatcgctcgccagcatttttaccaaatacatttcctcgatctggtgtgactaactttaataccagtgtcagtcaagaaggtagtgaaattattaaacaggctttggaaactgctggcattcccagtacatttgagggtgccgaaatgctttctcatgtttcaacaggttgtgtctctgatgcatcacaagtaaatgcaacggtgatgccaaatccaactgtaccacccctgttgcacactgtatgccatccaaacaccttgctgaccaaccagaataggacgtcaaactccaaaacttcctccattgaggaatgtagcagcttgcctgtttttccaacgaatgacttactactgaagactgttgaaaatggtttgtgctctagttcatttcctaattctggtgggccatcacaaaattttaccagtaacagttctcgtgtttctgttataagtggtcctcagaacacaagatccagtcatttaaataaaaagggaaacagtgcttctaagagaagaaagaaagttgctcctccactaattgcacctaacgcttcccaaaacttggtaacaagtgacttaacaacaatgggactcatagcaaagagtgttgaaatcccaactactaaccttcattcaaatgtaattccaacttgtgaacctcagagtttggtggaaaatctaacacagaaattaaataatgttaacaatcagttatttatgactgatgtaaaagagaatttcaaaaccagtcttgagtcccatacagtgttagcccctttaacattaaaaactgaaaatggtgattcccaaatgatggctttgaattcatgcacaacttcaataaattctgatttgcagatttctgaagacaatgttatacaaaactttgaaaagactcttgaaattattaaaactgctatgaattctcaaatacttgaggtaaaaagtggatctcagggtgctggtgaaacttcacaaaatgctcaaataaattataacattcagcttccttcagtaaacactgtgcaaaataacaaattacccgattcttctccgttttcctcctttataagtgtcatgccaacaaaaagtaacattcctcagtctgaagtatcacataaggaggatcaaatacaggaaattttagaaggcttacagaaattaaaattagaaaatgacctatccactccagcatcccaatgtgtactgataaatacatcagtgacactgactcccacgcctgttaaatcaactgcagatatcacagttattcagccagtttctgaaatgataaacattcaatttaatgacaaagttaataaaccctttgtgtgtcaaaaccaaggctgtaactacagtgctatgacaaaggatgcactatttaagcactatggtaaaattcatcaatacactccagaaatgattcttgaaattaagaagaatcaattgaaatttgctccctttaaatgtgtagtacctacatgtacaaaaacatttacaagaaattctaacctccgggcacactgtcagttggtgcatcattttacaactgaagaaatggtaaagttaaaaattaaaaggccttatggaagaaaatctcagagtgaaaatgtgccggcctcacgaagtacacaagtgaaaaaacagctagctatgacagaggaaaataaaaaggaatctcagcctgctttagaattgagagcagagacccaaaatacccacagtaatgtagcagtgatcccagaaaaacaacttgtagaaaaaaaaagtcctgacaaaacagaaagttctttacaagtgattacagttacttcagaacaatgtaatacaaatgcactcacaaacacacaaaccaaaggacggaagattaggaggcataaaaaagaaaaggaggagaaaaaacgaaagaagccagtttcccaatcccttgagtttccaacaagatacagtccttacagaccttatcgatgtgttcaccagggatgctttgctgcctttacgatacagcaaaatttgattctccattaccaggctgtacacaaatcagatctacctgcattttcagcagaggtcgaagaggaaagtgaagctggtaaagaaagtgaagaaactgaaactaaacaaactttgaaagaatttcgatgtcaggtaagtgactgttctcgaattttccaagcaattactggcctaatacaacactacatgaaacttcatgaaatgactcctgaagaaattgaaagtatgactgcttcagtggatgttgggaagtttccatgtgaccagttagagtgtaaatcttcatttactacatatttgaactatgttgttcatctagaggcagaccacgggattggactaagggcaagtaaaacagaagaagatggtgtatacaaatgtgattgtgaaggctgtgaccgtatatatgcaacccggtcgaatctcctccgacacatttttaataagcataatgacaaacataaggctcatttgattcgtccaagaagattaacaccaggccaggaaaatatgtcaagcaaggcaaaccaagaaaaatcaaagtctaaacatcgggggaccaagcacagcagatgtggaaaggaaggaataaaaatgcccaagaccaaacgaaagaaaaaaaataatttagaaaacaagaatgcaaagattgtgcagattgaagaaaataagccttattctctgaaacgtgggaagcatgtatattctataaaggctagaaatgatgccctgtctgagtgtacaagcagatttgtaacccagtatccatgtatgataaagggatgtacttcagttgttacaagtgaaagcaatataattagacattataagtgccataaattatctaaggcatttacatcacaacaccgaaatcttcttattgtattcaaacggtgttgcaactcacaagtaaaggaaacgtctgagcaagaaggtgctaagaatgatgtgaaagattctgacacgtgtgtatcagagagcaatgataattcaagaacaacagctacagtttcacaaaaggaagttgaaaaaaatgaaaaagatgaaatggatgaactaacagaattgtttattacaaaattaataaatgaagatagcacaagtgtagagacccaagctaatacttcttcaaatgtaagtaatgattttcaggaagataacctctgccagtcagaaagacaaaaagcaagtaatttgaagagagttaataaggaaaaaaatgtctcacaaaataaaaaaaggaaagttgaaaaagctgaaccagcatcagcagctgagttaagtagcgtgcgtaaagaagaagaaactgctgttgccattcaaaccattgaggagcatcctgcatcttttgactggagctcttttaagccaatgggatttgaagtatcatttctgaagtttcttgaggagtctgcagtgaagcagaagaaaaatactgacaaagaccatccgaatactggaaacaaaaaaggatcccattcaaattcaagaaaaaatattgataagactgctgtgactagtggaaatcatgtatgtccttgtaaagaaagcgaaacgtttgtacagtttgccaatccatcacagcttcagtgcagtgataatgtaaaaattgttttagacaagaatcttaaagattgcactgagcttgtcttaaagcaacttcaggaaatgaaacctaccgtcagtctgaaaaaacttgaagtacattcaaatgatccagatatgtctgttatgaaagatatcagtataggtaaagccacaggcagaggtcagtactgataattaatgtagtataaatacatcatttaccattttattttaaataggaagccatcaagcatgctagaattgtgaaactttcattatatttttttgttgttgacatgaattaacctggccaaaaacaaaaaagaaaaaaaaaacatgacatttgtcatgtaaaacttttttttatccctatgggacttgaggaacagaatcagtacttcagttattgtaaatagtgagctaaacctcaaatttctatcacccagttgcccttttcatgaactaaacaattatctgtgtgattggtatgtttcaccaggtcactgctcatgtataacagtactctttatttgtagataccttttttgtatatatttattattgtaaatcatgtgctgccaccagcagtctgtaagtctaaactattaaatgacacatttatatttggaattttaatttttaactaagcgatcaagttttttaaattgttcttttattgttttaaattaagaactttttgaactaaaaccagaaactctgccatagttcattgatttttacatgaaacatttatttacaagatgatatcaagattacttttcacaaaataggcacattatatcaacactttgctctgctttgtaaatttgccatccaggattttggggtggtattcatgtgaaattaaagcagattctctagcagtttcctatagctacagtttttttttttcattgcttctaattggatatagttactatgagtccatgaaatacaatggaaatgtgaataaagaatttactacattgaagattttaaacatttggtattaaaaaaaaatcctttgtgaatgtgatagaaaactagtagtgtggagcagtgtaaatatttgaggtggtgatttgtgaagtagcccagtattgccttaaataaaatcacatttcatttcttgttttatacatgtgatcttataaagattttttgttttgttttgttttccattttctgagatttatagattggtgtatagctttaaactgtataaagttttgtggaaagatttttttaaacatttttataaatcttaaaattgatatcatcaaagtgagcccatcttgtgtttataaaatacaagagtccttaacatttataattacatagataaaacactttctataaggaagttggatgttttgattttactgtttatagatgttagattgtacagatttgtctgtatttctcaccatatctaatgatacttttttcattagattggtcttcaagaacagtattagttataattattttggttattcagtatatagttagctcttacagtttagctttattcaccatatttatactgtggattcacagcgagaggtagaggttattccaggagagttgatgaccttcatttaaagtccaactaaaatcagtagtagaaacataagaaaacatctttgcaatatttacttttgtttctgtttgccgtaaatagtaacattgtttttttttattttgtgtttgttataaaacagttgcattcacaatattattggcctgagatattgatgatattgtgatggtatgaaaatgtgtacattccctgtgcaacatcagatttgcaggaaaaatgaagcacttactgaaatcgctggtactctgaataaataagcatggtcaaggagtgaactattttcttttggaaatttctttttaatttttattattaaagtattttatttttagggccttttgggttttattgaatagttcatttcacctgtttaagacttactaccaataagcataaaacctgacacgttaaaatccctgccctttggtgagcccactgttatttattaaaataaaagttattttatgggtgattaaaaca

SEQ ID NO: 320642 - DNA, 8441 bp, Homo sapiens
  misc_feature (1443)..(1443): n is a, c, g, or t
aacagttaagagagaggggatttatatctgctcggtttaggaattggcaagcctacatgcagtattgtgtgttgtgtgacaaagaattccttggtcacagaatagtacgacatgctcagaaacattacaaagatggaatttatagttgccccatatgtgcaaagaactttaattctaaagaaacttttgtccctcatgtcacactgcatgttaaacaatctagtaaagagagactagcagctatgaaaccattaagaagattgggaaggcctccaaagatcacaactaccaatgaaaatcagaagactaatactgtggctaaacaggagcagcgacctataaaaaagaatagtctctattcaacagattttatagtgtttaatgacaatgatggttcagatgatgagaatgatgacaaagataaatcctatgagccagaagtgattccagtccagaaaccagtacctgttaatgaatttaattgccctgtaactttttgtaaaaagggctttaagtactttaaaaatttaattgctcatgtgaaggggcataaagataatgaagacgccaagcgctttcttgaaatgcagagcaaaaaagttatttgccagtactgtaggcggcattttgtgagtgttactcatctcaatgatcacttacagatgcactgtggcagtaaaccatatatctgtatacagatgaaatgtaaagctggttttaatagttacgccgagcttttaacccaccgaaaggagcatcaagtctttagagcaaaatgtatgtttcctaaatgtggaagaattttttcggaagcttatttactatatgatcatgaagcacaacattataatacgtacacttgtaagttcacaggttgtggtaaagtttatcgttctcagggtgagctggaaaagcatctggatgatcacagtactcctcctgaaaaagtgctgcctcctgaagcccaacttaattcatctggagattccattcagccttctgaagtgaatcagaacacagcagagaatattgagaaagaaagatctatgcttccttcagaaaataacattgaaaacagcttactagcagatagaagtgatgcttgggataaaagcaaagcagaatcagctgtgaccaaacaagaccagatttctgcctctgagctcaggcaagctaatggaccattgtcaaatggtttggaaaaccctgctactactcctctacttcaatccagtgaagtagctgtgtccattaaggtgtctctcaatcaggggattgaggataactttggaaagcaagaaaactcaactgtggaaggcagtggtgaagcactggtcacagacttacatacgccagttgaagatacttgtaatgatttgtgtcatccaggtttccaggagagaaaagaacaagattgctttaatgatgcccatgttactcagnattctttagtaaattcagaaactctcaaaataggtgaccttaccccacaaaacttagaaagacaagtgaacaacttgatgaccttttctgtgcaaaatcaggcagcatttcaaaacaatttaccaacttccaaatttgaatgtggagataatgttaaaacatcatccaatctttataatttacctcttaagacattagaaagtattgcatttgttccaccgcagtccgacctaagtaattcattaggaactccatcagtgcctccaaaagctccagttcagaaattcagctgccaggtcgagggatgtactcgaacctataattcttcacagagtattgggaaacacatgaagacagcacaccctgaccaatatgctgcatttaaaatgcagcgcaaaagtaaaaaaggtcagaaagctaacaacttaaatacaccaaataatggaaagtttgtttattttttgccatcaccggtgaacagctcaaatccattttttacatcacagaccaaagccaatgggaatcctgcttgttcggcccagttgcagcatgtctcgccacccatttttccagctcatttagcaagtgtgtcaactccattgttgtcctcaatggaaagtgtcataaatccaaatataacttctcaggataaaaatgaacaaggtggtatgttatgttcccaaatggaaaatttacctagtactgccttgccagcacaaatggaagatctaaccaaaacagttctgcctttgaatattgacagtggctcagatcctttccttcctttacctgcagaaagtagttcaatgtctctcttcccttcaccagcagatagtgggactaattctgttttttcccaactggaaaataatacaaatcattattcctcacagattgaaggaaacactaattcctcctttctaaaggggggtaatggtgaaaatgcagtttttccttcacaagtgaatgttgcaaataacttcagtagcaccaatgcccaacagtctgcacctgaaaaagttaaaaaagaccgtgggcggggcccaaatgggaaggaaagaaaacctaagcacaacaaaagggctaaatggcctgcaattatcagagatgggaaatttatctgtagcaggtgttacagggcttttactaatcccagatcactgggtgggcacttatccaagcgatcttactgtaaaccactggatggagccgaaattgctcaagaacttctacagagtaatggacagccttctcttcttgccagcatgattctctccacaaatgcagtaaatttgcagcagccacaacaatctaccttcaatccagaagcatgttttaaagatccatcatttctacagcttcttgctgaaaatcgctcgccagcatttttaccaaatacatttcctcgatctggtgtgactaactttaataccagtgtcagtcaagaaggtagtgaaattattaaacaggctttggaaactgctggcattcccagtacatttgagggtgccgaaatgctttctcatgtttcaacaggttgtgtctctgatgcatcacaagtaaatgcaacggtgatgccaaatccaactgtaccacccctgttgcacactgtatgccatccaaacaccttgctgaccaaccagaataggacgtcaaactccaaaacttcctccattgaggaatgtagcagcttgcctgtttttccaacgaatgacttactactgaagactgttgaaaatggtttgtgctctagttcatttcctaattctggtgggccatcacaaaattttaccagtaacagttctcgtgtttctgttataagtggtcctcagaacacaagatccagtcatttaaataaaaagggaaacagtgcttctaagagaagaaagaaagttgctcctccactaattgcacctaacgcttcccaaaacttggtaacaagtgacttaacaacaatgggactcatagcaaagagtgttgaaatcccaactactaaccttcattcaaatgtaattccaacttgtgaacctcagagtttggtggaaaatctaacacagaaattaaataatgttaacaatcagttatttatgactgatgtaaaagagaatttcaaaaccagtcttgagtcccatacagtgttagcccctttaacattaaaaactgaaaatggtgattcccaaatgatggctttgaattcatgcacaacttcaataaattctgatttgcagatttctgaagacaatgttatacaaaactttgaaaagactcttgaaattattaaaactgctatgaattctcaaatacttgaggtaaaaagtggatctcagggtgctggtgaaacttcacaaaatgctcaaataaattataacattcagcttccttcagtaaacactgtgcaaaataacaaattacccgattcttctccgttttcctcctttataagtgtcatgccaacaaaaagtaacattcctcagtctgaagtatcacataaggaggatcaaatacaggaaattttagaaggcttacagaaattaaaattagaaaatgacctatccactccagcatcccaatgtgtactgataaatacatcagtgacactgactcccacgcctgttaaatcaactgcagatatcacagttattcagccagtttctgaaatgataaacattcaatttaatgacaaagttaataaaccctttgtgtgtcaaaaccaaggctgtaactacagtgctatgacaaaggatgcactatttaagcactatggtaaaattcatcaatacactccagaaatgattcttgaaattaagaagaatcaattgaaatttgctccctttaaatgtgtagtacctacatgtacaaaaacatttacaagaaattctaacctccgggcacactgtcagttggtgcatcattttacaactgaagaaatggtaaagttaaaaattaaaaggccttatggaagaaaatctcagagtgaaaatgtgccggcctcacgaagtacacaagtgaaaaaacagctagctatgacagaggaaaataaaaaggaatctcagcctgctttagaattgagagcagagacccaaaatacccacagtaatgtagcagtgatcccagaaaaacaacttgtagaaaaaaaaagtcctgacaaaacagaaagttctttacaagtgattacagttacttcagaacaatgtaatacaaatgcactcacaaacacacaaaccaaaggacggaagattaggaggcataaaaaagaaaaggaggagaaaaaacgaaagaagccagtttcccaatcccttgagtttccaacaagatacagtccttacagaccttatcgatgtgttcaccagggatgctttgctgcctttacgatacagcaaaatttgattctccattaccaggctgtacacaaatcagatctacctgcattttcagcagaggtcgaagaggaaagtgaagctggtaaagaaagtgaagaaactgaaactaaacaaactttgaaagaatttcgatgtcaggtaagtgactgttctcgaattttccaagcaattactggcctaatacaacactacatgaaacttcatgaaatgactcctgaagaaattgaaagtatgactgcttcagtggatgttgggaagtttccatgtgaccagttagagtgtaaatcttcatttactacatatttgaactatgttgttcatctagaggcagaccacgggattggactaagggcaagtaaaacagaagaagatggtgtatacaaatgtgattgtgaaggctgtgaccgtatatatgcaacccggtcgaatctcctccgacacatttttaataagcataatgacaaacataaggctcatttgattcgtccaagaagattaacaccaggccaggaaaatatgtcaagcaaggcaaaccaagaaaaatcaaagtctaaacatcgggggaccaagcacagcagatgtggaaaggaaggaataaaaatgcccaagaccaaacgaaagaaaaaaaataatttagaaaacaagaatgcaaagattgtgcagattgaagaaaataagccttattctctgaaacgtgggaagcatgtatattctataaaggctagaaatgatgccctgtctgagtgtacaagcagatttgtaacccagtatccatgtatgataaagggatgtacttcagttgttacaagtgaaagcaatataattagacattataagtgccataaattatctaaggcatttacatcacaacaccgaaatcttcttattgtattcaaacggtgttgcaactcacaagtaaaggaaacgtctgagcaagaaggtgctaagaatgatgtgaaagattctgacacgtgtgtatcagagagcaatgataattcaagaacaacagctacagtttcacaaaaggaagttgaaaaaaatgaaaaagatgaaatggatgaactaacagaattgtttattacaaaattaataaatgaagatagcacaagtgtagagacccaagctaatacttcttcaaatgtaagtaatgattttcaggaagataacctctgccagtcagaaagacaaaaagcaagtaatttgaagagagttaataaggaaaaaaatgtctcacaaaataaaaaaaggaaagttgaaaaagctgaaccagcatcagcagctgagttaagtagcgtgcgtaaagaagaagaaactgctgttgccattcaaaccattgaggagcatcctgcatcttttgactggagctcttttaagccaatgggatttgaagtatcatttctgaagtttcttgaggagtctgcagtgaagcagaagaaaaatactgacaaagaccatccgaatactggaaacaaaaaaggatcccattcaaattcaagaaaaaatattgataagactgctgtgactagtggaaatcatgtatgtccttgtaaagaaagcgaaacgtttgtacagtttgccaatccatcacagcttcagtgcagtgataatgtaaaaattgttttagacaagaatcttaaagattgcactgagcttgtcttaaagcaacttcaggaaatgaaacctaccgtcagtctgaaaaaacttgaagtacattcaaatgatccagatatgtctgttatgaaagatatcagtataggtaaagccacaggcagaggtcagtactgataattaatgtagtataaatacatcatttaccattttattttaaataggaagccatcaagcatgctagaattgtgaaactttcattatatttttttgttgttgacatgaattaacctggccaaaaacaaaaaagaaaaaaaaaacatgacatttgtcatgtaaaacttttttttatccctatgggacttgaggaacagaatcagtacttcagttattgtaaatagtgagctaaacctcaaatttctatcacccagttgcccttttcatgaactaaacaattatctgtgtgattggtatgtttcaccaggtcactgctcatgtataacagtactctttatttgtagataccttttttgtatatatttattattgtaaatcatgtgctgccaccagcagtctgtaagtctaaactattaaatgacacatttatatttggaattttaatttttaactaagcgatcaagttttttaaattgttcttttattgttttaaattaagaactttttgaactaaaaccagaaactctgccatagttcattgatttttacatgaaacatttatttacaagatgatatcaagattacttttcacaaaataggcacattatatcaacactttgctctgctttgtaaatttgccatccaggattttggggtggtattcatgtgaaattaaagcagattctctagcagtttcctatagctacagtttttttttttcattgcttctaattggatatagttactatgagtccatgaaatacaatggaaatgtgaataaagaatttactacattgaagattttaaacatttggtattatgaggtggtgatttgtgaagtagcccagtattgccttaaataaaatcacatttcatttcttgttttatacatgtgatcttataaagattttttgttttgttttgttttccattttctgagatttatagattggtgtatagctttaaactgtataaagttttgtggaaagatttttttaaacatttttataaatcttaaaattgatatcatcaaagtgagcccatcttgtgtttataaaatacaagagtccttaacatttataattacatagataaaacactttctataaggaagttggatgttttgattttactgtttatagatgttagattgtacagatttgtctgtatttctcaccatatctaatgatacttttttcattagattggtcttcaagaacagtattagttataattattttggttattcagtatatagttagctcttacagtttagctttattcaccatatttatactgtggattcacagcgagaggtagaggttattccaggagagttgatgaccttcatttaaagtccaactaaaatcagtagtagaaacataagaaaacatctttgcaatatttacttttgtttctgtttgccgtaaatagtaacattgtttttttttattttgtgtttgttataaaacagttgcattcacaatattattggcctgagatattgatgatattgtgatggtatgaaaatgtgtacattccctgtgcaacatcagatttgcaggaaaaatgaagcacttactgaaatcgctggtactctgaataaataagcatggtcaaggagtgaactattttcttttggaaatttctttttaatttttattattaaagtattttatttttagggccttttgggttttattgaatagttcatttcacctgtttaagacttactaccaataagcataaaacctgacacgttaaaatccctgccctttggtgagcccactgttatttattaaaataaaagttattttatgggtgattaaaaca

SEQ ID NO: 320643 - DNA, 4572 bp, Homo sapiens
gtttcccaatcccttgagtttccaacaagatacagtgcttacagaaattaaaattagaaaatgacctatccactccagcatcccaatgtgtactgataaatacatcagtgacactgactcccacgcctgttaaatcaactgcagatatcacagttattcagccagtttctgaaatgataaacattcaatttaatgacaaagttaataaaccctttgtgtgtcaaaaccaaggctgtaactacagtgctatgacaaaggatgcactatttaagcactatggtaaaattcatcaatacactccagaaatgattcttgaaattaagaagaatcaattgaaatttgctccctttaaatgtgtagtacctacatgtacaaaaacatttacaagaaattctaacctccgggcacactgtcagttggtgcatcattttacaactgaagaaatggtaaagttaaaaattaaaaggccttatggaagaaaatctcagagtgaaaatgtgccggcctcacgaagtacacaagtgaaaaaacagctagctatgacagaggaaaataaaaaggaatctcagcctgctttagaattgagagcagagacccaaaatacccacagtaatgtagcagtgatcccagaaaaacaacttgtagaaaaaaaaagtcctgacaaaacagaaagttctttacaagtgattacagttacttcagaacaatgtaatacaaatgcactcacaaacacacaaaccaaaggacggaagattaggaggcataaaaaagaaaaggaggagaaaaaacgaaagaagccagtttcccaatcccttgagtttccaacaagatacagtccttacagaccttatcgatgtgttcaccagggatgctttgctgcctttacgatacagcaaaatttgattctccattaccaggctgtacacaaatcagatctacctgcattttcagcagaggtcgaagaggaaagtgaagctggtaaagaaagtgaagaaactgaaactaaacaaactttgaaagaatttcgatgtcaggtaagtgactgttctcgaattttccaagcaattactggcctaatacaacactacatgaaacttcatgaaatgactcctgaagaaattgaaagtatgactgcttcagtggatgttgggaagtttccatgtgaccagttagagtgtaaatcttcatttactacatatttgaactatgttgttcatctagaggcagaccacgggattggactaagggcaagtaaaacagaagaagatggtgtatacaaatgtgattgtgaaggctgtgaccgtatatatgcaacccggtcgaatctcctccgacacatttttaataagcataatgacaaacataaggctcatttgattcgtccaagaagattaacaccaggccaggaaaatatgtcaagcaaggcaaaccaagaaaaatcaaagtctaaacatcgggggaccaagcacagcagatgtggaaaggaaggaataaaaatgcccaagaccaaacgaaagaaaaaaaataatttagaaaacaagaatgcaaagattgtgcagattgaagaaaataagccttattctctgaaacgtgggaagcatgtatattctataaaggctagaaatgatgccctgtctgagtgtacaagcagatttgtaacccagtatccatgtatgataaagggatgtacttcagttgttacaagtgaaagcaatataattagacattataagtgccataaattatctaaggcatttacatcacaacaccgaaatcttcttattgtattcaaacggtgttgcaactcacaagtaaaggaaacgtctgagcaagaaggtgctaagaatgatgtgaaagattctgacacgtgtgtatcagagagcaatgataattcaagaacaacagctacagtttcacaaaaggaagttgaaaaaaatgaaaaagatgaaatggatgaactaacagaattgtttattacaaaattaataaatgaagatagcacaagtgtagagacccaagctaatacttcttcaaatgtaagtaatgattttcaggaagataacctctgccagtcagaaagacaaaaagcaagtaatttgaagagagttaataaggaaaaaaatgtctcacaaaataaaaaaaggaaagttgaaaaagctgaaccagcatcagcagctgagttaagtagcgtgcgtaaagaagaagaaactgctgttgccattcaaaccattgaggagcatcctgcatcttttgactggagctcttttaagccaatgggatttgaagtatcatttctgaagtttcttgaggagtctgcagtgaagcagaagaaaaatactgacaaagaccatccgaatactggaaacaaaaaaggatcccattcaaattcaagaaaaaatattgataagactgctgtgactagtggaaatcatgtatgtccttgtaaagaaagcgaaacgtttgtacagtttgccaatccatcacagcttcagtgcagtgataatgtaaaaattgttttagacaagaatcttaaagattgcactgagcttgtcttaaagcaacttcaggaaatgaaacctaccgtcagtctgaaaaaacttgaagtacattcaaatgatccagatatgtctgttatgaaagatatcagtataggtaaagccacaggcagaggtcagtactgataattaatgtagtataaatacatcatttaccattttattttaaataggaagccatcaagcatgctagaattgtgaaactttcattatatttttttgttgttgacatgaattaacctggccaaaaacaaaaaagaaaaaaaaaacatgacatttgtcatgtaaaacttttttttatccctatgggacttgaggaacagaatcagtacttcagttattgtaaatagtgagctaaacctcaaatttctatcacccagttgcccttttcatgaactaaacaattatctgtgtgattggtatgtttcaccaggtcactgctcatgtataacagtactctttatttgtagataccttttttgtatatatttattattgtaaatcatgtgctgccaccagcagtctgtaagtctaaactattaaatgacacatttatatttggaattttaatttttaactaagcgatcaagttttttaaattgttcttttattgttttaaattaagaactttttgaactaaaaccagaaactctgccatagttcattgatttttacatgaaacatttatttacaagatgatatcaagattacttttcacaaaataggcacattatatcaacactttgctctgctttgtaaatttgccatccaggattttggggtggtattcatgtgaaattaaagcagattctctagcagtttcctatagctacagtttttttttttcattgcttctaattggatatagttactatgagtccatgaaatacaatggaaatgtgaataaagaatttactacattgaagattttaaacatttggtattaaaaaaaaatcctttgtgaatgtgatagaaaactagtagtgtggagcagtgtaaatatttgaggtggtgatttgtgaagtagcccagtattgccttaaataaaatcacatttcatttcttgttttatacatgtgatcttataaagattttttgttttgttttgttttccattttctgagatttatagattggtgtatagctttaaactgtataaagttttgtggaaagatttttttaaacatttttataaatcttaaaattgatatcatcaaagtgagcccatcttgtgtttataaaatacaagagtccttaacatttataattacatagataaaacactttctataaggaagttggatgttttgattttactgtttatagatgttagattgtacagatttgtctgtatttctcaccatatctaatgatacttttttcattagattggtcttcaagaacagtattagttataattattttggttattcagtatatagttagctcttacagtttagctttattcaccatatttatactgtggattcacagcgagaggtagaggttattccaggagagttgatgaccttcatttaaagtccaactaaaatcagtagtagaaacataagaaaacatctttgcaatatttacttttgtttctgtttgccgtaaatagtaacattgtttttttttattttgtgtttgttataaaacagttgcattcacaatattattggcctgagatattgatgatattgtgatggtatgaaaatgtgtacattccctgtgcaacatcagatttgcaggaaaaatgaagcacttactgaaatcgctggtactctgaataaataagcatggtcaaggagtgaactattttcttttggaaatttctttttaatttttattattaaagtattttatttttagggccttttgggttttattgaatagttcatttcacctgtttaagacttactaccaataagcataaaacctgacacgttaaaatccctgccctttggtgagcccactgttatttattaaaataaaagttattttatgggtgattaaaaca

SEQ ID NO: 320644 - DNA, 765 bp, Homo sapiens
acggtggctcacgcctgtaatcccagcactttgggaggccaaggcgggtggatcacctaaggtcaggagttcgtgaccagcctggcctgttaacatggtaaaaccctatctctattaaaaatacaaaaattagctgggcatggtggtgggcacctgtagtgccagctactcgggaggctgaggcatgagaattgcttgaactcaggaggtggaggttgcagtgaaccgacattgtgctactacactccagcctggatgacagagcaagactccgtctcaaaaaaaaaagaaaaaagaaagaaaacacctgagccctgccaagggggagctgtcttccccaaaccaacaaacctcctaaagatagctgggagcccatcctaccagctctgatttggggctggtttgtgagttactgttaggagtaagtccctagaagtgataaaagataaatcaacccaacgtttgatttataagatatatcagactgataactagtgacaatgttaatctaattacaattcaaaaatctcatcacatccattttccatgctatttcattaacttgggcttttgccaacaattcaacattttaagcgtgaccgaattcacgcttcattccttcggtgtgggtgatgacctgctccagggtgagggtctcagagcccctcttccacccagtggcccatatgccggccctagggagccctttttctagcccacaatcctttcccagcatcacagtctagagcacctccatctcctggt

SEQ ID NO: 320645 - DNA, 1013 bp, Homo sapiens
tttagtagagaaggggtctctccatgttgcccaggctggtctcgaactcttgggctcaagcaatccttccgactcggcctcccaaagtgctggaattacaggcgtaagccaccgcgtccagccagaaccagcatcttttctgcacggctggagttgggaattttccacagcttagcgcactgctccttagcttttcgctttgccacagtggaaagcagattttccaagaatcctggcggagccaagatcggctcgcccgcccccgcctcacgctggctcctgataggcagctagagctgtccgttttgacagaaacctttgcgcagcgggcagaaaggcacaggactcgctaagtgttcgctacgcggggctaccggatcggtcggaaatggcagaggtggaggagacactgaagcgactgcagagccagaagggagtgcagggaatcatcgtcgtgaacacagaaggcattcccatcaagagcaccatggacaaccccaccaccacccagtatgccagcctcatgcacagcttcatcctgaaggcacggagcaccgtgcgtgacatcgacccccagaacgatctcaccttccttcgaattcgctccaagaaaaatgaaattatggttgcaccagataaagactatttcctgattgtgattcagaatccaaccgaataagccactctcttggctccctgtgtcattccttaatttaatgccccccaagaatgttaatgtcaatcatgtcagtggactagcacatggcagtcgcttggaacccactcacaccaatccagtgaccgtgtgtgggctggcggctcttctcccccaccaacggaacccctgtgtgcaccaaccttccccagagctccggagcgccctctcctcacttccaggttttggagcaagagcttgcaggaagcccgcacccagcttccttctgaccttcagttcactttgtcgcccttggagaaagctgtttttctttaactaaaaataaccaaaatgctta

SEQ ID NO: 320646 - DNA, 1092 bp, Homo sapiens
tttagtagagaaggggtctctccatgttgcccaggctggtctcgaactcttgggctcaagcaatccttccgactcggcctcccaaagtgctggaattacaggcgtaagccaccgcgtccagccagaaccagcatcttttctgcacggctggagttgggaattttccacagcttagcgcactgctccttagcttttcgctttgccacagtggaaagcagattttccaagaatcctggcggagccaagatcggctcgcccgcccccgcctcacgctggctcctgataggcagctagagctgtccgttttgacagaaacctttgcgcagcgggcagaaaggcacaggactcgctaagtgttcgctacgcggggctaccggatcggtcggaaatggctgaagtggagagatcgcctgagcccaggaggtcaaggctacagtgagccgtgactgcaccactgcactccaccctgggcagaggtggaggagacactgaagcgactgcagagccagaagggagtgcagggaatcatcgtcgtgaacacagaaggcattcccatcaagagcaccatggacaaccccaccaccacccagtatgccagcctcatgcacagcttcatcctgaaggcacggagcaccgtgcgtgacatcgacccccagaacgatctcaccttccttcgaattcgctccaagaaaaatgaaattatggttgcaccagataaagactatttcctgattgtgattcagaatccaaccgaataagccactctcttggctccctgtgtcattccttaatttaatgccccccaagaatgttaatgtcaatcatgtcagtggactagcacatggcagtcgcttggaacccactcacaccaatccagtgaccgtgtgtgggctggcggctcttctcccccaccaacggaacccctgtgtgcaccaaccttccccagagctccggagcgccctctcctcacttccaggttttggagcaagagcttgcaggaagcccgcacccagcttccttctgaccttcagttcactttgtcgcccttggagaaagctgtttttctttaactaaaaataaccaaaatgctta

SEQ ID NO: 320647 - DNA, 651 bp, Homo sapiens
cggcacgagcggcacgagcggcacgagtggcagaggtggaggagacactgaagcgactgcagagccagaagggagtgcagggaatcatcgtcgtgaacacagaaggcattcccatcaagagcaccatggacaaccccaccaccacccagtatgccagcctcatgcacagcttcatcctgaaggcacggagcaccgtgcgtgacatcgacccccagaacgatctcaccttccttcgaattcgctccaagaaaaatgaaattatggttgcaccagataaagactatttcctgattgtgattcagaatccaaccgaataagccactctcttggctccctgtgtcattccttaatttaatgccccccaagaatgttaatgtcaatcatgtcagtggactagcacatggcagtcgcttggaacccactcacaccaatccagtgaccgtgtgtgggctggcggctcttctcccccaccaacggaacccctgtgtgcaccaaccttccccagagctccggagcgccctctcctcacttccaggttttggagcaagagcttgcaggaagcccgcacccagcttccttctgaccttcagttcactttgtcgcccttggagaaagctgtttttctttaactaaaaataaccaaaatgctta

SEQ ID NO: 320648 - DNA, 677 bp, Homo sapiens
ggaagttaatcctgcctatctgcctctcctaaccttggtcttgttttctggcagggcagaggtggaggagacactgaagcgactgcagagccagaagggagtgcagggaatcatcgtcgtgaacacagaaggcattcccatcaagagcaccatggacaaccccaccaccacccagtatgccagcctcatgcacagcttcatcctgaaggcacggagcaccgtgcgtgacatcgacccccagaacgatctcaccttccttcgaattcgctccaagaaaaatgaaattatggttgcaccagataaagactatttcctgattgtgattcagaatccaaccgaataagccactctcttggctccctgtgtcattccttaatttaatgccccccaagaatgttaatgtcaatcatgtcagtggactagcacatggcagtcgcttggaacccactcacaccaatccagtgaccgtgtgtgggctggcggctcttctcccccaccaacggaacccctgtgtgcaccaaccttccccagagctccggagcgccctctcctcacttccaggttttggagcaagagcttgcaggaagcccgcacccagcttccttctgaccttcagttcactttgtcgcccttggagaaagctgtttttctttaactaaaaataaccaaaatgctta

SEQ ID NO: 320649 - DNA, 1207 bp, Homo sapiens
tttagtagagaaggggtctctccatgttgcccaggctggtctcgaactcttgggctcaagcaatccttccgactcggcctcccaaagtgctggaattacaggcgtaagccaccgcgtccagccagaaccagcatcttttctgcacggctggagttgggaattttccacagcttagcgcactgctccttagcttttcgctttgccacagtggaaagcagattttccaagaatcctggcggagccaagatcggctcgcccgcccccgcctcacgctggctcctgataggcagctagagctgtccgttttgacagaaacctttgcgcagcgggcagaaaggcacaggactcgctaagtgttcgctacgcggggctaccggatcggtcggaaatggctgaagtggagagatcgcctgagcccaggaggtcaaggctacagtgagccgtgactgcaccactgcactccaccctgggcagaggtggaggagacactgaagcgactgcagagccagaagggagtgcagggaatcatcgtcgtgaacacagaaggcattcccatcaagagcaccatggacaaccccaccaccacccagtatgccagcctcatgcacagcttcatcctgaaggcacggagcaccgtgcgtgacatcgacccccagaacgatctcaccttccttcgaattcgctccaagaaaaatgaaattatggttgcaccagataaagactatttcctgattgtgattcagaatccaaccgaataagccactctcttggctccctgtgtcattccttaatttaatgccccccaagaatgttaatgtcaatcatgtcagtggactagcacatggcagtcgcttggaacccactcacaccaatccagtgaccgtgtgtgggctggcggctcttctcccccaccaacggaacccctgtgtgcaccaaccttccccagagctccggagcgccctctcctcacttccaggttttggagcaagagcttgcaggaagcccgcacccagcttccttctgaccttcagttcactttgtcgcccttggagaaagctgtttttctttaactaaaaataaccaaaatgcttatgaaagcgtcagacaaggacaagaaactctagactagtctcccccatccgtgcactgaaatttagaacagcgcggggggcgcttcagctaccctgagcacatcagcttccctcgt

SEQ ID NO: 320650 - DNA, 765 bp, Homo sapiens
ggctaggtagaggcggggtttatcggccgaggcggatcggtcggaaaggcagaggtggaggagacactgaagcgactgcagagccagaagggagtgcagggaatcatcgtcgtgaacacagaaggcattcccatcaagagcaccatggacaaccccaccaccacccagtatgccagcctcatgcacagcttcatcctgaaggcacggagcaccgtgcgtgacatcgacccccagaacgatctcaccttccttcgaattcgctccaagaaaaatgaaattatggttgcaccagataaagactatttcctgattgtgattcagaatccaaccgaataagccactctcttggctccctgtgtcattccttaatttaatgccccccaagaatgttaatgtcaatcatgtcagtggactagcacatggcagtcgcttggaacccactcacaccaatccagtgaccgtgtgtgggctggcggctcttctcccccaccaacggaacccctgtgtgcaccaaccttccccagagctccggagcgccctctcctcacttccaggttttggagcaagagcttgcaggaagcccgcacccagcttccttctgaccttcagttcactttgtcgcccttggagaaagctgtttttctttaactaaaaataaccaaaatgcttacgaacccagcttccttctgaccttcagttcacttggtcgcccttggagaacgctgtttctttaactaaaaataacagatgcttaaaaagaaagga

SEQ ID NO: 320651 - DNA, 415 bp, Homo sapiens
acatttagtgattttttttcatttttctcttttgcagataaagactatttcctgattgtgattcagaatccaaccgaataagccactctcttggctccctgtgtcattccttaatttaatgccccccaagaatgttaatgtcaatcatgtcagtggactagcacatggcagtcgcttggaacccactcacaccaatccagtgaccgtgtgtgggctggcggctcttctcccccaccaacggaacccctgtgtgcaccaaccttccccagagctccggagcgccctctcctcacttccaggttttggagcaagagcttgcaggaagcccgcacccagcttccttctgaccttcagttcactttgtcgcccttggagaaagctgtttttctttaactaaaaataaccaaaatgctta

SEQ ID NO: 320652 - DNA, 1426 bp, Homo sapiens
tttagtagagaaggggtctctccatgttgcccaggctggtctcgaactcttgggctcaagcaatccttccgactcggcctcccaaagtgctggaattacaggcgtaagccaccgcgtccagccagaaccagcatcttttctgcacggctggagttgggaattttccacagcttagcgcactgctccttagcttttcgctttgccacagtggaaagcagattttccaagaatcctggcggagccaagatcggctcgcccgcccccgcctcacgctggctcctgataggcagctagagctgtccgttttgacagaaacctttgcgcagcgggcagaaaggcacaggactcgctaagtgttcgctacgcggggctaccggatcggtcggaaatggtgagcgtgcgccggggtcttgtggctggcggccgcccaccaccccacgccaggccttcagtcttccgaggatgaggggatctcagagctccggacagggaatcggtggtggctgggcgtggccgggcccgggccccagccgacttgagggtggaacccggcggcggaggcctctaaagcctgaccgaggcggggccgccggatcccgctgccccttgaccggaagcgggagcccagcctcggccaggaagagatgatgggcgaggggtgggcggcggcctgcagcctagagttttggggccttggtgcgcgatggcaaccctgccaacgtttcccgggagctcagtttgtggcaggctctgcaagcactttatgtatcttgtatttcctccgcctcctcccagctctgtgaggcagaggtggaggagacactgaagcgactgcagagccagaagggagtgcagggaatcatcgtcgtgaacacagaaggcattcccatcaagagcaccatggacaaccccaccaccacccagtatgccagcctcatgcacagcttcatcctgaaggcacggagcaccgtgcgtgacatcgacccccagaacgatctcaccttccttcgaattcgctccaagaaaaatgaaattatggttgcaccagataaagactatttcctgattgtgattcagaatccaaccgaataagccactctcttggctccctgtgtcattccttaatttaatgccccccaagaatgttaatgtcaatcatgtcagtggactagcacatggcagtcgcttggaacccactcacaccaatccagtgaccgtgtgtgggctggcggctcttctcccccaccaacggaacccctgtgtgcaccaaccttccccagagctccggagcgccctctcctcacttccaggttttggagcaagagcttgcaggaagcccgcacccagcttccttctgaccttcagttcactttgtcgcccttggagaaagctgtttttctttaactaaaaataaccaaaatgctta

SEQ ID NO: 320653 - DNA, 666 bp, Homo sapiens
taagtgcgcggccggtcggcccggatcggtcggaaatggctagagcagaggtggaggagacactgaagcgactgcagagccagaagggagtgcagggaatcatcgtcgtgaacacagaaggcattcccatcaagagcaccatggacaaccccaccaccacccagtatgccagcctcatgcacagcttcatcctgaaggcacggagcaccgtgcgtgacatcgacccccagaacgatctcaccttccttcgaattcgctccaagaaaaatgaaattatggttgcaccagataaagactatttcctgattgtgattcagaatccaaccgaataagccactctcttggctccctgtgtcattccttaatttaatgccccccaagaatgttaatgtcaatcatgtcagtggactagcacatggcagtcgcttggaacccactcacaccaatccagtgaccgtgtgtgggctggcggctcttctcccccaccaacggaacccctgtgtgcaccaaccttccccagagctccggagcgccctctcctcacttccaggttttggagcaagagcttgcaggaagcccgcacccagcttccttctgaccttcagttcactttgtcgcccttggagaaagctgtttttctttaactaaaaataaccaaaatgctta

SEQ ID NO: 320654 - DNA, 1217 bp, Homo sapiens
tttagtagagaaggggtctctccatgttgcccaggctggtctcgaactcttgggctcaagcaatccttccgactcggcctcccaaagtgctggaattacaggcgtaagccaccgcgtccagccagaaccagcatcttttctgcacggctggagttgggaattttccacagcttagcgcactgctccttagcttttcgctttgccacagtggaaagcagattttccaagaatcctggcggagccaagatcggctcgcccgcccccgcctcacgctggctcctgataggcagctagagctgtccgttttgacagaaacctttgcgcagcgggcagaaaggcacaggactcgctaagtgttcgctacgcggggctaccggatcggtcggaaatggctgaagtggagagatcgcctgagcccaggaggtcaaggctacagtgagccgtgactgcaccactgcactccaccctggagatggagtctcactctgttgcccagactggagttcagtggctcaatctcagctcactgcaacctctgcctcccaggttcaagtgattttcctgcctcagcctcctgagtagctgggattaacaggcagaggtggaggagacactgaagcgactgcagagccagaagggagtgcagggaatcatcgtcgtgaacacagaaggcattcccatcaagagcaccatggacaaccccaccaccacccagtatgccagcctcatgcacagcttcatcctgaaggcacggagcaccgtgcgtgacatcgacccccagaacgatctcaccttccttcgaattcgctccaagaaaaatgaaattatggttgcaccagataaagactatttcctgattgtgattcagaatccaaccgaataagccactctcttggctccctgtgtcattccttaatttaatgccccccaagaatgttaatgtcaatcatgtcagtggactagcacatggcagtcgcttggaacccactcacaccaatccagtgaccgtgtgtgggctggcggctcttctcccccaccaacggaacccctgtgtgcaccaaccttccccagagctccggagcgccctctcctcacttccaggttttggagcaagagcttgcaggaagcccgcacccagcttccttctgaccttcagttcactttgtcgcccttggagaaagctgtttttctttaactaaaaataaccaaaatgctta

SEQ ID NO: 320655 - DNA, 1043 bp, Homo sapiens
  misc_feature (1023)..(1023): n is a, c, g, or t
tttagtagagaaggggtctctccatgttgcccaggctggtctcgaactcttgggctcaagcaatccttccgactcggcctcccaaagtgctggaattacaggcgtaagccaccgcgtccagccagaaccagcatcttttctgcacggctggagttgggaattttccacagcttagcgcactgctccttagcttttcgctttgccacagtggaaagcagattttccaagaatcctggcggagccaagatcggctcgcccgcccccgcctcacgctggctcctgataggcagctagagctgtccgttttgacagaaacctttgcgcagcgggcagaaaggcacaggactcgctaagtgttcgctacgcggggctaccggatcggtcggaaatggcagaggtggaggagacactgaagcgactgcagagccagaagggagtgcagggaatcatcgtcgtgaacacagaaggcattcccatcaagagcaccatggacaaccccaccaccacccagtatgccagcctcatgcacagcttcatcctgaaggcacggagcaccgtgcgtgacatcgacccccagaacgatctcaccttccttcgaattcgctccaagaaaaatgaaattatggttgcaccagataaagactatttcctgattgtgattcagaatccaaccgaataagccactctcttggctccctgtgtcattccttaatttaatgccccccaagaatgttaatgtcaatcatgtcagtggactagcacatggcagtcgcttggaacccactcacaccaatccagtgaccgtgtgtgggctggcggctcttctcccccaccaacggaacccctgtgtgcaccaaccttccccagagctccggagcgccctctcctcacttccaggttttggagcaagagcttgcaggaagcccgcacccagcttccttctgaccttcagttcactttgtcgcccttggagaaagctgtttttctttaactaaaaataaccaaaatgcttagatatatcangggggatcctctagaacgcc

SEQ ID NO: 320656 - DNA, 1148 bp, Homo sapiens
  misc_feature (997)..(997): n is a, c, g, or t
  misc_feature (1013)..(1013): n is a, c, g, or t
  misc_feature (1088)..(1088): n is a, c, g, or t
  misc_feature (1147)..(1147): n is a, c, g, or t
tttagtagagaaggggtctctccatgttgcccaggctggtctcgaactcttgggctcaagcaatccttccgactcggcctcccaaagtgctggaattacaggcgtaagccaccgcgtccagccagaaccagcatcttttctgcacggctggagttgggaattttccacagcttagcgcactgctccttagcttttcgctttgccacagtggaaagcagattttccaagaatcctggcggagccaagatcggctcgcccgcccccgcctcacgctggctcctgataggcagctagagctgtccgttttgacagaaacctttgcgcagcgggcagaaaggcacaggactcgctaagtgttcgctacgcggggctaccggatcggtcggaaatggcagaggtggaggagacactgaagcgactgcagagccagaagggagtgcagggaatcatcgtcgtgaacacagaaggcattcccatcaagagcaccatggacaaccccaccaccacccagtatgccagcctcatgcacagcttcatcctgaaggcacggagcaccgtgcgtgacatcgacccccagaacgatctcaccttccttcgaattcgctccaagaaaaatgaaattatggttgcaccagataaagactatttcctgattgtgattcagaatccaaccgaataagccactctcttggctccctgtgtcattccttaatttaatgccccccaagaatgttaatgtcaatcatgtcagtggactagcacatggcagtcgcttggaacccactcacaccaatccagtgaccgtgtgtgggctggcggctcttctcccccaccaacggaacccctgtgtgcaccaaccttccccagagctccggagcgccctctcctcacttccaggttttggagcaagagcttgcaggaagcccgcacccagcttccgggtgcagccaatatgcttaactatactacagtgaacataaccacacttaaagtggtnggaaagaaaaggggtnagcaactttggaaaacagtattttgactaaataccataagagtaaagacaaaaagttacagtcttggatacaggnctttttggctttactcttatggggattttagtcaaaatggggtgccagccaatatgggna

SEQ ID NO: 320657 - DNA, 2249 bp, Homo sapiens
tttagtagagaaggggtctctccatgttgcccaggctggtctcgaactcttgggctcaagcaatccttccgactcggcctcccaaagtgctggaattacaggcgtaagccaccgcgtccagccagaaccagcatcttttctgcacggctggagttgggaattttccacagcttagcgcactgctccttagcttttcgctttgccacagtggaaagcagattttccaagaatcctggcggagccaagatcggctcgcccgcccccgcctcacgctggctcctgataggcagctagagctgtccgttttgacagaaacctttgcgcagcgggcagaaaggcacaggactcgctaagtgttcgctacgcggggctaccggatcggtcggaaatggtgagcgtgcgccggggtcttgtggctggcggccgcccaccaccccacgccaggccttcagtcttccgaggatgaggggatctcagagctccggacagggaatcggtggtggctgggcgtggccgggcccgggccccagccgacttgagggtggaacccggcggcggaggcctctaaagcctgaccgaggcggggccgccggatcccgctgccccttgaccggaagcgggagcccagcctcggccaggaagagatgatgggcgaggggtgggcggcggcctgcagcctagagttttggggccttggtgcgcgatggcaaccctgccaacgtttcccgggagctcagtttgtggcaggctctgcaagcactttatgtatcttgtatttcctccgcctcctcccagctctgtgaggcagaggtggaggagacactgaagcgactgcagagccagaagggagtgcagggaatcatcgtcgtgaacacagaaggaggctgggagcccttgggacactgtggagacaggagcaggccccctgctcagggctgcccctgatcagttgggtggcctgaggcaactcctttccccgcttcagccctcaactgcctcgagtcctgtgatggtccagggaatctcttttgggcacttcttgctctaagacctgaaagacttttgtcactaagagagaaactgtcttctgggactggacattttgactccaaggagacaaccccaggggccaacagccccagctgtgacccccaggcttccacatgaactcacaaaggagaggccctcattcttgccttaaaactgcccctaaagccaagccttttcactgggaagccctagctgcttaccttttggatactagtgagtgctgcttttttgtatactcatggggctgattgcaccatagctgagaacgtggaatgcagaatgagcccacctggctttgaatctgggccctacttaacttatcagctatgtggttttgggcataagccactttctctgttaagttttctcatttgtaaaatgtgggtcataattctgccttcctctaggggaagcttttagaatagtgcctggcatgaaatgcctatgaatgtctcagttagtgtgtgtgtgtctttaacttgcgtcccattctcagggcccccacatcagtgtctcgtttacatctcacacagtgaccctgcgaggcaagggtttgcccagtttgcagatgagaaacccaaagctgagagaggtgtggggaaccgcccaaggtcacccagctgtgaatgaacgtggtcagaacacagaatctgagttggtcacacttcccactgatccatggggcctttaagccctctggaagcttccattaaagatgattatttgaggataattgtattgggatgcctatgatcttatctagggttttcctacccatccccaacattcagctcagctgcctctttcttgaggacaccctcactgatcaccccagcccagccagagtggttgctcctgctcctgcccctgaacctatgacatacccaagtcccaatactttcgagccatctgccactgccttttgacatctctgccttggctagattcaaatggtgtttcataataaaagtctgagtttaagcagctttaccgaaaacgcaagggaagtttcattccatttatacttctccagaccccctgccatcctctgctgctacccacacaggcagaataaaaggcttaaatgtgtaagtcccatgaaggcaaagattggtctcttgtgttcactgctgtctgtagtacttaggatggtgttggcccagagttggtgtttgattaaagtatctgttgaatttttt

SEQ ID NO: 320658 - DNA, 793 bp, Homo sapiens
tttagtagagaaggggtctctccatgttgcccaggctggtctcgaactcttgggctcaagcaatccttccgactcggcctcccaaagtgctggaattacaggcgtaagccaccgcgtccagccagaaccagcatcttttctgcacggctggagttgggaattttccacagcttagcgcactgctccttagcttttcgctttgccacagtggaaagcagattttccaagaatcctggcggagccaagatcggctcgcccgcccccgcctcacgctggctcctgataggcagctagagctgtccgttttgacagaaacctttgcgcagcgggcagaaaggcacaggactcgctaagtgttcgctacgcggggctaccggatcggtcggaaatggcagaggtggaggagacactgaagcgactgcagagccagaagggagtgcagggaatcatcgtcgtgaacacagaaggcattcccatcaagagcaccatggacaaccccaccaccacccagtatgccagcctcatgcacagcttcatcctgaaggcacggagcaccgtgcgtgacatcgacccccagaacgatctcaccttccttcgaattcgctccaagaaaaatgaaattatggttgcaccagataaagactatttcctgattgtgattcagaatccacttccaggttttggagcaagagcttgcaggaagcccgcacccagcttccttctgaccttcagttcactttgtcgcccttggagaaagctgtttttctttaactaaaaataaccaaaatgctta

SEQ ID NO: 320659 - DNA, 909 bp, Homo sapiens
tttagtagagaaggggtctctccatgttgcccaggctggtctcgaactcttgggctcaagcaatccttccgactcggcctcccaaagtgctggaattacaggcgtaagccaccgcgtccagccagaaccagcatcttttctgcacggctggagttgggaattttccacagcttagcgcactgctccttagcttttcgctttgccacagtggaaagcagattttccaagaatcctggcggagccaagatcggctcgcccgcccccgcctcacgctggctcctgataggcagctagagctgtccgttttgacagaaacctttgcgcagcgggcagaaaggcacaggactcgctaagtgttcgctacgcggggctaccggatcggtcggaaatggtgagcgtgcgccggggtcttgtggctggcggccgcccaccaccccacgccaggccttcagtcttccgaggatgaggggatctcagagctccggacagggaatcggtggtggctgggcgtggccgggcccgggccccagccgacttgagggtggaacccggcggcggaggcctctaaagcctgaccgaggcggggccgccggatcccgctgccccttgaccggaagcgggagcccagcctcggccaggaagagatgatgggcgaggggtgggcggcggcctgcagcctagagttttggggccttggtgcgcgatggcaaccctgccaacgtttcccgggagctcagtttgtggcaggctctgcaagcactttatgtatcttgtatttcctccgcctcctcccagctctgtgaggtagatacaatctttagtcccattttgttatacatatctgttattcagcgccccgagaagccaagtgctttgccccaggaaatagtggagatggatttgaaccct

SEQ ID NO: 320660 - DNA, 670 bp, Homo sapiens
ggctaggtagaggcggggtttatcggccgaggcggatcggtcggaaaggcagaggtggaggagacactgaagcgactgcagagccagaagggagtgcagggaatcatcgtcgtgaacacagaaggcattcccatcaagagcaccatggacaaccccaccaccacccagtatgccagcctcatgcacagcttcatcctgaaggcacggagcaccgtgcgtgacatcgacccccagaacgatctcaccttccttcgaattcgctccaagaaaaatgaaattatggttgcaccagataaagactatttcctgattgtgattcagaatccaaccgaataagccactctcttggctccctgtgtcattccttaatttaatgccccccaagaatgttaatgtcaatcatgtcagtggactagcacatggcagtcgcttggaacccactcacaccaatccagtgaccgtgtgtgggctggcggctcttctcccccaccaacggaacccctgtgtgcaccaaccttccccagagctccggagcgccctctcctcacttccaggttttggagcaagagcttgcaggaagcccgcacccagcttccttctgaccttcagttcactttgtcgcccttggagaaagctgtttttctttaactaaaaataaccaaaatgctta

SEQ ID NO: 320661 - DNA, 1440 bp, Homo sapiens
tttagtagagaaggggtctctccatgttgcccaggctggtctcgaactcttgggctcaagcaatccttccgactcggcctcccaaagtgctggaattacaggcgtaagccaccgcgtccagccagaaccagcatcttttctgcacggctggagttgggaattttccacagcttagcgcactgctccttagcttttcgctttgccacagtggaaagcagattttccaagaatcctggcggagccaagatcggctcgcccgcccccgcctcacgctggctcctgataggcagctagagctgtccgttttgacagaaacctttgcgcagcgggcagaaaggcacaggactcgctaagtgttcgctacgcggggctaccggatcggtcggaaatggcagaggtggaggagacactgaagcgactgcagagccagaagggagtgcagggaatcatcgtcgtgaacacagaaggcattcccatcaagagcaccatggacaaccccaccaccacccagtatgccagcctcatgcacagcttcatcctgaaggcacggagcaccgtgcgtgacatcgacccccagaacgatctcaccttccttcgaattcgctccaagaaaaatgaaattatggttgcaccagataaagactatttcctgattgtgattcagaatccaaccgaataagccactctcttggctccctgtgtcattccttaatttaatgccccccaagaatgttaatgtcaatcatgtcagtggactagcacatggcagtcgcttggaacccactcacaccaatccagtgaccgtgtgtgggctggcggctcttctcccccaccaacggaacccctgtgtgcaccaaccttccccagagctccggagcgccctctcctcacttccaggttttggagcaagagcttgcaggaagcccgcacccagcttccttctgaccttcagttcactttgtcgcccttggagaaagctgtttttctttaactaaaaataaccaaaatgcttaaaaaaaaaacaaaaacaaaaaaaacaaagggggggggagctctaaaaaatccccctagggaggggcacccacgtgttatgcggcagtcacccagcttactggtcacaacaggtggccccctaattgatgaaagcctatgtaaacaggacatgagaacatggccggctggtaaacagacgtcgcgacacggggacaacactgggacacaccttggcgacctcctgtgcgtaagagcgaaccctttaatccctgtggggagggccgacaattctatggggacaacaactctcccgtcgagaagtaatctaacaggcccctggagggagactctactaccagctgtcagggcggtcaacaggtggtacaacacagcacacatgcataccctcatagaaattggcctaccgaattgtactcgacattttcg

SEQ ID NO: 320662 - DNA, 3050 bp, Homo sapiens
tgagacggagtcttgcactgttgcccaggctggagacagtggtgtgatcttggctcactgcagtctccacctctcaaattcaagtgattctcctgcctcagcctcccaagtagctgggattataggtgcccgccaccctgcctggctaatttttgtatttttagtaaagatggggttttgtaacattggccaggctggtctcaaactcctgacctcaactgaactgcccccatcgggcttccaaagtgttgggattagaggtctgagctactgggcccgggcaaacttggaaacatttttttccttcctagtgcctcagttttctcaaatgtaaaatgggaataaaatatctaccttgtaagacttttgtgagggtctaataactgttatatacattatctcatttaatcttcacaacaacctttaaaatagggatacgatcattctcaatttacagttgagtgaaagtgaggcagttcagatggcttgactaaggttacctggcatttgagtggcagagccaagatttaaacccagctctgtctgatgctagaccctttgcttcaaccatattctgtaatgtctcatttctaggaatgaatgaaggaatgttcacacatgtatcatccagcctctgaggtgcctctgacaaccataattgcctcctcatgaaaccgagcccagttcctcctgtggctcttcctgctgcagccgtgggccttgctctcctggctggaagcgctgttttcatcttatctggggattctcattgctgacggtgctggaggctgtggggcacagtggtttcaagcacaggctttggagtcaggcaaacctgggtttcaatatggctcaggaagctgttgggcaggaggacttttggtgagcaggcactgtctgataatggtgtttcccaggatcccaggtttcttgggggcacacaagtaggccaaagatgatctgggaacctcccagagaattgcctcatactgtactctccccaagaggctgcagccaagagaataggggccacgtcacgggggctcatgatggagtctgggctttgtgggaaaggaagtggggagggtctcagaaatgtttttacaatgtaaaatcttccagttagaactttatatgcaggatttaatcagaaggaaatttggacaggactcatttttctcattgctgctctaagtggctgctctaagcagtctggactgtctcccctgtggctttgttgagttcagtaaacatttattgtgcacatactgtgtgcaggcactttgctggggatacagggatgaaatagggacagtgcccatgcctgagggcattgccctgaagctggatgctaaggccatctgtgtgtgtgtctgtgtgtctgcatgtatctctgtgtctgcgtgtgtctctgtgtctgtgcttctgtgtctatgtgtatgtctgtgtgagtgtctgtgggtctctttttttgtgtttgtgtgtgtatctgtgtgtgtgttctctgtgtgcctgtatgtgtctttgatgtgtgtttctgtatgtgtctctgtgtgtgtctatatgtgtgtatctgtgtctatgtatgtgtgtgtcattttgtttgtttctgggtgtgtctacctctgcgtgtctctgtatacctgtatctccgtgtgtgtgtctgtgtgtgtgtatttgtgtgtctctgtatgtgcgtccgtgggtgtgtgtctgtgtgtgtgtgtgtgtgtattgagagggagggagaaagaaagggagcgacagatgggtcagcatggaaggtgtatcctcattcacagccctgggaggaatcagtcaatccacctactggtcaagaccaactctggtggtgcctggctgacagtgggaatgtgacttttcatttaagaatgggtttgcatttcctaggaaaagaatgtaggagttggagtctcaaggagtgttttttttttccttttgtgattgagagagcacagccttgtgtgcattggctgacagttaccaatctgcgtgttggggatagccacagagaagagacagagggaaccgcagacagtgagcaggagtctggtggaaccagtctgcctttaggcccaaacccccaactatgaatacctcaccttagggagctcagtcttttgtttgttcataaaaaaccaatctgggaaccagaggtggacaggaaagaggaggctgacctgctgctcccaggttaatgtgatcttggctggtgttgacaagtgtattatggttcatagcatagcacaaacccttagagattccccttgccctcaccggggtcaccacaccaaaccaggtatcttcaggagtgaggaccacaaaaaattggagatctcaccagggtgggcagagatttctttgttaaagtctgaaggagagaagactcaggggcatctctctggctccaaatctctgaagggccaaaggcagaagtgctgggggagtgtcaagttttcatttacaacagggacagcctgacagtggctgccttatgtggcagtgagtttcagtcaacagtcaacagaggcccaacgactactcaccaatgggaccaggtggccatagagggctggggagggcagagacaaccccaccaccacccagtatgccagcctcatgcacagcttcatcctgaaggcacggagcaccgtgcgtgacatcgacccccagaacgatctcaccttccttcgaattcgctccaagaaaaatgaaattatggttgcaccagataaagactatttcctgattgtgattcagaatccaaccgaataagccactctcttggctccctgtgtcattccttaatttaatgccccccaagaatgttaatgtcaatcatgtcagtggactagcacatggcagtcgcttggaacccactcacaccaatccagtgaccgtgtgtgggctggcggctcttctcccccaccaacggaacccctgtgtgcaccaacctatcacctagcagataaaactatggggaaaacttaaatctgtgcatacatttctggatgcatttacttatcttc

SEQ ID NO: 320663 - DNA, 674 bp, Homo sapiens
aggatactgcagaattcggctatacatgagtcgtattatcggtcggaaatgtgcagaggtggaggagacactgaagcgactgcagagccagaagggagtgcagggaatcatcgtcgtgaacacagaaggcattcccatcaagagcaccatggacaaccccaccaccacccagtatgccagcctcatgcacagcttcatcctgaaggcacggagcaccgtgcgtgacatcgacccccagaacgatctcaccttccttcgaattcgctccaagaaaaatgaaattatggttgcaccagataaagactatttcctgattgtgattcagaatccaaccgaataagccactctcttggctccctgtgtcattccttaatttaatgccccccaagaatgttaatgtcaatcatgtcagtggactagcacatggcagtcgcttggaacccactcacaccaatccagtgaccgtgtgtgggctggcggctcttctcccccaccaacggaacccctgtgtgcaccaaccttccccagagctccggagcgccctctcctcacttccaggttttggagcaagagcttgcaggaagcccgcacccagcttccttctgaccttcagttcactttgtcgcccttggagaaagctgtttttctttaactaaaaataaccaaaatgctta

SEQ ID NO: 320664 - DNA, 1095 bp, Homo sapiens
tttagtagagaaggggtctctccatgttgcccaggctggtctcgaactcttgggctcaagcaatccttccgactcggcctcccaaagtgctggaattacaggcgtaagccaccgcgtccagccagaaccagcatcttttctgcacggctggagttgggaattttccacagcttagcgcactgctccttagcttttcgctttgccacagtggaaagcagattttccaagaatcctggcggagccaagatcggctcgcccgcccccgcctcacgctggctcctgataggcagctagagctgtccgttttgacagaaacctttgcgcagcgggcagaaaggcacaggactcgctaagtgttcgctacgcggggctaccggatcggtcggaaatggcagaggtggaggagacactgaagcgactgcagagccagaagggagtgcagggaatcatcgtcgtgaacacagaagtgtgtagaagtttgtggccgggcgcggtggctcacgcctgtaatcccagcactttggaaggccgaggcgggtggatcatgaggcattcccatcaagagcaccatggacaaccccaccaccacccagtatgccagcctcatgcacagcttcatcctgaaggcacggagcaccgtgcgtgacatcgacccccagaacgatctcaccttccttcgaattcgctccaagaaaaatgaaattatggttgcaccagataaagactatttcctgattgtgattcagaatccaaccgaataagccactctcttggctccctgtgtcattccttaatttaatgccccccaagaatgttaatgtcaatcatgtcagtggactagcacatggcagtcgcttggaacccactcacaccaatccagtgaccgtgtgtgggctggcggctcttctcccccaccaacggaacccctgtgtgcaccaaccttccccagagctccggagcgccctctcctcacttccaggttttggagcaagagcttgcaggaagcccgcacccagcttccttctgaccttcagttcactttgtcgcccttggagaaagctgtttttctttaactaaaaataaccaaaatgctta

SEQ ID NO: 320665 - DNA, 832 bp, Homo sapiens
tttagtagagaaggggtctctccatgttgcccaggctggtctcgaactcttgggctcaagcaatccttccgactcggcctcccaaagtgctggaattacaggcgtaagccaccgcgtccagccagaaccagcatcttttctgcacggctggagttgggaattttccacagcttagcgcactgctccttagcttttcgctttgccacagtggaaagcagattttccaagaatcctggcggagccaagatcggctcgcccgcccccgcctcacgctggctcctgataggcagctagagctgtccgttttgacagaaacctttgcgcagcgggcagaaaggcacaggactcgctaagtgttcgctacgcggggctaccggatcggtcggaaatggcagaggtggaggagacactgaagcgactgcagagccagaagggagtgcagggaatcatcgtcgtgaacacagaaggcattcccatcaagagcaccatggacaaccccaccaccacccagtatgccagcctcatgcacagcttcatcctgaaggcacggagcaccgtgcgtgacatcgacccccagaacgatctcaccttccttcgaattcgctccaagaaaaatgaaattatggttgcaccagataaagactatttcctgattgtgattcagaatccaaccgaataagccactctcttggctccctgtgtcattccttaatttaatgccccccaagaatgttaatgtcaatcatgtcactccaggagtatatcactctcgacgggtatccactaacacccagtccatagccttgtatgtcctgcagctcgactttacgac

SEQ ID NO: 320666 - DNA, 503 bp, Homo sapiens
  misc_feature (60)..(60): n is a, c, g, or t
  misc_feature (62)..(62): n is a, c, g, or t
  misc_feature (101)..(101): n is a, c, g, or t
  misc_feature (103)..(103): n is a, c, g, or t
  misc_feature (491)..(491): n is a, c, g, or t
agagtatcatatgctggaccacattttagcttttattgttttttttttcccattgtccananagttaagcaacgagtggccacacttttacgtgactacancntggagttctgcaaagaaggaataatccaatactcaaggttgtgttgtgtgaggaagcaaagaaacacttacaatttattgaccacttctttcaagtcatttgtctgcacctctcgggtcatgatttccatcatcttcttccggatttggcggacctgttggtgctgagcataagaggtcttccgtatctgattgttgcgttttttagtaaaaccaacacagaacagacgaagcaagtaaccatcggtagtcttgacatcaacgtgagcttcaatcattgtctggagaaaaaagataccgtcagatttaacaggttttacgttatccatttatccctcaagttctaattttaaaaagctggattgtcaaacactcattattaaatatanagtatcctaaca

SEQ ID NO: 320667 - DNA, 917 bp, Homo sapiens
aaatagcactttttatttgacactatttgaagtctgaacctttaaaccagattcttgggactggtggttcatatccatcagctcgttccaactttagcacctgtctcgtccccagtggcttttccagaactactgccttcaccatgaagctccatgagctttcccaattcaaacttgggcttcttcagcatttttacttttctaacgaagacatcatggagaggataaatagattggcaagccttttctatgtcttttccaatgctgtctggaatcaatttattgaccacttctttcaagtcatttgtctgcacctctcgggtcatgatttccatcatcttcttccggatttggcggacctgttggtgctgagcataagaggtcttccgtatctgattgttgcgttttttagtaaaaccaacacagaacagacgaagcaagtaaccatcggtagtcttgacatcaacgtgagcttcaatcattgtctgccattttttgaccatggaacacattttgtcacgggtaagatccatgccatggaagttagtcaggcagtttttaccctgaacatcttcagtaatcagcttgaattttctaaatgcaacttcatcattctgcaaatcagcaagactcacttcaaacacacgacccttgagaccatcagatgcaattttggttccttgggtcctggtgacgagcgtctttccaatatttcttatattgaacatagcaggtgctttcacatcataccaatctttcttagaaaatggatcaaccactttcttcttggctccctttttgccgcctttcgtaaggcgcttgttcttgccaaccaccatggtgcttggcaagtagaggctgcagtgtactgtgatcacgccactgcattccagcttgggtgacggagcaagaccctg

SEQ ID NO: 320668 - DNA, 952 bp, Homo sapiens
aaatagcactttttatttgacactatttgaagtctgaacctttaaaccagattcttgggactggtggttcatatccatcagctcgttccaactttagcacctgtctcgtccccagtggcttttccagaactactgccttcaccatgaagctccatgagctttcccaattcaaacttgggcttcttcagcatttttacttttctaacgaagacatcatggagaggataaatagattggcaagccttttctatgtcttttccaatgctgtctggaatcaatttattgaccacttctttcaagtcatttgtctgcacctctcgggtcatgatttccatcatcttcttccggatttggctggtactgagcataagaggtcttccggatttctcaggacctgttggtgctgagcataagaggtcttccgtatctgattgttgcgttttttagtaaaaccaacacagaacagacgaagcaagtaaccatcggtagtcttgacatcaacgtgagcttcaatcattgtctgccattttttgaccatggaacacattttgtcacgggtaagatccatgccatggaagttagtcaggcagtttttaccctgaacatcttcagtaatcagcttgaattttctaaatgcaacttcatcattctgcaaatcagcaagactcacttcaaacacacgacccttgagaccatcagatgcaattttggttccttgggtcctggtgacgagcgtctttccaatatttcttatattgaacatagcaggtgctttcacatcataccaatctttcttagaaaatggatcaaccactttcttcttggctccctttttgccgcctttcgtaaggcgcttgttcttgccaaccaccatggtgcttggcaagtagaggctgcagtgtactgtgatcacgccactgcattccagcttgggtgacggagcaagaccctg

SEQ ID NO: 320669 - DNA, 294 bp, Homo sapiens
gaaataaaatataatgaccataagcatcatgggcaaggaatccaatgcttctagcttacttcatagctccatctaatcctctgtacaaagtgaaagctcaatgtcgattgactattgttgcttacaaatgctatgtactaaaaagcagattattttagtgtcttacacttcagcatataaaataaagtcttcattaggatagtagaaatgctgttgagttaaaattcatggattaatctcaaggatctagaactagaaataccatttgacccagccatcccattactgggtata

SEQ ID NO: 320670 - DNA, 643 bp, Homo sapiens
ttgaaattgccttttttttttgtctgtagcaaattttttactattggcaattttatgtggttcaacctaatagcttgaaaaagatttctaggttattctgaccaccctgcacccctgtcccatctctcacttccctgagaatctgcatttagaatagtgagctgtttctgaagcctttggactaagcaacaatgttgacaaacttaccttccaggagtctctgataagcacaacatcctgaagacatatccttgtgttgatgacatatgcagagaactttaactatagtgacttgcatctgtgtgtcagtacggtagagatagacttctgagttttcacctaagctctgcaagagagcctgatggtcctctatcctggttccatatctgtagtgactagctaaggacagtggtgccacccagtggcacgttatagacaagctgctgatgttgctttagcactcttcactgcatcaaattctttcctttcccatccctttcccttccccttcccttcttcccttcttcccttcatccctccttccctcccttccttcctctctccctttcttcccttctctcttctctcctccttccctccctcccttcttcctttctttttgttttctttcttttctcagggt

SEQ ID NO: 320671 - DNA, 958 bp, Homo sapiens
atggccatcatccctgaaattattatgctacaaagatgtggaatacacattcttttaaaagtcatgggacatgttttaaaaaatgaccacctaccttccagataactgaagacagtggagagttggtagtacagtaacctcttcaaatctcctccccaatggatatgaaattaatttaccactaataaatttctattcaaaaatatacactcaacatcacttgaagacagagaatgacatgactgcaaaataactgtaagttctgcagtccttcatactcctgcccctttcctgtcatgctgcagtgctttgtggtatacacacagaaactgggaatcacttagggaggaagaagagggacactggcaagggaacttaaggaacagttggagagaccactgtataggtcagatatacctcaaatctgaaaataccgaaaaagaaactgggaagatgggatgaagattgtgggaaaaggtttcaaagtatgtgctatttagagggtcaaattaacaattttatgggacagtcctccaattgcattgcttttcagggaggggataaaaggtaaaaaggaacgaagagcgattctttggcaatgaatgggaaaggagaaaagaaggaaaagggttaaattagggttctgtaaaacaaaggagaaccacaaacttggaggactcaactcttctcccctactactaaaacaaataaacgtataaaagaaataattttgctgacacctggaatttgccagattgaccaaaaaaaaaaaggtgcctttaaactaggaattgtgtaaaatatcctcacatcacaaaataaaaaaaggaaaataaaaaatcatacaaatctattgaaaaagatcagatagtgaattttcatacaaatcaatggagggaaataccaccttcacccccaccccccaccaaaaaaaaaaaaaaaaaaaacaagaagcaga

SEQ ID NO: 320672 - DNA, 341 bp, Homo sapiens
ctgaagtgttgggattgcaggcgtaagccaccgcgcccggccccacccagctcaaattctgtggtcatttttatcacttgcttgtttgccctttcatttcttccttgtgcttgttggtaaaaccacaatctcttacatctgactgtctccctaccctgcccctgaacatggcccaagaagaacacatccaagctgactggtttcacactaaattcatgactgcttagctcaagtgaaccctttctgcagtccagaatacgtgtccacttctaaggacggtttcatgtcttatctccgtaaacctcctgtacccccaaccctaatctcggttacagctgatg

SEQ ID NO: 320673 - DNA, 171 bp, Homo sapiens
atgggtacattggctcacatctgtaatcccagtattttgggaagccaaagtgggtggatctcttgagctcagaagttcgaaaacagaaagtggcaatatggtaaaaccctatctctacaaaatacacaaaaaaactagttgggcatggtagtgcatgcctgtggtcccagc

SEQ ID NO: 320674 - DNA, 454 bp, Homo sapiens
ttgctcttagcttagtaaaatttagggcaatccatctcaaacttgatggaagaaggactgtgaaggcttaacctattatcctttgaaaagataatattcctttgaattgttatgtttcattgtaacatcacagagtgaccattttgcagtggtcaccctaacaattccgtgccagttttaccatacaaataacatatttgtgcatcctcaccaggggaactacatttttttctttttaattatctaataaatgaatattacaagaatattcatatttatcctataacaggccatgtttaccctataaattccacttaaagtcttaaagttcaagtgtctcagcttcataaagtgactataaatttttaatgtttctattgattcctttacaaatttattcacaagttctgttaaatcaggggttcccaaacttaagtgtataaactctgaatca

SEQ ID NO: 320675 - DNA, 387 bp, Homo sapiens
ccagtagataagattaaacggaatcatacaaatactccattaattctaagaaaggagaaaaggagaaataatggcatgaacaaggaacaaagggggcatgtagaaaacctattaaaatggtagagttaatcccaactatatcaacagttaccactccatttaatgtcagactggattaaaaaagcaggatttatctatatgatattttcaagagagaaactttaaagacactggttaaaagtaaaaggatggaaaatgagatactatgcaaaacactaaacatagcaaaaactggtgtatctgtataagtatcaaaggagacttttaagacaagaaatattattagagacaaataggaatattttgtaatgataaaagcatctattt

SEQ ID NO: 320676 - DNA, 269 bp, Homo sapiens
cacaccttgtagaacattggagaattcatactggacagaagccttacaaatgtagtgaatgtgacaaggtgtttaatcgcaattcaaaccttgcacgacatcaaagaattcatactggagagaagcctcacaaatgtaacgaatgtggcaaagcttttagagagtgttcgggacttactacccatcttgtaatccatactggagagaaaccttacaaatgtaatgagtgtggcaagaacttcaggcacaaattttctctaaccaatcat

SEQ ID NO: 320677 - DNA, 369 bp, Homo sapiens
gttttttcttttttttttgagacgaagtctcgctgtattacccaggctggagtgcagtggcatgatcttggctcactgcaacctccgtctcccggattcaagcaattctcctgcctcagcctcctgagtagctgggattacaggcatgtgccactactgcccggctaatttttgtatttttagtcgagacggggtttccctccgttggccaggccggtttcaaactcctgacctcaagtgatccactggccttggcctcccaaagtgctgggattataggtgtgagccacagcgcccggcctagtttaaatttttcttagtgtgaatgaattacatcctttctaccagcgttgtttaatcttacctcag

SEQ ID NO: 320678 - DNA, 722 bp, Homo sapiens
aaaaccttacaaatgtaatgaatgtggcaaggtctttagtctgctttcataccttgcacggcatcaaataattcatagtacagagaagccctacaaatgtaacgaatgtggaagagcatttcacaagcgtccgggccttatggcccatcttctaatccatactggagagaaaccttacaaatgtaatgaatgtgacaaagtctttgggcgcaaattatacctaaccaaccatcagagaattcatactggagagagaccttacaagtgtaatgcatgtggcaaggtcttcaatcaaaatccacacctttcacgacatcggaaaattcatgctggagagaattcactgcgtaccttacagatggaatgaatgtggcaaaatctttagttagaattcacacctagcacaacattggaggactcaggagaaaaaccttacaaatatcataaatgtggcaaagaatttagtttgcattgaagcctcatcactcatctcttgatccacactgaaaggaaaccctacaaatgtaaagttaataacatatataaataatctataaagagagaacagttatatcagaatagagcatttaatgaaaactaccagtatagcatattcttgagtaggattcacatttaactgctggcaccgtaatttgtaactctttgatttagaatgtacatacttctcatgttttaagtaataaagtttaaagttttttttt

SEQ ID NO: 320679 - DNA, 277 bp, Homo sapiens
attttcactgtgaacattttcaccccctttcccatccttggccagagatgatctcacatggtcttggcaggtatctttttacaggagtgcatgttgtttatcttgggagctttttgcacagggaaggcctttgtcttccagctctgtgaatccttcttcactgcgtagcaccttgcagaacatttgcacatattaggctcttggtgaacacttagaatcctcagtcatttgcattcacgtcatgtttccataacacattgaatgaaccagcaagtat

SEQ ID NO: 320680 - DNA, 210 bp, Homo sapiens
cccagcaggttgaggcttcagtgagccatgattgtaccactgcactacagcctgggtgacagcgagacactgtcttaaaaataaagatgagagagacgagcacatcttgaaatgctaatggaaaatggggagtagatggagaggaaaagaaagtacaggtgagaaaagagattactggtggtgtaaggataccaagaaggttggaaagga

SEQ ID NO: 320681 - DNA, 3635 bp, Homo sapiens
attcactgctggccagtgcctgcctttttcaccacctctaatttcagcttcagcagttgcttggaactttggttctggcagcagcagcaacatcattaccgctagcggcagttttgtgccgaggcacctacacacctcccgtcctctctgccagatcgcgggcctgtcggtgtctgctcctacacgccaacgccggtgggcaggaccatgtctctggtaagccagaattcgcgccgccgccgccgccgcgttgcaaaggctactgcgcacaacagcagctggggcgaaatgcaggcccctaatgcccccggtctccccgctgatgtgccaggctcagacgtcccccagggtcccagcgattcccagatcctccagggcctctgcgcctctgagggcccaagcacctccgttctgcccacctccgctgagggcccaagcacctttgtgccgcccaccatctctgaggcctcaagcgcctccgggcagcccaccatctctgagggacctggcacctccgtgctgcccacccccagtgagggcctaagcacctccgggcctcccaccatctctaaggggctgtgcacctctgtgacgcttgccgcctctgagggccggaacacctccaggccgcccacttcctctgaggaacctagcacctccgtgccgcccaccgcctctgaggtaccgagcacctccctgccgcccacccctggtgagggaacgagcacctccgtgccgcccacagcctatgagggaccaagcacctccgtggtgcccacccctgatgagggaccaagcacctccgtgctgcctacacctggtgagggaccaggcacctccgtgccgctcgccgccactgagggcctgagcacctccgtgcaggccactcctgatgagggaccgagcacctccgtgccgcccaccgccactgagggcctaagcacccccgtgccacccacccgtgatgagggaccgagcacctccgtgccggccactcctggtgagggaccgagcacctccgtgctgcccgccgcctctgacggacaaagcatctccttggtgcccacccgcggtaagggatcaagcacctccgtgccccccaccgccaccgagggcctgagcacctccgtgcagcccactgctggtgagggatcgagcacctccgtgccgcccacccctggtgggggactgagcacctccgtgccgcccaccgccactgaggagttgagcacctccgtgccgcccactcccggtgagggaccaagcacttccgtactgccaatccccggtgagggactgagcacctctgtgccgcccaccgcctctgatggatcggacacctccgtgccgcccactcctggtgagggcgcaagcaccttagtgcagcccaccgcccctgacggaccgggaagctccgtgctgcctaaccctggtgagggcccgagcacattgtttagctctagtgcttctgtggaccggaacccctccaagtgttcccttgttttgccaagccctagggtaaccaaggcctccgtggactcagattctgagggtcctaagggtgcagaaggccctatagaattcgaggtcctgagagactgtgagagccccaactccattagtattatgggcctcaatacttcccgggttgcaattaccctgaagccccaagaccctatggaacagaacgtagctgagctgttgcagttcctgctggtgaaggatcagagcaagtaccctatccgggagtctgaaatgcgggaatatattgttaaagaatatcgcaaccagtttcctgagatactcaggcgagcagcagcccacctggagtgcatttttaggtttgaattgagagaacttgaccctgaggcacacacctacattctgttaaacaaactgggacctgtgccctttgaagggttagaagagagcccaaatgggccaaagatgggcctcctgatgatgattctaggccaaatattcctgaatggcaaccaagccaaggaggctgagatttgggaaatgctctggaggatgggggtgcagcgggaaaggaggctttccatttttgggaacccaaagagacttctgtctgtggagtttgtatggcagcgttacttagactacaggccagtaactgactgtaaaccagtggagtatgagtttttctggggcccaagatcccacctagaaaccaccaagatgaaaattctgaagttcatggcgaaaatatataacaaagatcctatggattggccagagaaatacaacgaagctctggaagaagatgctgccagagcctttgctgagggttggcaggctctccctcactttaggaggcccttttttgaggaagctgctgcagaggtaccatcccctgattcagaggtttccagctattcctcaaaatatgccccacattcatggcctgagtcaagattggagagcaaggcaaggaagctggtgcagttatttctgcttatggattcaactaagctgcctataccaaagaaaggaattctgtactacattggccgagagtgcagcaaagtgttccctgacctcctgaatcgtgctgcccgcaccctgaaccatgtctatgggacagaactagtggtacttgatcccaggaatcactcctatactctgtacaaccgaagggagatggaagaaactgaggagatcgtagacagtccaaacaggcctggcaacaactttttgatgcaggtcctaagcttcatctttattatgggcaaccatgccagggagtctgcagtctgggcctttctgcggggcttaggggttcaagctgggagaaagcatgtgattacctgcagatacttgagtcagcgctatatagacagtttacgggttcctgacagtgatccagtgcaatatgagtttgtatggggtcctagagcccgtttggaaacctctaagatgaaagccttgcgatatgtggccagaatccacagaaaggaaccacaggactggccacagcagtacagggaggcaatggaagatgaggccaatagagctgatgttgggcacaggcaaatctttgttcacaacttcaggtagaggaatgcatggcagtcagaggggccttgcaaggaggggcctttgagcctcagttctcatgtattggggggtgggggtgggtacatattgtatttggtatttgtgttccagttatatttatgtcttttcatatttagttctggtgtggtgtctggaaatgtttcaactgttttaatatattgtctgattgggtaaatgtgattgaccacttgctgtctctgttgtattttggtatgagttttgatagctctataaaatgttttggaaatctttccatcttgttgcattatctagaaaagaatatagcatatagctatagatataggcttttccttgaaagcttgaaaaaaattcgccagtaaaataatctagcttaaagtgataaactaacaaacaaatataacaacaactgaaaaggcactctaaattgtggctggcttccctttctgtctgctattgtatgaagaatactgatgtttacctgtatttgctttgctgtactaaaatgtaatgaaaaataaaagattaataaatgaaacataatgctaaaacac

SEQ ID NO: 320682 - DNA, 603 bp, Homo sapiens
ataccctgtactatctgctcagttttcctgtaaatctaaaaatgctttaaaaaaaattaagactggccgggcgcggtggctcacgcctgtaattctagcactttggcaggctgaagcaggcaaaatgattaagctcaggagttcaagactggccttggcaatacagcgaaaccccaactctacaaaaatacaaaaattagccaggcgttgtagtgcgcacctgtggccccagctactcaggaggagggggcaggaagatggtttgagccctggaggttgaggctgcggcaaaccgagatcatgccactgcactccagcctgggtgacagagtgaggcctgtctcaaaaataattgattttttttttttaagagcatgaacatgaggtcaattttcttgactggcttataaactacctcttaaactaattccaaagaagtgtagtcctatcgtctttaacaaagaaggtggcactgaaacgtgtgaatggggccgactgggggagtgagtttgaactaggatctctagctaaatgtgtggcacgtgttttttaaacttaatctcatgcatttatattcctccttttatacaacactaacatgtt

SEQ ID NO: 320683 - DNA, 382 bp, Homo sapiens
cgccaatccccgacgggcccgtcttccagccccgaagcggtcacctcctgacctctagtggcgagcgcggggaactgcgccccggcccgtccgcccgccgagcccgggccgtgcatgccgagcccgttgttccttcgcaaaccgagtgaacctcccgatgcatggactctggctgtcgtcgacgcagactctcgtgcactgcttaaccccgttttgctgccatgtgacggctgcagacactgtcctcaaactgcagtcccacagacaagttttgtattttggtctgacctacccgaaggtgtcctttttaagtcttatttgttaatatttataatgacatataatccaaagtaaatggaaacgtcatattgcgatctcattg

SEQ ID NO: 320684 - DNA, 714 bp, Homo sapiens
aacccacattagaaaatcaagtgtaatccaatcaggaggtgaagagaggcttacgaaagcaatgtattagagaggaaagaccagagcaagattttgaagagatagcttctctgggacatgaagcctggatgaagaagcactgtgcatagactccaggggaaaatgaaggaagtgacaaagggagcattcactcttctgcattggagattggatttcccgacatgaaattataaactaagtaagaatgctgagtacagaaggatccaaagtcgtggaagacatcgccatgtgaggaaactgggtgaagagttcaagggaatctacgtatgacttttgccacttcttgtgattctagtaattttaaaataaaaagggcagtggaggtgaaacacatatcaatggtcagcactgagttctctgagtggaaggaagatttttgaagacaaaaaatgctggctagaaacaactccttagtgactgaatttattcttgctggattaacagatcgtccagagttccggcaacccctctttttcctgtttctagtgatctacattgtcaccatggtaagggagaagaagattctttgactacatgtggtcaacgtagataccttcaccaccagttctacctccagggcagtggaggtgaaacacatatcaatggtcagcactgagttctctgagtggaaggaaggtgagttaatcaagtttc

SEQ ID NO: 320685 - DNA, 700 bp, Homo sapiens
cagacaagcctgactgcatacatatctttaccacctcttccttccctatgctaggtatcacccatcagttgcagcaccgtattcttactgatcccaggaacagcctccaagtccctaacacagggatctaggcagtcagtgtcaatcaactggggtcggtaagagaattgaaacctatttttcatcccttcaggtgtttgcacccctatttcttttgtttttggggtcactgcagtgggcatgaatgctctgaggaacttcatcagccatttaactggagtcttatcatccatcatgtatctgtagattattactgagtaggcagtgctttgttttaacagctcctgtctttcctgtgctgaatttataatcatctatgagatggggtgctggatatttatttcataccaccctggacttttcccattaatccaacactgtgctgaagcctgtgctgggttttggacttattctttgtagagtctgtcagacaggagtgtagtccacttatagatggaacaatttaggcaccaagaagataaatgtataggcaaaaggcagaaagccaagagtgagtccccacttcccaagcttcagcaccaacctaatatacctttctaacacctatcacacagtgttttctcaaattctcagctttcacatgcagttctttctttatgttaattttctcaaagtttaa

SEQ ID NO: 320686 - DNA, 1447 bp, Homo sapiens
gtggatttaaagaaaccagagttaaagattcctcacacagtgaacttctacctgagagttgaacctggggtgatgctagggatctggcacacagtccccagctgccggggggaagatgccaaggggaaggactgttgctggtatgaagcagcccttcgtgatgggaacccaattattgtttatcttcatggcagtgcagaacacagggcagcttcgcacagactgaagctggtaaaggtgctgagtgatggtggctttcatgtcttgtctgttgactacagaggatttggggactctacaggtaagcccacagaggagggactgactacggatgccatttgtgtctatgagtggaccaaggcaagaagtggcatcactcccgtgtgtctctggggccactctctgggtacaggagttgcaacaaatgctgcaaaagtgctagaagaaaaaggatgcccagttgatgctattgtcttggaagctccatttaccaacatgtgggttgcaagtatcaattatcccttgttaaagatttaccggaacattccaggatttttacgtacacttatggatgccctgagaaaagacaaaataatctttcctaatgatgaaaatgttaaattcctttcttctcctcttctcatcttacatggagaggatgacaggacagtgcctttggagtatgggaaaaagctctatgaaattgcacgcaatgcatacaggaacaaagagagggtcaagatggttatctttcctcctggcttccaacacaacctgctttgtaaaagccccacactgttaataaccgtgagagatttcctgagcaagcagtggtcatgagtctgggaggagtggaaatcttcaatgaagacttggcccaaacaccacctgtgatgtatattgttctaatgtaaaattgtactgggctggtcggatgagctgaggccattgacttctctacaaatcacttgccattttaacaacagaaagtacgaatgttaggcagtatggaatgttcttatttagcttatcataatctactttgtaaaacatgctgaaacctcactgtggagaaccagaatttggtaaaatctagatcctatctaaaaatatgtagttattaaacattctgtggatatttgtgaataaggtagttgctatggtccgaatatctgggcctgcccccccaaattatgctgaaacctaatcaccagtgtgatggtaataggaggtgggactgagctctgatgaatgagattagtgcccttataaattatgaccaaaagagctcttcactcctcctaccatttgaggatacagtgagaagccttcatctatgaaccacaaagtagccctcatcagacactgaatcagccagtgccttgctcttggacttcccagcccccagaactgtgagaaataaatttctgttgtttataagctaaaa

SEQ ID NO: 320687 - DNA, 1663 bp, Homo sapiens
cagttaaattgcatgagtaaatgggagagagggaaacttgcatggagaaaaaaagctactatgtgaaatttttaaatgtatgatattgttattccttggaaggaaggaaagaaatttcttgtaatttagacaggcctcatgttttgctaaagctttaacttagaagaggagaaatctcaatgtatcattctttaactgaatgcttttcttctacttgtccctagtgttaaattcctttcttctcctcttctcatcttacatggagaggatgacaggacagtgcctttggagtatgggaaaaaggtaaactaagggctcaatgctgactgaaatatactatactcatttcaccatttttttcattcagccaaactttgattagagccgaaaggagggtctctgacattataggagattctctacacccctaaatagcctctataggtttataaaatgggtatcagcatccttggctacttagctcaaaggagtgtttgtggcagagcctggctcctcatctggattgtgtggagctgcaagtgtagggtatcccaggctgctgtgggaacctccatgtcgtctctactgtagtggctctaaaatggaagacgcagactttttccttttaaacaaacttctactagagtgggtccataacaattccttggcattttgcagggaggttcaagcagggaaggatgaggttttatcagtattctatattagctgagcagcattcagatctttagctgtagagacaggcaactgggacatggagagttttctgtctctgacttaatggaacaaactccccaagttagctgtttctgtacacttttagggaaattggactagaaaaatctacagctttgaatggccatcctttgagtctctttctgtcgcttgcagctctatgaaattgcacgcaatgcatacaggaacaaagagagggtcaagatggttatctttcctcctggcttccaacacaacctgctttgtaaaagccccacactgttaataaccgtgagagatttcctgagcaagcagtggtcatgagtctgggaggagtggaaatcttcaatgaagacttggcccaaacaccacctgtgatgtatattgttctaatgtaaaattgtactgggctggtcggatgagctgaggccattgacttctctacaaatcacttgccattttaacaacagaaagtacgaatgttaggcagtatggaatgttcttatttagcttatcataatctactttgtaaaacatgctgaaacctcactgtggagaaccagaatttggtaaaatctagatcctatctaaaaatatgtagttattaaacattctgtggatatttgtgaataaggtagttgctatggtccgaatatctgggcctgcccccccaaattatgctgaaacctaatcaccagtgtgatggtaataggaggtgggactgagctctgatgaatgagattagtgcccttataaattatgaccaaaagagctcttcactcctcctaccatttgaggatacagtgagaagccttcatctatgaaccacaaagtagccctcatcagacactgaatcagccagtgccttgctcttggacttcccagcccccagaactgtgagaaataaatttctgttgtttataagctaaaa

SEQ ID NO: 320688 - DNA, 1147 bp, Homo sapiens
cacggacgcgcatgaaatttggtgccgtgactcggatcgggggacctcccttgggagatcaatcccccatcctcctgctctttgctccatgagaaaaatccacctatgaccttaggtcctcagaccgaccagcccaagaaacatctcaccaatttcaaatccgatttaccggaacattccaggatttttacgtacacttatggatgccctgagaaaagacaaaataatctttcctaatgatgaaaatgttaaattcctttcttctcctcttctcatcttacatggagaggatgacaggacagtgcctttggagtatgggaaaaagggaaattggactagaaaaatctacagctttgaatggccatcctttgagtctctttctgtcgcttgcagctctatgaaattgcacgcaatgcatacaggaacaaagagagggtcaagatggttatctttcctcctggcttccaacacaacctgctttgtaaaagccccacactgttaataaccgtgagagatttcctgagcaagcagtggtcatgagtctgggaggagtggaaatcttcaatgaagacttggcccaaacaccacctgtgatgtatattgttctaatgtaaaattgtactgggctggtcggatgagctgaggccattgacttctctacaaatcacttgccattttaacaacagaaagtacgaatgttaggcagtatggaatgttcttatttagcttatcataatctactttgtaaaacatgctgaaacctcactgtggagaaccagaatttggtaaaatctagatcctatctaaaaatatgtagttattaaacattctgtggatatttgtgaataaggtagttgctatggtccgaatatctgggcctgcccccccaaattatgctgaaacctaatcaccagtgtgatggtaataggaggtgggactgagctctgatgaatgagattagtgcccttataaattatgaccaaaagagctcttcactcctcctaccatttgaggatacagtgagaagccttcatctatgaaccacaaagtagccctcatcagacactgaatcagccagtgccttgctcttggacttcccagcccccagaactgtgagaaataaatttctgttgtttataagctaaaa

SEQ ID NO: 320689 - DNA, 920 bp, Homo sapiens
gtggccgcctggtgggacatggtcgaccgcaacctgggcacacagtccccagctgccggggggaagatgccaaggggaaggactgttgctggtatgaagcagcccttcgtgatgggaacccaattattgtttatcttcatggcagtgcagaacacagggcagcttcgcacagactgaagctggtaaaggtgctgagtgatggtggctttcatgtcttgtctgttgactacagaggatttggggactctacaggtaagcccacagaggagggactgactacggatgccatttgtgtctatgagtggaccaaggcaagaagtggcatcactcccgtgtgtctctggggccactctctgggtacaggagttgcaacaaatgctgcaaaagtgctagaagaaaaaggatgcccagttgatgctattgtcttggaagctccatttaccaacatgtgggttgcaagtatcaattatcccttgttaaagatttaccggaacattccaggatttttacgtacacttatggatgccctgagaaaagacaaaataatctttcctaatgatgaaaagtaagttaatgatgaaaagacatgcattattactgtatctaaaggattctaggggcaactatcatgtgacttactggatggtgacatgagacatcctgaatatcattcttattcttagaatattgttctgcgcttcttagatgggcactaagatttgggtaaagtatctatgaatttttagtatttgctattttcctcatgtctaattcaatgacttcaccaattcagtactctctctgaattcataaacgaagttgtatatctatagcctatcaagaccttttaaagggcttggtagtgttagcgtatgcctataatcctagcactttgggaggctgaagtgagaggatagctt

SEQ ID NO: 320690 - DNA, 397 bp, Homo sapiens
ggcagcttcgcacagactgaagctggtaaaggtatgtctgaagaggcctcaaagcacccatttcataagtctgtttgatatgtcataagattttcctcaggccctccgcgtggttgttttttgagaggtctccagggtactggtcagggtgggttgtggtgtctggggctcaaagtcccaccggtggacttctgctcctacactgatcaaaacagaaccgagcttctctaggtcccaaagtaccttcgtgaacttaataacctcattgccaaatggaggtgaagacatttttatttgctttctctgagggctgggggatgggttgagagaggttttttttgttgtcgttgttgtggttgttgttttttgagattctgttgcccaggctggagtgcag

SEQ ID NO: 320691 - DNA, 388 bp, Homo sapiens
gtctctgacttaatggaacaaactccccaagttagctgtttctgtacacttttagggaaattggactagaaaaatctacagctttgaatggccatcctttgagtctctttctgtcgcttgcagctctatgaaattgcacgcaatgcatacaggaacaaagagagggtcaagatggttatctttcctcctggcttccaacacaacctgctttgtaaaagccccacactgttaataaccgtgaggtaagagttgctttgctaaatgtatgttgcccttcaaggcaattagggctgctctggcttacttaggccacaacatgaaaatgtataatattttgcttatttaggtagggaaagggtgtgagctgatctgggtcctttttctacag

SEQ ID NO: 320692 - DNA, 596 bp, Homo sapiens
gtggccgcctggtgggacatggtcgaccgcaacctgggcacacagtccccagctgccggggggaagatgccaaggggaaggactgttgctggtatgaagcagcccttcgtgatgggaacccaattattgtttatcttcatggcagtgcagaacacagggcagcttcgcacagactgaagctggtaaaggtgctgagtgatggtggctttcatgtcttgtctgttgactacagaggatttggggactctacaggtaagcccacagaggagggactgactacggatgccatttgtgtctatgagtggaccaaggcaagaagtggcatcactcccgtgtgtctctggggccactctctgggtacaggagttgcaacaaatgctgcaaaagtgctagaagaaaaaggatgcccagttgatgctattgtcttggaagctccatttaccaacatgtgggttgcaagtatcaattatcccttgttaaaggtatctgcccagatggcctgaagtaactgaagaatcacaaaagaagtgaatatgccctgccccaccttaactgatgacattccaccacaaaagaagtataaatggccggtcctt

SEQ ID NO: 320693 - DNA, 1398 bp, Homo sapiens
gtggccgcctggtgggacatggtcgaccgcaacctgggcacacagtccccagctgccggggggaagatgccaaggggaaggactgttgctggtatgaagcagcccttcgtgatgggaacccaattattgtttatcttcatggcagtgcagaacacagggcagcttcgcacagactgaagctggtaaaggtgctgagtgatggtggctttcatgtcttgtctgttgactacagaggatttggggactctacaggtaagcccacagaggagggactgactacggatgccatttgtgtctatgagtggaccaaggcaagaagtggcatcactcccgtgtgtctctggggccactctctgggtacaggagttgcaacaaatgctgcaaaagtgctagaagaaaaaggatgcccagttgatgctattgtcttggaagctccatttaccaacatgtgggttgcaagtatcaattatcccttgttaaagatttaccggaacattccaggatttttacgtacacttatggatgccctgagaaaagacaaaataatctttcctaatgatgaaaatgttaaattcctttcttctcctcttctcatcttacatggagaggatgacaggacagtgcctttggagtatgggaaaaagctctatgaaattgcacgcaatgcatacaggaacaaagagagggtcaagatggttatctttcctcctggcttccaacacaacctgctttgtaaaagccccacactgttaataaccgtgagagatttcctgagcaagcagtggtcatgagtctgggaggagtggaaatcttcaatgaagacttggcccaaacaccacctgtgatgtatattgttctaatgtaaaattgtactgggctggtcggatgagctgaggccattgacttctctacaaatcacttgccattttaacaacagaaagtacgaatgttaggcagtatggaatgttcttatttagcttatcataatctactttgtaaaacatgctgaaacctcactgtggagaaccagaatttggtaaaatctagatcctatctaaaaatatgtagttattaaacattctgtggatatttgtgaataaggtagttgctatggtccgaatatctgggcctgcccccccaaattatgctgaaacctaatcaccagtgtgatggtaataggaggtgggactgagctctgatgaatgagattagtgcccttataaattatgaccaaaagagctcttcactcctcctaccatttgaggatacagtgagaagccttcatctatgaaccacaaagtagccctcatcagacactgaatcagccagtgccttgctcttggacttcccagcccccagaactgtgagaaataaatttctgttgtttataagctaaaa

SEQ ID NO: 320694 - DNA, 255 bp, Homo sapiens
tttatgttttactgttttgtttcttaattctttttttaaaaaaaaattctaaatctctttattttttatcttttaagacacaaagtcaaagggaaaatggaaatttctaaacctcatttttctctcttgctttttactttctggttctttgctttttatctttgtatttaccttctacttttttttttttttccctcccactaagtcaaatcttaatcagatcatggtggaatccaagggagggagggacccgag

SEQ ID NO: 320695 - DNA, 611 bp, Homo sapiens
cgtgctcaagctgctcggctgcacagctaggattccaacccaccagtctggcctgagtcctcttccttctcagcctggctctacgccttagcaaatcatgctggtttattggaaggtcagcagttccatatgattcagcacatgagtctttggcagaatgaagtccatggaaatccaaccactcgtgaagaatgcacaggggaataagggcagaaacgcccattcccacaggatctgcatggaacctcctgggaagcaagatgggaaatgcgaagagcactgggcttggcctcagaaacttcaagcgctttctgccctgccatgggctagctcgtgacctcaggcaagtcactgcaccctgcctctagctctgtgaccttacagagttgttgccaggataatgcttgggaaagtgtcttctgaactcttcaatgacctataaacctaggtaatatttttattgtgtttctcttcattgatagcctttttctaccactctgttctggcttacctggctagataagcagacttcagggggatctagggggtccctaaaattcaatgtatgaatggcttctgtttttgttgttttgttttgttttttgaggcag

SEQ ID NO: 320696 - DNA, 222 bp, Homo sapiens
aaggccaagggaggggtgttgatgtgaagacgctggggacatcatctgtgaagacaggccagccctccccttctgctggagcctcagtgtcccctcaccattctgcgctggtccagagatttcctgctattgatacttatcagagacacaaagctgaggaggaacagatgtgccatgtcatcagccataatagaaaaagtgcatgaatcttttttggaccag

SEQ ID NO: 320697 - DNA, 6133 bp, Homo sapiens
cgcactcattcattaagtggcactgctcagtggtgcgggggtgggcgtgcttccgtgggctgggcgctgggttcgcggcgcgccctcctgctgcctccccggagctcccgggccagtagcgtttagtcacatcaagaaatagaacagaattcagccatggccccaagaaagagaggtggacgaggtatttcattcatcttttgctgtttccgaaataatgatcacccagaaatcacgtatcggctgcgaaatgatagcaactttgcgcttcagaccatggaaccagcattgcccatgccccctgtggaggagctggatgtcatgttcagtgaactggtggatgaactggacctcacagacaaacacagagaagccatgtttgcacttccagctgagaaaaaatggcaaatatactgtagcaagaaaaaggaccaggaagaaaacaagggagctacaagttggcctgaattctacattgatcagctcaattccatggctgctagaaaatctctgctggctttagagaaggaagaagaagaagaaagaagtaaaactatagagagtttaaagacagcactgaggacaaaaccaatgaggtttgtaaccagattcatcgacttggatggcctatcatgtatcctcaactttctaaagaccatggactacgagacctcagagtctcgaatacatacttctctcattggctgtataaaggcgttaatgaacaactctcaaggccgggctcacgtcctggctcattctgagagtattaatgtaattgctcagagtctgagcacagagaacattaaaacgaaggtggccgtgctggaaatcttgggcgccgtgtgcctggttcccgggggccacaagaaggttctgcaggccatgctgcactaccagaagtatgccagcgaaaggacccgctttcagacattaattaacgacttggataaaagcactgggcggtatcgagatgaagtgagtctcaagactgccatcatgtccttcattaatgcagtgctcagccaaggtgcaggagtggagagtttggactttagacttcatcttcgctatgaatttctgatgttaggaattcaacctgtaatagataaattaagggaacacgaaaattcaacattagataggcatttagacttttttgaaatgctccgaaatgaagatgaactagaatttgccaaaagatttgaactggttcacatagacacaaaaagtgcaactcagatgtttgagctgaccaggaagaggctgacacatagtgaagcttacccgcatttcatgtccatcctgcaccactgcctccaaatgccttacaagaggagtggcaacactgttcagtactggctactactagatagaattatacagcagatagttatccagaatgacaaaggacaggaccctgactccacacctttggaaaactttaatattaagaatgtcgtacgaatgttggttaatgaaaatgaagttaagcagtggaaagaacaagcggaaaaaatgagaaaagagcacaatgagctacaacagaaactggaaaagaaagaacgagaatgtgatgctaagactcaagagaaggaagagatgatgcagaccttaaataaaatgaaagagaaacttgaaaaggagactactgagcataagcaagtcaagcagcaggtggcggacctcacagcacagctccatgagctcagcaggagggccgtctgtgcttcaatcccaggtggaccctcgcctggagcaccaggagggccctttccttcctctgtgcctggatctctccttcctcccccaccacccccacctctaccaggtgggatgcttccccctccaccgcctcccctccctccaggtggccctcctcctcccccagggcctcctcccttaggggcaatcatgccacctcctggtgctccaatgggcctagcactgaagaaggaaaagcattcctcagcccacaaatgccctgaaatccttcaactggtctaaactgcccgagaacaaactggaaggaacagtatggaccgaaattgatgatacaaaagtcttcaaaattctagatcttgaagacctggaaagaaccttctctgcctatcaaagacagcaggatttctttgtgaacagtaactccaagcagaaagaagcagatgccattgatgacactctgagttccaaacttaaagttaaagagctttcggtgattgatggtcggagagctcagaattgcaacatccttctatcgaggttgaaattatccaatgacgaaatcaaacgggcaattctaacaatggacgaacaggaagatctgcccaaggacatgttggaacagctcttgaaatttgttcctgaaaaaagtgacattgacctattggaggaacataaacacgaactggatcggatggccaaggctgataggttcctttttgagatgagccgaattaatcactatcagcaaaggttgcaatcgctgtacttcaaaaagaagtttgcagagcgtgtggcagaagtgaaacctaaagtggaagcaattcgttctggctcagaagaggtgtttaggagtggtgccctcaagcagttgctggaggtggttttggcatttggaaattatatgaataaaggtcaaagagggaatgcatatggattcaagatatctagcctaaacaaaattgctgacacaaaatccagcatcgacaaaaacattacccttttgcactatctcatcactattgtggaaaataagtaccccagtgttctcaatctaaatgaagaattgcgagatattcctcaagctgcgaaagtaaacatgactgagctggacaaagaaataagtaccttgagaagtggcttgaaagcagtagagacagagctggaatatcagaagtctcagcccccacagcccggagataagtttgtgtctgttgtcagccagttcatcacagtagccagcttcagcttctctgatgttgaagaccttctagcagaagctaaagacctgtttactaaagcagtgaagcactttggggaagaggctggcaaaatacaaccagatgagttctttggcatttttgatcaatttcttcaagctgtgtcagaagccaaacaagaaaacgaaaatatgagaaagaaaaaggaggaagaagaacgtcgagctcgcatggaagctcagctcaaagaacaacgtgaaagggaacgtaaaatgagaaaagctaaagagaatagtgaagaaagcggagagtttgatgaccttgtttcagctttacgctcaggagaagtgtttgacaaagacctttctaaattgaaacggaatcgcaaacgtattaccaaccagatgactgacagcagcagagagagaccaatcacaaaacttaatttctaattttccatgaatacttttttttagaaagctcattagcagccctctaaagtgactagaacgtttcattacactgccttgcaatccaaacagtggcaattttttccttcatctgtgagtgaatgtgtgaacgtgtgtatgtaaatgtatgtgtgtatatattaaaaaatgtatatagatgtctgagtgttgtctggagacctatacgtatggttaaaaagatttatgttaatgtatgtgctccaaaacctttcgtgtatgcattcacattgagtgtggctcattttctttccccgaacgccatgactgttcagaagcacaatactatctcctgaaagagataagagacattccctagattcaaaggcaaaacagaagaaacaaacaaacaaacaaacaaagcttgcaaaatattttatggtttccaagcttgatatcctttaaaattattttcattgatggaactggagttgttggaaaaacatagatttaaaatgatttttgatagctgacattgtgatgttgatgtatcacatcagtaataggaccagctttgaatttctgacattggtgtggggatacagtctgtaaatgtttattgagaacatcttgcacacaatttgaattatgtagaatgtcaatcaagtttttgtatatttaaaagttggacatcaattttttcccctgatttcatcaagttatctctgccaagtgctcttgataatttcttcagatttttggaaaaaaacactatataaatgcaatccatgctttttttaaagaacaacattgccagagtatgcttgttctaacaatatagatatataaaccttaaaaataataaaatatctcacccaagacttaaaggaagaattctctgaagggataaagattactaaaaaaaaaaaaaaaaaaaaaaaaattaatggggtgcctttttgttatagtttctattttctgttttgtaggacaagctgcattttctgtaaatataggtctggactaaaggatacataaagaatgcacaaaatgtcaacatcagcagagatgcccagatctatttatctctaagtatatttgaagtgattgctgtttatatgttgtcattttaaaattgtgtgtcagtaaagctacctgtaaaatttcagtccaaaaaaataaagctctcagggagacatgaataaaatcaatgaacattagaaaataaaatatagatgcttaccattaacctaccaactcttaatatccttaaattatgtgatatataaagaggactgttacttttttacttttttttttttttttttttttttttggctttgctttatttatttgtagttgggggctaacgttttctcttttctttctattgatcctgttgtggttgggtttcctgtggagagagtagtttgtcctgttgcactagaacattatttactcactaaattgagtttttcagtcaattaacaaatatttattaagttcctactatgtaccaggcatagtagggctacaatggtaagcaagacagagtccctgcccccaaagagcttatattctaatggggatattaagggatgaatagaataccaatgtgtgcactgtacaggaatcatactatttaaaaataatttgtataaactataatgcttagcacagatggcgagttatctgtgctatgtgaaagctgtgaaatagtgctctaagagttgtcaagagctgtggttttacatcttttcctcattgcaaatttagtgactttctacacactatatggaaataaatgactagcaaataaaacagtcataaatacaaagcagaggttgcactcccccaatcccgagttaacccaggtctgcaataacaccatgttaaaggtgcagatagagacttggctcaaaaaggcttggagatgaggaagattggaatataatgatggttttgtctgttccttaactaaagtgcctctatgtatattcttttctatttgtagcaggataaatttggtctggctcagttttggaactgtattttgaaaatggctttgtcttacagtttaaggaatagacaggtggagggaaagtcacataaaggagcaagtttgtgtagctgtccctcttgccccttttaatcatcctcctttgatatggccatcctggtgggcctcctttgccatttccatttttggtttctttccctgaaaactgtgtgcaggtaattccatgtgccattgttgaaaagaaaaaaaaaaaacaaaaaaaaacctactttttagattggtgctggtgtaagtagccacttttctctcttgggtgtgtattttaaactttttttgtttttttaaattaatgccaaaaagaaaatgcataatttgtaaacttaattatatgtcttatatcttattagcttagtagttggaaccacttagtctttaggtgcaagactgttgttagatagtactgagaaaaaaaaagtatgtgttatgagactgtacatgtttttttaaaaatagcaatatgcaataaagagatgaattcattgggtgtacatatatgctttctatgaattattaaaacagtgtcatcaaactgctttgcagtttccaccattgaatttcaattttgcaaattgttcactgaatcggaaatatatacctgtttttaaacttgtacttactggacctagaagaatatagttttctattatggcagcattcagtatgttcaggttatcatatgccac

SEQ ID NO: 320698 - DNA, 4492 bp, Homo sapiens
agtaacctacgagcggctgtgaaggaaactgtttaaccggatcccattgtacccagagtgcagagccgcctttccagcatgcaggggctgctcagcgtttagtcacatcaagaaatagaacagaattcagccatggccccaagaaagagaggtggacgaggtatttcattcatcttttgctgtttccgaaataatgatcacccagaaatcacgtatcggctgcgaaatgatagcaactttgcgcttcagaccatggaaccagcattgcccatgccccctgtggaggagctggatgtcatgttcagtgaactggtggaaaagcattcctcagcccacaaatgccctgaaatccttcaactggtctaaactgcccgagaacaaactggaaggaacagtatggaccgaaattgatgatacaaaagtcttcaaaattctagatcttgaagacctggaaagaaccttctctgcctatcaaagacagcaggatttctttgtgaacagtaactccaagcagaaagaagcagatgccattgatgacactctgagttccaaacttaaagttaaagagctttcggtgattgatggtcggagagctcagaattgcaacatccttctatcgaggttgaaattatccaatgacgaaatcaaacgggcaattctaacaatggacgaacaggaagatctgcccaaggacatgttggaacagctcttgaaatttgttcctgaaaaaagtgacattgacctattggaggaacataaacacgaactggatcggatggccaaggctgataggttcctttttgagatgagccgaattaatcactatcagcaaaggttgcaatcgctgtacttcaaaaagaagtttgcagagcgtgtggcagaagtgaaacctaaagtggaagcaattcgttctggctcagaagaggtgtttaggagtggtgccctcaagcagttgctggaggtggttttggcatttggaaattatatgaataaaggtcaaagagggaatgcatatggattcaagatatctagcctaaacaaaattgctgacacaaaatccagcatcgacaaaaacattacccttttgcactatctcatcactattgtggaaaataagtaccccagtgttctcaatctaaatgaagaattgcgagatattcctcaagctgcgaaagtaaacatgactgagctggacaaagaaataagtaccttgagaagtggcttgaaagcagtagagacagagctggaatatcagaagtctcagcccccacagcccggagataagtttgtgtctgttgtcagccagttcatcacagtagccagcttcagcttctctgatgttgaagaccttctagcagaagctaaagacctgtttactaaagcagtgaagcactttggggaagaggctggcaaaatacaaccagatgagttctttggcatttttgatcaatttcttcaagctgtgtcagaagccaaacaagaaaacgaaaatatgagaaagaaaaaggaggaagaagaacgtcgagctcgcatggaagctcagctcaaagaacaacgtgaaagggaacgtaaaatgagaaaagctaaagagaatagtgaagaaagcggagagtttgatgaccttgtttcagctttacgctcaggagaagtgtttgacaaagacctttctaaattgaaacggaatcgcaaacgtattaccaaccagatgactgacagcagcagagagagaccaatcacaaaacttaatttctaattttccatgaatacttttttttagaaagctcattagcagccctctaaagtgactagaacgtttcattacactgccttgcaatccaaacagtggcaattttttccttcatctgtgagtgaatgtgtgaacgtgtgtatgtaaatgtatgtgtgtatatattaaaaaatgtatatagatgtctgagtgttgtctggagacctatacgtatggttaaaaagatttatgttaatgtatgtgctccaaaacctttcgtgtatgcattcacattgagtgtggctcattttctttccccgaacgccatgactgttcagaagcacaatactatctcctgaaagagataagagacattccctagattcaaaggcaaaacagaagaaacaaacaaacaaacaaacaaagcttgcaaaatattttatggtttccaagcttgatatcctttaaaattattttcattgatggaactggagttgttggaaaaacatagatttaaaatgatttttgatagctgacattgtgatgttgatgtatcacatcagtaataggaccagctttgaatttctgacattggtgtggggatacagtctgtaaatgtttattgagaacatcttgcacacaatttgaattatgtagaatgtcaatcaagtttttgtatatttaaaagttggacatcaattttttcccctgatttcatcaagttatctctgccaagtgctcttgataatttcttcagatttttggaaaaaaacactatataaatgcaatccatgctttttttaaagaacaacattgccagagtatgcttgttctaacaatatagatatataaaccttaaaaataataaaatatctcacccaagacttaaaggaagaattctctgaagggataaagattactaaaaaaaaaaaaaaaaaaaaaaaaattaatggggtgcctttttgttatagtttctattttctgttttgtaggacaagctgcattttctgtaaatataggtctggactaaaggatacataaagaatgcacaaaatgtcaacatcagcagagatgcccagatctatttatctctaagtatatttgaagtgattgctgtttatatgttgtcattttaaaattgtgtgtcagtaaagctacctgtaaaatttcagtccaaaaaaataaagctctcagggagacatgaataaaatcaatgaacattagaaaataaaatatagatgcttaccattaacctaccaactcttaatatccttaaattatgtgatatataaagaggactgttacttttttacttttttttttttttttttttttttttggctttgctttatttatttgtagttgggggctaacgttttctcttttctttctattgatcctgttgtggttgggtttcctgtggagagagtagtttgtcctgttgcactagaacattatttactcactaaattgagtttttcagtcaattaacaaatatttattaagttcctactatgtaccaggcatagtagggctacaatggtaagcaagacagagtccctgcccccaaagagcttatattctaatggggatattaagggatgaatagaataccaatgtgtgcactgtacaggaatcatactatttaaaaataatttgtataaactataatgcttagcacagatggcgagttatctgtgctatgtgaaagctgtgaaatagtgctctaagagttgtcaagagctgtggttttacatcttttcctcattgcaaatttagtgactttctacacactatatggaaataaatgactagcaaataaaacagtcataaatacaaagcagaggttgcactcccccaatcccgagttaacccaggtctgcaataacaccatgttaaaggtgcagatagagacttggctcaaaaaggcttggagatgaggaagattggaatataatgatggttttgtctgttccttaactaaagtgcctctatgtatattcttttctatttgtagcaggataaatttggtctggctcagttttggaactgtattttgaaaatggctttgtcttacagtttaaggaatagacaggtggagggaaagtcacataaaggagcaagtttgtgtagctgtccctcttgccccttttaatcatcctcctttgatatggccatcctggtgggcctcctttgccatttccatttttggtttctttccctgaaaactgtgtgcaggtaattccatgtgccattgttgaaaagaaaaaaaaaaaacaaaaaaaaacctactttttagattggtgctggtgtaagtagccacttttctctcttgggtgtgtattttaaactttttttgtttttttaaattaatgccaaaaagaaaatgcataatttgtaaacttaattatatgtcttatatcttattagcttagtagttggaaccacttagtctttaggtgcaagactgttgttagatagtactgagaaaaaaaaagtatgtgttatgagactgtacatgtttttttaaaaatagcaatatgcaataaagagatgaattcattgggtgtacatatatgctttctatgaattattaaaacagtgtcatcaaactgctttgcagtttccaccattgaatttcaattttgcaaattgttcactgaatcggaaatatatacctgtttttaaacttgtacttactggacctagaagaatatagttttctattatggcagcattcagtatgttcaggttatcatatgccac

SEQ ID NO: 320699 - DNA, 6103 bp, Homo sapiens
cgcactcattcattaagtggcactgctcagtggtgcgggggtgggcgtgcttccgtgggctgggcgctgggttcgcggcgcgccctcctgctgcctccccggagctcccgggccagtagcgtttagtcacatcaagaaatagaacagaattcagccatggccccaagaaagagaggtggacgaggtatttcattcatcttttgctgtttccgaaataatgatcacccagaaatcacgtatcggctgcgaaatgatagcaactttgcgcttcagaccatggaaccagcattgcccatgccccctgtggaggagctggatgtcatgttcagtgaactggtggatgaactggacctcacagacaaacacagagaagccatgtttgcacttccagctgagaaaaaatggcaaatatactgtagcaagaaaaaggaccaggaagaaaacaagggagctacaagttggcctgaattctacattgatcagctcaattccatggctgctagaaaatctctgctggctttagagaaggaagaagaagaagaaagaagtaaaactatagagagtttaaagacagcactgaggacaaaaccaatgaggtttgtaaccagattcatcgacttggatggcctatcatgtatcctcaactttctaaagaccatggactacgagacctcagagtctcgaatacatacttctctcattggctgtataaaggcgttaatgaacaactctcaaggccgggctcacgtcctggctcattctgagagtattaatgtaattgctcagagtctgagcacagagaacattaaaacgaaggtggccgtgctggaaatcttgggcgccgtgtgcctggttcccgggggccacaagaaggttctgcaggccatgctgcactaccagaagtatgccagcgaaaggacccgctttcagacattaattaacgacttggataaaagcactgggcggtatcgagatgaagtgagtctcaagactgccatcatgtccttcattaatgcagtgctcagccaaggtgcaggagtggagagtttggactttagacttcatcttcgctatgaatttctgatgttaggaattcaacctgtaatagataaattaagggaacacgaaaattcaacattagataggcatttagacttttttgaaatgctccgaaatgaagatgaactagaatttgccaaaagatttgaactggttcacatagacacaaaaagtgcaactcagatgtttgagctgaccaggaagaggctgacacatagtgaagcttacccgcatttcatgtccatcctgcaccactgcctccaaatgccttacaagaggagtggcaacactgttcagtactggctactactagatagaattatacagcagatagttatccagaatgacaaaggacaggaccctgactccacacctttggaaaactttaatattaagaatgtcgtacgaatgttggttaatgaaaatgaagttaagcagtggaaagaacaagcggaaaaaatgagaaaagagcacaatgagctacaacagaaactggaaaagaaagaacgagaatgtgatgctaagactcaagagaaggaagagatgatgcagaccttaaataaaatgaaagagaaacttgaaaaggagactactgagcataagcaagtcaagcagcaggtggcggacctcacagcacagctccatgagctcagcaggagggccgtctgtgcttcaatcccaggtggaccctcgcctggagcaccaggagggccctttccttcctctgtgcctggatctctccttcctcccccaccacccccacctctaccaggtgggatgcttccccctccaccgcctcccctccctccaggtggccctcctcctcccccagggcctcctcccttaggggcaatcatgccacctcctggtgctccaatgggcctagcactgaagaaggaaaagcattcctcagcccacaaatgccctgaaatccttcaactggtctaaactgcccgagaacaaactggaaggaacagtatggaccgaaattgatgatacaaaagtcttcaaaattctagatcttgaagacctggaaagaaccttctctgcctatcaaagacagcagaaagaagcagatgccattgatgacactctgagttccaaacttaaagttaaagagctttcggtgattgatggtcggagagctcagaattgcaacatccttctatcgaggttgaaattatccaatgacgaaatcaaacgggcaattctaacaatggacgaacaggaagatctgcccaaggacatgttggaacagctcttgaaatttgttcctgaaaaaagtgacattgacctattggaggaacataaacacgaactggatcggatggccaaggctgataggttcctttttgagatgagccgaattaatcactatcagcaaaggttgcaatcgctgtacttcaaaaagaagtttgcagagcgtgtggcagaagtgaaacctaaagtggaagcaattcgttctggctcagaagaggtgtttaggagtggtgccctcaagcagttgctggaggtggttttggcatttggaaattatatgaataaaggtcaaagagggaatgcatatggattcaagatatctagcctaaacaaaattgctgacacaaaatccagcatcgacaaaaacattacccttttgcactatctcatcactattgtggaaaataagtaccccagtgttctcaatctaaatgaagaattgcgagatattcctcaagctgcgaaagtaaacatgactgagctggacaaagaaataagtaccttgagaagtggcttgaaagcagtagagacagagctggaatatcagaagtctcagcccccacagcccggagataagtttgtgtctgttgtcagccagttcatcacagtagccagcttcagcttctctgatgttgaagaccttctagcagaagctaaagacctgtttactaaagcagtgaagcactttggggaagaggctggcaaaatacaaccagatgagttctttggcatttttgatcaatttcttcaagctgtgtcagaagccaaacaagaaaacgaaaatatgagaaagaaaaaggaggaagaagaacgtcgagctcgcatggaagctcagctcaaagaacaacgtgaaagggaacgtaaaatgagaaaagctaaagagaatagtgaagaaagcggagagtttgatgaccttgtttcagctttacgctcaggagaagtgtttgacaaagacctttctaaattgaaacggaatcgcaaacgtattaccaaccagatgactgacagcagcagagagagaccaatcacaaaacttaatttctaattttccatgaatacttttttttagaaagctcattagcagccctctaaagtgactagaacgtttcattacactgccttgcaatccaaacagtggcaattttttccttcatctgtgagtgaatgtgtgaacgtgtgtatgtaaatgtatgtgtgtatatattaaaaaatgtatatagatgtctgagtgttgtctggagacctatacgtatggttaaaaagatttatgttaatgtatgtgctccaaaacctttcgtgtatgcattcacattgagtgtggctcattttctttccccgaacgccatgactgttcagaagcacaatactatctcctgaaagagataagagacattccctagattcaaaggcaaaacagaagaaacaaacaaacaaacaaacaaagcttgcaaaatattttatggtttccaagcttgatatcctttaaaattattttcattgatggaactggagttgttggaaaaacatagatttaaaatgatttttgatagctgacattgtgatgttgatgtatcacatcagtaataggaccagctttgaatttctgacattggtgtggggatacagtctgtaaatgtttattgagaacatcttgcacacaatttgaattatgtagaatgtcaatcaagtttttgtatatttaaaagttggacatcaattttttcccctgatttcatcaagttatctctgccaagtgctcttgataatttcttcagatttttggaaaaaaacactatataaatgcaatccatgctttttttaaagaacaacattgccagagtatgcttgttctaacaatatagatatataaaccttaaaaataataaaatatctcacccaagacttaaaggaagaattctctgaagggataaagattactaaaaaaaaaaaaaaaaaaaaaaaaattaatggggtgcctttttgttatagtttctattttctgttttgtaggacaagctgcattttctgtaaatataggtctggactaaaggatacataaagaatgcacaaaatgtcaacatcagcagagatgcccagatctatttatctctaagtatatttgaagtgattgctgtttatatgttgtcattttaaaattgtgtgtcagtaaagctacctgtaaaatttcagtccaaaaaaataaagctctcagggagacatgaataaaatcaatgaacattagaaaataaaatatagatgcttaccattaacctaccaactcttaatatccttaaattatgtgatatataaagaggactgttacttttttacttttttttttttttttttttttttttggctttgctttatttatttgtagttgggggctaacgttttctcttttctttctattgatcctgttgtggttgggtttcctgtggagagagtagtttgtcctgttgcactagaacattatttactcactaaattgagtttttcagtcaattaacaaatatttattaagttcctactatgtaccaggcatagtagggctacaatggtaagcaagacagagtccctgcccccaaagagcttatattctaatggggatattaagggatgaatagaataccaatgtgtgcactgtacaggaatcatactatttaaaaataatttgtataaactataatgcttagcacagatggcgagttatctgtgctatgtgaaagctgtgaaatagtgctctaagagttgtcaagagctgtggttttacatcttttcctcattgcaaatttagtgactttctacacactatatggaaataaatgactagcaaataaaacagtcataaatacaaagcagaggttgcactcccccaatcccgagttaacccaggtctgcaataacaccatgttaaaggtgcagatagagacttggctcaaaaaggcttggagatgaggaagattggaatataatgatggttttgtctgttccttaactaaagtgcctctatgtatattcttttctatttgtagcaggataaatttggtctggctcagttttggaactgtattttgaaaatggctttgtcttacagtttaaggaatagacaggtggagggaaagtcacataaaggagcaagtttgtgtagctgtccctcttgccccttttaatcatcctcctttgatatggccatcctggtgggcctcctttgccatttccatttttggtttctttccctgaaaactgtgtgcaggtaattccatgtgccattgttgaaaagaaaaaaaaaaaacaaaaaaaaacctactttttagattggtgctggtgtaagtagccacttttctctcttgggtgtgtattttaaactttttttgtttttttaaattaatgccaaaaagaaaatgcataatttgtaaacttaattatatgtcttatatcttattagcttagtagttggaaccacttagtctttaggtgcaagactgttgttagatagtactgagaaaaaaaaagtatgtgttatgagactgtacatgtttttttaaaaatagcaatatgcaataaagagatgaattcattgggtgtacatatatgctttctatgaattattaaaacagtgtcatcaaactgctttgcagtttccaccattgaatttcaattttgcaaattgttcactgaatcggaaatatatacctgtttttaaacttgtacttactggacctagaagaatatagttttctattatggcagcattcagtatgttcaggttatcatatgccac

SEQ ID NO: 320700 - DNA, 3456 bp, Homo sapiens
cggctggcattttgctcactccttgtaccccttagaaacattacccttttgcactatctcatcactattgtggaaaataagtaccccagtgttctcaatctaaatgaagaattgcgagatattcctcaagctgcgaaagtaaacatgactgagctggacaaagaaataagtaccttgagaagtggcttgaaagcagtagagacagagctggaatatcagaagtctcagcccccacagcccggagataagtttgtgtctgttgtcagccagttcatcacagtagccagcttcagcttctctgatgttgaagaccttctagcagaagctaaagacctgtttactaaagcagtgaagcactttggggaagaggctggcaaaatacaaccagatgagttctttggcatttttgatcaatttcttcaagctgtgtcagaagccaaacaagaaaacgaaaatatgagaaagaaaaaggaggaagaagaacgtcgagctcgcatggaagctcagctcaaagaacaacgtgaaagggaacgtaaaatgagaaaagctaaagagaatagtgaagaaagcggagagtttgatgaccttgtttcagctttacgctcaggagaagtgtttgacaaagacctttctaaattgaaacggaatcgcaaacgtattaccaaccagatgactgacagcagcagagagagaccaatcacaaaacttaatttctaattttccatgaatacttttttttagaaagctcattagcagccctctaaagtgactagaacgtttcattacactgccttgcaatccaaacagtggcaattttttccttcatctgtgagtgaatgtgtgaacgtgtgtatgtaaatgtatgtgtgtatatattaaaaaatgtatatagatgtctgagtgttgtctggagacctatacgtatggttaaaaagatttatgttaatgtatgtgctccaaaacctttcgtgtatgcattcacattgagtgtggctcattttctttccccgaacgccatgactgttcagaagcacaatactatctcctgaaagagataagagacattccctagattcaaaggcaaaacagaagaaacaaacaaacaaacaaacaaagcttgcaaaatattttatggtttccaagcttgatatcctttaaaattattttcattgatggaactggagttgttggaaaaacatagatttaaaatgatttttgatagctgacattgtgatgttgatgtatcacatcagtaataggaccagctttgaatttctgacattggtgtggggatacagtctgtaaatgtttattgagaacatcttgcacacaatttgaattatgtagaatgtcaatcaagtttttgtatatttaaaagttggacatcaattttttcccctgatttcatcaagttatctctgccaagtgctcttgataatttcttcagatttttggaaaaaaacactatataaatgcaatccatgctttttttaaagaacaacattgccagagtatgcttgttctaacaatatagatatataaaccttaaaaataataaaatatctcacccaagacttaaaggaagaattctctgaagggataaagattactaaaaaaaaaaaaaaaaaaaaaaaaattaatggggtgcctttttgttatagtttctattttctgttttgtaggacaagctgcattttctgtaaatataggtctggactaaaggatacataaagaatgcacaaaatgtcaacatcagcagagatgcccagatctatttatctctaagtatatttgaagtgattgctgtttatatgttgtcattttaaaattgtgtgtcagtaaagctacctgtaaaatttcagtccaaaaaaataaagctctcagggagacatgaataaaatcaatgaacattagaaaataaaatatagatgcttaccattaacctaccaactcttaatatccttaaattatgtgatatataaagaggactgttacttttttacttttttttttttttttttttttttttggctttgctttatttatttgtagttgggggctaacgttttctcttttctttctattgatcctgttgtggttgggtttcctgtggagagagtagtttgtcctgttgcactagaacattatttactcactaaattgagtttttcagtcaattaacaaatatttattaagttcctactatgtaccaggcatagtagggctacaatggtaagcaagacagagtccctgcccccaaagagcttatattctaatggggatattaagggatgaatagaataccaatgtgtgcactgtacaggaatcatactatttaaaaataatttgtataaactataatgcttagcacagatggcgagttatctgtgctatgtgaaagctgtgaaatagtgctctaagagttgtcaagagctgtggttttacatcttttcctcattgcaaatttagtgactttctacacactatatggaaataaatgactagcaaataaaacagtcataaatacaaagcagaggttgcactcccccaatcccgagttaacccaggtctgcaataacaccatgttaaaggtgcagatagagacttggctcaaaaaggcttggagatgaggaagattggaatataatgatggttttgtctgttccttaactaaagtgcctctatgtatattcttttctatttgtagcaggataaatttggtctggctcagttttggaactgtattttgaaaatggctttgtcttacagtttaaggaatagacaggtggagggaaagtcacataaaggagcaagtttgtgtagctgtccctcttgccccttttaatcatcctcctttgatatggccatcctggtgggcctcctttgccatttccatttttggtttctttccctgaaaactgtgtgcaggtaattccatgtgccattgttgaaaagaaaaaaaaaaaacaaaaaaaaacctactttttagattggtgctggtgtaagtagccacttttctctcttgggtgtgtattttaaactttttttgtttttttaaattaatgccaaaaagaaaatgcataatttgtaaacttaattatatgtcttatatcttattagcttagtagttggaaccacttagtctttaggtgcaagactgttgttagatagtactgagaaaaaaaaagtatgtgttatgagactgtacatgtttttttaaaaatagcaatatgcaataaagagatgaattcattgggtgtacatatatgctttctatgaattattaaaacagtgtcatcaaactgctttgcagtttccaccattgaatttcaattttgcaaattgttcactgaatcggaaatatatacctgtttttaaacttgtacttactggacctagaagaatatagttttctattatggcagcattcagtatgttcaggttatcatatgccac

SEQ ID NO: 320701 - DNA, 3507 bp, Homo sapiens
gagaaatcacatagatcaagtacttagattgttggtaaattgctatttgcaaatatgcgtgtgcacatgggcatggctttggcatggtgggaggaagggcaggggcactagagtataacaaaatgttttagaacaagttttgatgtgtttgccattctgatttattaaatttaaggcatgtgaaatatgagacgaggtgtgtctcatgtctgtatttgaagcctgcattgacattattcatttcctgtgtttaaggagctggaatatcagaagtctcagcccccacagcccggagataagtttgtgtctgttgtcagccagttcatcacagtagccagcttcagcttctctgatgttgaagaccttctagcagaagctaaagacctgtttactaaagcagtgaagcactttggggaagaggctggcaaaatacaaccagatgagttctttggcatttttgatcaatttcttcaagctgtgtcagaagccaaacaagaaaacgaaaatatgagaaagaaaaaggaggaagaagaacgtcgagctcgcatggaagctcagctcaaagaacaacgtgaaagggaacgtaaaatgagaaaagctaaagagaatagtgaagaaagcggagagtttgatgaccttgtttcagctttacgctcaggagaagtgtttgacaaagacctttctaaattgaaacggaatcgcaaacgtattaccaaccagatgactgacagcagcagagagagaccaatcacaaaacttaatttctaattttccatgaatacttttttttagaaagctcattagcagccctctaaagtgactagaacgtttcattacactgccttgcaatccaaacagtggcaattttttccttcatctgtgagtgaatgtgtgaacgtgtgtatgtaaatgtatgtgtgtatatattaaaaaatgtatatagatgtctgagtgttgtctggagacctatacgtatggttaaaaagatttatgttaatgtatgtgctccaaaacctttcgtgtatgcattcacattgagtgtggctcattttctttccccgaacgccatgactgttcagaagcacaatactatctcctgaaagagataagagacattccctagattcaaaggcaaaacagaagaaacaaacaaacaaacaaacaaagcttgcaaaatattttatggtttccaagcttgatatcctttaaaattattttcattgatggaactggagttgttggaaaaacatagatttaaaatgatttttgatagctgacattgtgatgttgatgtatcacatcagtaataggaccagctttgaatttctgacattggtgtggggatacagtctgtaaatgtttattgagaacatcttgcacacaatttgaattatgtagaatgtcaatcaagtttttgtatatttaaaagttggacatcaattttttcccctgatttcatcaagttatctctgccaagtgctcttgataatttcttcagatttttggaaaaaaacactatataaatgcaatccatgctttttttaaagaacaacattgccagagtatgcttgttctaacaatatagatatataaaccttaaaaataataaaatatctcacccaagacttaaaggaagaattctctgaagggataaagattactaaaaaaaaaaaaaaaaaaaaaaaaattaatggggtgcctttttgttatagtttctattttctgttttgtaggacaagctgcattttctgtaaatataggtctggactaaaggatacataaagaatgcacaaaatgtcaacatcagcagagatgcccagatctatttatctctaagtatatttgaagtgattgctgtttatatgttgtcattttaaaattgtgtgtcagtaaagctacctgtaaaatttcagtccaaaaaaataaagctctcagggagacatgaataaaatcaatgaacattagaaaataaaatatagatgcttaccattaacctaccaactcttaatatccttaaattatgtgatatataaagaggactgttacttttttacttttttttttttttttttttttttttggctttgctttatttatttgtagttgggggctaacgttttctcttttctttctattgatcctgttgtggttgggtttcctgtggagagagtagtttgtcctgttgcactagaacattatttactcactaaattgagtttttcagtcaattaacaaatatttattaagttcctactatgtaccaggcatagtagggctacaatggtaagcaagacagagtccctgcccccaaagagcttatattctaatggggatattaagggatgaatagaataccaatgtgtgcactgtacaggaatcatactatttaaaaataatttgtataaactataatgcttagcacagatggcgagttatctgtgctatgtgaaagctgtgaaatagtgctctaagagttgtcaagagctgtggttttacatcttttcctcattgcaaatttagtgactttctacacactatatggaaataaatgactagcaaataaaacagtcataaatacaaagcagaggttgcactcccccaatcccgagttaacccaggtctgcaataacaccatgttaaaggtgcagatagagacttggctcaaaaaggcttggagatgaggaagattggaatataatgatggttttgtctgttccttaactaaagtgcctctatgtatattcttttctatttgtagcaggataaatttggtctggctcagttttggaactgtattttgaaaatggctttgtcttacagtttaaggaatagacaggtggagggaaagtcacataaaggagcaagtttgtgtagctgtccctcttgccccttttaatcatcctcctttgatatggccatcctggtgggcctcctttgccatttccatttttggtttctttccctgaaaactgtgtgcaggtaattccatgtgccattgttgaaaagaaaaaaaaaaaacaaaaaaaaacctactttttagattggtgctggtgtaagtagccacttttctctcttgggtgtgtattttaaactttttttgtttttttaaattaatgccaaaaagaaaatgcataatttgtaaacttaattatatgtcttatatcttattagcttagtagttggaaccacttagtctttaggtgcaagactgttgttagatagtactgagaaaaaaaaagtatgtgttatgagactgtacatgtttttttaaaaatagcaatatgcaataaagagatgaattcattgggtgtacatatatgctttctatgaattattaaaacagtgtcatcaaactgctttgcagtttccaccattgaatttcaattttgcaaattgttcactgaatcggaaatatatacctgtttttaaacttgtacttactggacctagaagaatatagttttctattatggcagcattcagtatgttcaggttatcatatgccac

SEQ ID NO: 320702 - DNA, 5115 bp, Homo sapiens
cgcactcattcattaagtggcactgctcagtggtgcgggggtgggcgtgcttccgtgggctgggcgctgggttcgcggcgcgccctcctgctgcctccccggagctcccgggccagtagcgtttagtcacatcaagaaatagaacagaattcagccatggccccaagaaagagaggtggacgaggtatttcattcatcttttgctgtttccgaaataatgatcacccagaaatcacgtatcggctgcgaaatgatagcaactttgcgcttcagaccatggaaccagcattgcccatgccccctgtggaggagctggatgtcatgttcagtgaactggtggatgaactggacctcacagacaaacacagagaagccatgtttgcacttccagctgagaaaaaatggcaaatatactgtagcaagaaaaaggaccaggaagaaaacaagggagctacaagttggcctgaattctacattgatcagctcaattccatggctgctagaaaatctctgctggctttagagaaggaagaagaagaagaaagaagtaaaactatagagagtttaaagacagcactgaggacaaaaccaatgaggtttgtaaccagattcatcgacttggatggcctatcatgtatcctcaactttctaaagaccatggactacgagacctcagagtctcgaatacatacttctctcattggctgtataaaggcgttaatgaacaactctcaaggccgggctcacgtcctggctcattctgagagtattaatgtaattgctcagagtctgagcacagagaacattaaaacgaaggtggccgtgctggaaatcttgggcgccgtgtgcctggttcccgggggccacaagaaggttctgcaggccatgctgcactaccagaagtatgccagcgaaaggacccgctttcagacattaattaacgacttggataaaagcactgggcggtatcgagatgaagtgagtctcaagactgccatcatgtccttcattaatgcagtgctcagccaaggtgcaggagtggagagtttggactttagacttcatcttcgctatgaatttctgatgttaggaattcaacctgtaatagataaattaagggaacacgaaaattcaacattagataggcatttagacttttttgaaatgctccgaaatgaagatgaactagaatttgccaaaagatttgaactggttcacatagacacaaaaagtgcaactcagatgtttgagctgaccaggaagaggctgacacatagtgaagcttacccgcatttcatgtccatcctgcaccactgcctccaaatgccttacaagaggagtggcaacactgttcagtactggctactactagatagaattatacagcagatagttatccagaatgacaaaggacaggaccctgactccacacctttggaaaactttaatattaagaatgtcgtacgaatgttggttaatgaaaatgaagttaagcagtggaaagaacaagcggaaaaaatgagaaaagagcacaatgagctacaacagaaactggaaaagaaagaacgagaatgtgatgctaagactcaagagaaggaagagatgatgcagaccttaaataaaatgaaagagaaacttgaaaaggagactactgagcataagcaagtcaagcagcaggtggcggacctcacagcacagctccatgagctcagcaggagggccgtctgtgcttcaatcccaggtggaccctcgcctggagcaccaggagggccctttccttcctctgtgcctggatctctccttcctcccccaccacccccacctctaccaggtgggatgcttccccctccaccgcctcccctccctccaggtggccctcctcctcccccagggcctcctcccttaggggcaatcatgccacctcctggtgctccaatgggcctagcactgaagaaggaaaagcattcctcagcccacaaatgccctgaaatccttcaactggtctaaactgcccgagaacaaactggaaggaacagtatggaccgaaattgatgatacaaaagtcttcaaaattctagatcttgaagacctggaaagaaccttctctgcctatcaaagacagcaggatttctttgtgaacagtaactccaagcagaaagaagcagatgccattgatgacactctgagttccaaacttaaagttaaagagctttcggtgattgatggtcggagagctcagaattgcaacatccttctatcgaggttgaaattatccaatgacgaaatcaaacgggcaattctaacaatggacgaacaggaagatctgcccaaggacatgttggaacagctcttgaaatttgttcctgaaaaaagtgacattgacctattggaggaacataaacacgaactggatcggatggccaaggctgataggttcctttttgagatgagccgaattaatcactatcagcaaaggttgcaatcgctgtacttcaaaaagaagtttgcagagcgtgtggcagaagtgaaacctaaagtggaagcaattcgttctggctcagaagaggtgtttaggagtggtgccctcaagcagttgctggaggtggttttggcatttggaaattatatgaataaaggtcaaagagggaatgcatatggattcaagatatctagcctaaacaaaattgctgacacaaaatccagcatcgacaaaaacattacccttttgcactatctcatcactattgtggaaaataagtaccccagtgttctcaatctaaatgaagaattgcgagatattcctcaagctgcgaaagtaaacatgactgagctggacaaagaaataagtaccttgagaagtggcttgaaagcagtagagacagagctggaatatcagaagtctcagcccccacagcccggagataagtttgtgtctgttgtcagccagttcatcacagtagccagcttcagcttctctgatgttgaagaccttctagcagaagctaaagacctgtttactaaagcagtgaagcactttggggaagaggctggcaaaatacaaccagatgagttctttggcatttttgatcaatttcttcaagctgtgtcagaagccaaacaagaaaacgaaaatatgagaaagaaaaaggaggaagaagaacgtcgagctcgcatggaagctcagctcaaagaacaacgtgaaagggaacgtaaaatgagaaaagctaaagagaatagtgaagaaagcggagagtttgatgaccttgtttcagctttacgctcaggagaagtgtttgacaaagacctttctaaattgaaacggaatcgcaaacgtattaccaaccagatgactgacagcagcagagagagaccaatcacaaaacttaatttctaattttccatgaatacttttttttagaaagctcattagcagccctctaaagtgactagaacgtttcattacactgccttgcaatccaaacagtggcaattttttccttcatctgtgagtgaatgtgtgaacgtgtgtatgtaaatgtatgtgtgtatatattaaaaaatgtatatagatgtctgagtgttgtctggagacctatacgtatggttaaaaagatttatgttaatgtatgtgctccaaaacctttcgtgtatgcattcacattgagtgtggctcattttctttccccgaacgccatgactgttcagaagcacaatactatctcctgaaagagataagagacattccctagattcaaaggcaaaacagaagaaacaaacaaacaaacaaacaaagcttgcaaaatattttatggtttccaagcttgatatcctttaaaattattttcattgatggaactggagttgttggaaaaacatagatttaaaatgatttttgatagctgacattgtgatgttgatgtatcacatcagtaataggaccagctttgaatttctgacattggtgtggggatacagtctgtaaatgtttattgagaacatcttgcacacaatttgaattatgtagaatgtcaatcaagtttttgtatatttaaaagttggacatcaattttttcccctgatttcatcaagttatctctgccaagtgctcttgataatttcttcagatttttggaaaaaaacactatataaatgcaatccatgctttttttaaagaacaacattgccagagtatgcttgttctaacaatatagatatataaaccttaaaaataataaaatatctcacccaagacttaaaggaagaattctctgaagggataaagattactaaaaaaaaaaaaaaaaaaaaaaaaaaaaatttaagtgggggtgccctcttttgggttataatagttcctatattttctctttggttttgtgttaggacaaagcctgtgccattttctctgtgttaaatattaggctctgtggacaataaaggatatactttaaaacaatgtgccccaaacattgttccaacatttccagcagagaattgcccagaatcttatttatctcctaaagtaatctattcggaagtagatcggctcgtttcatactgtggtcccatttcaacaacttggtggtgtcccagtaaaagctacctgtaaaattttccagtcccaaaaaaaataaaacgctcctccagggcagactttgaaataaaaacccagctgaacttttcagaaaagtgaacaatcttagatgctttaccatttaaagcctgaccaagctcttagataattccttaccagtttcctggtggccttttttaccggggacctgatcctccttatttgaaaccttgcatgatctgaccatacacggggggactgcgccttaatatacactgagaaacggcaggggcaaacaagattccataccgtatgctatgccatatgagacccccgtgagcgacgggcacgaccccgtgcggcaaagaacaattgcctccgtgtgacctaaaacacctttttaatccccactaaattgagtcttcccagccgataaacaaaatttagttactctccaataagtaccgcgaacattctggactatatgtgtagcagaacaagactctccccacaaaaacatttatacgagcgcgaatagagac

SEQ ID NO: 320703 - DNA, 4672 bp, Homo sapiens
cgcactcattcattaagtggcactgctcagtggtgcgggggtgggcgtgcttccgtgggctgggcgctgggttcgcggcgcgccctcctgctgcctccccggagctcccgggccagtagcgtttagtcacatcaagaaatagaacagaattcagccatggccccaagaaagagaggtggacgaggtatttcattcatcttttgctgtttccgaaataatgatcacccagaaatcacgtatcggctgcgaaatgatagcaactttgcgcttcagaccatggaaccagcattgcccatgccccctgtggaggagctggatgtcatgttcagtgaactggtggatgaactggacctcacagacaaacacagagaagccatgtttgcacttccagctgagaaaaaatggcaaatatactgtagcaagaaaaaggaccaggaagaaaacaagggagctacaagttggcctgaattctacattgatcagctcaattccatggctgctagaaaatctctgctggctttagagaaggaagaagaagaagaaagaagtaaaactatagagagtttaaagacagcactgaggacaaaaccaatgaggtttgtaaccagattcatcgacttggatggcctatcatgtatcctcaactttctaaagaccatggactacgagacctcagagtctcgaatacatacttctctcattggctgtataaaggcgttaatgaacaactctcaaggccgggctcacgtcctggctcattctgagagtattaatgtaattgctcagagtctgagcacagagaacattaaaacgaaggtggccgtgctggaaatcttgggcgccgtgtgcctggttcccgggggccacaagaaggttctgcaggccatgctgcactaccagaagtatgccagcgaaaggacccgctttcagacattaattaacgacttggataaaagcactgggcggtatcgagatgaagtgagtctcaagactgccatcatgtccttcattaatgcagtgctcagccaaggtgcaggagtggagagtttggactttagacttcatcttcgctatgaatttctgatgttaggaattcaacctgtaatagataaattaagggaacacgaaaattcaacattagataggcatttagacttttttgaaatgctccgaaatgaagatgaactagaatttgccaaaagatttgaactggttcacatagacacaaaaagtgcaactcagatgtttgagctgaccaggaagaggctgacacatagtgaagcttacccgcatttcatgtccatcctgcaccactgcctccaaatgccttacaagaggagtggcaacactgttcagtactggctactactagatagaattatacagcagatagttatccagaatgacaaaggacaggaccctgactccacacctttggaaaactttaatattaagaatgtcgtacgaatgttggttaatgaaaatgaagttaagcagtggaaagaacaagcggaaaaaatgagaaaagagcacaatgagctacaacagaaactggaaaagaaagaacgagaatgtgatgctaagactcaagagaaggaagagatgatgcagaccttaaataaaatgaaagagaaacttgaaaaggagactactgagcataagcaagtcaagcagcaggtggcggacctcacagcacagctccatgagctcagcaggagggccgtctgtgcttcaatcccaggtggaccctcgcctggagcaccaggagggccctttccttcctctgtgcctggatctctccttcctcccccaccacccccacctctaccaggtgggatgcttccccctccaccgcctcccctccctccaggtggccctcctcctcccccagggcctcctcccttaggggcaatcatgccacctcctggtgctccaatgggcctagcactgaagaaggaaaagcattcctcagcccacaaatgccctgaaatccttcaactggtctaaactgcccgagaacaaactggaaggaacagtatggaccgaaattgatgatacaaaagtcttcaaaattctagatcttgaagacctggaaagaaccttctctgcctatcaaagacagcaggatttctttgtgaacagtaactccaagcagaaagaagcagatgccattgatgacactctgagttccaaacttaaagttaaagagctttcggtgattgatggtcggagagctcagaattgcaacatccttctatcgaggttgaaattatccaatgacgaaatcaaacgggcaattctaacaatggacgaacaggaagatctgcccaaggacatgttggaacagctcttgaaatttgttcctgaaaaaagtgacattgacctattggaggaacataaacacgaactggatcggatggccaaggctgataggttcctttttgagatgagccgaattaatcactatcagcaaaggttgcaatcgctgtacttcaaaaagaagtttgcagagcgtgtggcagaagtgaaacctaaagtggaagcaattcgttctggctcagaagaggtgtttaggagtggtgccctcaagcagttgctggaggtggttttggcatttggaaattatatgaataaaggtcaaagagggaatgcatatggattcaagatatctagcctaaacaaaattgctgacacaaaatccagcatcgacaaaaacattacccttttgcactatctcatcactattgtggaaaataagtaccccagtgttctcaatctaaatgaagaattgcgagatattcctcaagctgcgaaagtaaacatgactgagctggacaaagaaataagtaccttgagaagtggcttgaaagcagtagagacagagctggaatatcagaagtctcagcccccacagcccggagataagtttgtgtctgttgtcagccagttcatcacagtagccagcttcagcttctctgatgttgaagaccttctagcagaagctaaagacctgtttactaaagcagtgaagcactttggggaagaggctggcaaaatacaaccagatgagttctttggcatttttgatcaatttcttcaagctgtgtcagaagccaaacaagaaaacgaaaatatgagaaagaaaaaggaggaagaagaacgtcgagctcgcatggaagctcagctcaaagaacaacgtgaaagggaacgtaaaatgagaaaagctaaagagaatagtgaagaaagcggagagtttgatgaccttgtttcagctttacgctcaggagaagtgtttgacaaagacctttctaaattgaaacggaatcgcaaacgtattaccaaccagatgactgacagcagcagagagagaccaatcacaaaacttaatttctaattttccatgaatacttttttttagaaagctcattagcagccctctaaagtgactagaacgtttcattacactgccttgcaatccaaacagtggcaattttttccttcatctgtgagtgaatgtgtgaacgtgtgtatgtaaatgtatgtgtgtatatattaaaaaatgtatatagatgtctgagtgttgtctggagacctatacgtatggttaaaaagatttatgttaatgtatgtgctccaaaacctttcgtgtatgcattcacattgagtgtggctcattttctttccccgaacgccatgactgttcagaagcacaatactatctcctgaaagagataagagacattccctagattcaaaggcaaaacagaagaaacaaacaaacaaacaaacaaagcttgcaaaatattttatggtttccaagcttgatatcctttaaaattattttcattgatggaactggagttgttggaaaaacatagatttaaaatgatttttgatagctgacattgtgatgttgatgtatcacatcagtaataggaccagctttgaatttctgacattggtgtggggatacagtctgtaaatgtttattgagaacatcttgcacacaatttgaattatgtagaatgtcaatcaagtttttgtatatttaaaagttggacatcaattttttcccctgatttcatcaagttatctctgccaagtgctcttgataatttcttcagatttttggaaaaaaacactatataaatgcaatccatgctttttttaaagaacaacattgccagagtatgcttgttctaacaatatagatatataaaccttaaaaataataaaatatctcacccaagacttaaaggaagaattctctgaagggataaagattactaaaaaaaaaaaaaaaaaaaaaaaatttaggggggcccttttgggtaaatagcttgcctattacctgtttggtaggaacaagcctgcattttgcctcggtaaatatgggtcctggacctaagggaataccataaagaaatgcccaaattgtcaacttcgcgcagaagattgccccagaattctttttgacctcctaaggacattttcgcaaggtgaatgccggcttaatattggtggccactttaaaaattggtggtgtcccgaaaaggttacccgcgtaaaattgtcattcgcaaaaaaataagaggctctcagggaagcacgtgagttaaattcatgacacctcgcacacataacctcatgattggttcaccctttagcatac

SEQ ID NO: 320704 - DNA, 2580 bp, Homo sapiens
ctctctctctctctctctctctctctctctctctctctctctctctctctctctctctcatttatgttaatgtatgtgctccaaaacctttcgtgtatgcattcacattgagtgtggctcattttctttccccgaacgccatgactgttcagaagcacaatactatctcctgaaagagataagagacattccctagattcaaaggcaaaacagaagaaacaaacaaacaaacaaacaaagcttgcaaaatattttatggtttccaagcttgatatcctttaaaattattttcattgatggaactggagttgttggaaaaacatagatttaaaatgatttttgatagctgacattgtgatgttgatgtatcacatcagtaataggaccagctttgaatttctgacattggtgtggggatacagtctgtaaatgtttattgagaacatcttgcacacaatttgaattatgtagaatgtcaatcaagtttttgtatatttaaaagttggacatcaattttttcccctgatttcatcaagttatctctgccaagtgctcttgataatttcttcagatttttggaaaaaaacactatataaatgcaatccatgctttttttaaagaacaacattgccagagtatgcttgttctaacaatatagatatataaaccttaaaaataataaaatatctcacccaagacttaaaggaagaattctctgaagggataaagattactaaaaaaaaaaaaaaaaaaaaaaaaattaatggggtgcctttttgttatagtttctattttctgttttgtaggacaagctgcattttctgtaaatataggtctggactaaaggatacataaagaatgcacaaaatgtcaacatcagcagagatgcccagatctatttatctctaagtatatttgaagtgattgctgtttatatgttgtcattttaaaattgtgtgtcagtaaagctacctgtaaaatttcagtccaaaaaaataaagctctcagggagacatgaataaaatcaatgaacattagaaaataaaatatagatgcttaccattaacctaccaactcttaatatccttaaattatgtgatatataaagaggactgttacttttttacttttttttttttttttttttttttttggctttgctttatttatttgtagttgggggctaacgttttctcttttctttctattgatcctgttgtggttgggtttcctgtggagagagtagtttgtcctgttgcactagaacattatttactcactaaattgagtttttcagtcaattaacaaatatttattaagttcctactatgtaccaggcatagtagggctacaatggtaagcaagacagagtccctgcccccaaagagcttatattctaatggggatattaagggatgaatagaataccaatgtgtgcactgtacaggaatcatactatttaaaaataatttgtataaactataatgcttagcacagatggcgagttatctgtgctatgtgaaagctgtgaaatagtgctctaagagttgtcaagagctgtggttttacatcttttcctcattgcaaatttagtgactttctacacactatatggaaataaatgactagcaaataaaacagtcataaatacaaagcagaggttgcactcccccaatcccgagttaacccaggtctgcaataacaccatgttaaaggtgcagatagagacttggctcaaaaaggcttggagatgaggaagattggaatataatgatggttttgtctgttccttaactaaagtgcctctatgtatattcttttctatttgtagcaggataaatttggtctggctcagttttggaactgtattttgaaaatggctttgtcttacagtttaaggaatagacaggtggagggaaagtcacataaaggagcaagtttgtgtagctgtccctcttgccccttttaatcatcctcctttgatatggccatcctggtgggcctcctttgccatttccatttttggtttctttccctgaaaactgtgtgcaggtaattccatgtgccattgttgaaaagaaaaaaaaaaaacaaaaaaaaacctactttttagattggtgctggtgtaagtagccacttttctctcttgggtgtgtattttaaactttttttgtttttttaaattaatgccaaaaagaaaatgcataatttgtaaacttaattatatgtcttatatcttattagcttagtagttggaaccacttagtctttaggtgcaagactgttgttagatagtactgagaaaaaaaaagtatgtgttatgagactgtacatgtttttttaaaaatagcaatatgcaataaagagatgaattcattgggtgtacatatatgctttctatgaattattaaaacagtgtcatcaaactgctttgcagtttccaccattgaatttcaattttgcaaattgttcactgaatcggaaatatatacctgtttttaaacttgtacttactggacctagaagaatatagttttctattatggcagcattcagtatgttcaggttatcatatgccac

SEQ ID NO: 320705 - DNA, 2156 bp, Homo sapiens
tcttctccctctcttactatgtataaatccgcttaattctttcttgccaccctgatgggagaagatggtcttgctcccatcagactgctgttttgataaccaacaagaggtcaatgtatagaaatccctgatgggacgaagacgcagtcttctcccatcggacactatataaatgcaatccatgctttttttaaagaacaacattgccagagtatgcttgttctaacaatatagatatataaaccttaaaaataataaaatatctcacccaagacttaaaggaagaattctctgaagggataaagattactaaaaaaaaaaaaaaaaaaaaaaaaattaatggggtgcctttttgttatagtttctattttctgttttgtaggacaagctgcattttctgtaaatataggtctggactaaaggatacataaagaatgcacaaaatgtcaacatcagcagagatgcccagatctatttatctctaagtatatttgaagtgattgctgtttatatgttgtcattttaaaattgtgtgtcagtaaagctacctgtaaaatttcagtccaaaaaaataaagctctcagggagacatgaataaaatcaatgaacattagaaaataaaatatagatgcttaccattaacctaccaactcttaatatccttaaattatgtgatatataaagaggactgttacttttttacttttttttttttttttttttttttttggctttgctttatttatttgtagttgggggctaacgttttctcttttctttctattgatcctgttgtggttgggtttcctgtggagagagtagtttgtcctgttgcactagaacattatttactcactaaattgagtttttcagtcaattaacaaatatttattaagttcctactatgtaccaggcatagtagggctacaatggtaagcaagacagagtccctgcccccaaagagcttatattctaatggggatattaagggatgaatagaataccaatgtgtgcactgtacaggaatcatactatttaaaaataatttgtataaactataatgcttagcacagatggcgagttatctgtgctatgtgaaagctgtgaaatagtgctctaagagttgtcaagagctgtggttttacatcttttcctcattgcaaatttagtgactttctacacactatatggaaataaatgactagcaaataaaacagtcataaatacaaagcagaggttgcactcccccaatcccgagttaacccaggtctgcaataacaccatgttaaaggtgcagatagagacttggctcaaaaaggcttggagatgaggaagattggaatataatgatggttttgtctgttccttaactaaagtgcctctatgtatattcttttctatttgtagcaggataaatttggtctggctcagttttggaactgtattttgaaaatggctttgtcttacagtttaaggaatagacaggtggagggaaagtcacataaaggagcaagtttgtgtagctgtccctcttgccccttttaatcatcctcctttgatatggccatcctggtgggcctcctttgccatttccatttttggtttctttccctgaaaactgtgtgcaggtaattccatgtgccattgttgaaaagaaaaaaaaaaaacaaaaaaaaacctactttttagattggtgctggtgtaagtagccacttttctctcttgggtgtgtattttaaactttttttgtttttttaaattaatgccaaaaagaaaatgcataatttgtaaacttaattatatgtcttatatcttattagcttagtagttggaaccacttagtctttaggtgcaagactgttgttagatagtactgagaaaaaaaaagtatgtgttatgagactgtacatgtttttttaaaaatagcaatatgcaataaagagatgaattcattgggtgtacatatatgctttctatgaattattaaaacagtgtcatcaaactgctttgcagtttccaccattgaatttcaattttgcaaattgttcactgaatcggaaatatatacctgtttttaaacttgtacttactggacctagaagaatatagttttctattatggcagcattcagtatgttcaggttatcatatgccac

SEQ ID NO: 320706 - DNA, 3399 bp, Homo sapiens
cgcactcattcattaagtggcactgctcagtggtgcgggggtgggcgtgcttccgtgggctgggcgctgggttcgcggcgcgccctcctgctgcctccccggagctcccgggccagtagcgtttagtcacatcaagaaatagaacagaattcagccatggccccaagaaagagaggtggacgaggtatttcattcatcttttgctgtttccgaaataatgatcacccagaaatcacgtatcggctgcgaaatgatagcaactttgcgcttcagaccatggaaccagcattgcccatgccccctgtggaggagctggatgtcatgttcagtgaactggtggatgaactggacctcacagacaaacacagagaagccatgtttgcacttccagctgagaaaaaatggcaaatatactgtagcaagaaaaaggaccaggaagaaaacaagggagctacaagttggcctgaattctacattgatcagctcaattccatggctgctagaaaatctctgctggctttagagaaggaagaagaagaagaaagaagtaaaactatagagagtttaaagacagcactgaggacaaaaccaatgaggtttgtaaccagattcatcgacttggatggcctatcatgtatcctcaactttctaaagaccatggactacgagacctcagagtctcgaatacatacttctctcattggctgtataaaggcgttaatgaacaactctcaaggccgggctcacgtcctggctcattctgagagtattaatgtaattgctcagagtctgagcacagagaacattaaaacgaaggtggccgtgctggaaatcttgggcgccgtgtgcctggttcccgggggccacaagaaggttctgcaggccatgctgcactaccagaagtatgccagcgaaaggacccgctttcagacattaattaacgacttggataaaagcactgggcggtatcgagatgaagtgagtctcaagactgccatcatgtccttcattaatgcagtgctcagccaaggtgcaggagtggagagtttggactttagacttcatcttcgctatgaatttctgatgttaggaattcaacctgtaatagataaattaagggaacacgaaaattcaacattagataggcatttagacttttttgaaatgctccgaaatgaagatgaactagaatttgccaaaagatttgaactggttcacatagacacaaaaagtgcaactcagatgtttgagctgaccaggaagaggctgacacatagtgaagcttacccgcatttcatgtccatcctgcaccactgcctccaaatgccttacaagaggagtggcaacactgttcagtactggctactactagatagaattatacagcagatagttatccagaatgacaaaggacaggaccctgactccacacctttggaaaactttaatattaagaatgtcgtacgaatgttggttaatgaaaatgaagttaagcagtggaaagaacaagcggaaaaaatgagaaaagagcacaatgagctacaacagaaactggaaaagaaagaacgagaatgtgatgctaagactcaagagaaggaagagatgatgcagaccttaaataaaatgaaagagaaacttgaaaaggagactactgagcataagcaagtcaagcagcaggtggcggacctcacagcacagctccatgagctcagcaggagggccgtctgtgcttcaatcccaggtggaccctcgcctggagcaccaggagggccctttccttcctctgtgcctggatctctccttcctcccccaccacccccacctctaccaggtgggatgcttccccctccaccgcctcccctccctccaggtggccctcctcctcccccagggcctcctcccttaggggcaatcatgccacctcctggtgctccaatgggcctagcactgaagaaggaaaagcattcctcagcccacaaatgccctgaaatccttcaactggtctaaactgcccgagaacaaactggaaggaacagtatggaccgaaattgatgatacaaaagtcttcaaaattctagatcttgaagacctggaaagaaccttctctgcctatcaaagacagcagaaagaagcagatgccattgatgacactctgagttccaaacttaaagttaaagagctttcggtgattgatggtcggagagctcagaattgcaacatccttctatcgaggttgaaattatccaatgacgaaatcaaacgggcaattctaacaatggacgaacaggaagatctgcccaaggacatgttggaacagctcttgaaatttgttcctgaaaaaagtgacattgacctattggaggaacataaacacgaactggatcggatggccaaggctgataggttcctttttgagatgagccgaattaatcactatcagcaaaggttgcaatcgctgtacttcaaaaagaagtttgcagagcgtgtggcagaagtgaaacctaaagtggaagcaattcgttctggctcagaagaggtgtttaggagtggtgccctcaagcagttgctggaggtggttttggcatttggaaattatatgaataaaggtcaaagagggaatgcatatggattcaagatatctagcctaaacaaaattgctgacacaaaatccagcatcgacaaaaacattacccttttgcactatctcatcactattgtggaaaataagtaccccagtgttctcaatctaaatgaagaattgcgagatattcctcaagctgcgaaagtaaacatgactgagctggacaaagaaataagtaccttgagaagtggcttgaaagcagtagagacagagctggaatatcagaagtctcagcccccacagcccggagataagtttgtgtctgttgtcagccagttcatcacagtagccagcttcagcttctctgatgttgaagaccttctagcagaagctaaagacctgtttactaaagcagtgaagcactttggggaagaggctggcaaaatacaaccagatgagttctttggcatttttgatcaatttcttcaagctgtgtcagaagccaaacaagaaaacgaaaatatgagaaagaaaaaggaggaagaagaacgtcgagctcgcatggaagctcagctcaaagaacaacgtgaaagggaacgtaaaatgagaaaagctaaagagaatagtgaagaaagcggagagtttgatgaccttgtttcagctttacgctcaggagaagtgtttgacaaagacctttctaaattgaaacggaatcgcaaacgtattaccaaccagatgagttctttggcatttttgatcaatttcttcaagctgtgtcagaagccaaacaagaaaacgaaaatatgagaaagaaaacg

SEQ ID NO: 320707 - DNA, 6109 bp, Homo sapiens
agtaacctacgagcggctgtgaaggaaactgtttaaccggatcccattgtacccagagtgcagagccgcctttccagcatgcaggggctgctcagcgtttagtcacatcaagaaatagaacagaattcagccatggccccaagaaagagaggtggacgaggtatttcattcatcttttgctgtttccgaaataatgatcacccagaaatcacgtatcggctgcgaaatgatagcaactttgcgcttcagaccatggaaccagcattgcccatgccccctgtggaggagctggatgtcatgttcagtgaactggtggatgaactggacctcacagacaaacacagagaagccatgtttgcacttccagctgagaaaaaatggcaaatatactgtagcaagaaaaaggaccaggaagaaaacaagggagctacaagttggcctgaattctacattgatcagctcaattccatggctgctagaaaatctctgctggctttagagaaggaagaagaagaagaaagaagtaaaactatagagagtttaaagacagcactgaggacaaaaccaatgaggtttgtaaccagattcatcgacttggatggcctatcatgtatcctcaactttctaaagaccatggactacgagacctcagagtctcgaatacatacttctctcattggctgtataaaggcgttaatgaacaactctcaaggccgggctcacgtcctggctcattctgagagtattaatgtaattgctcagagtctgagcacagagaacattaaaacgaaggtggccgtgctggaaatcttgggcgccgtgtgcctggttcccgggggccacaagaaggttctgcaggccatgctgcactaccagaagtatgccagcgaaaggacccgctttcagacattaattaacgacttggataaaagcactgggcggtatcgagatgaagtgagtctcaagactgccatcatgtccttcattaatgcagtgctcagccaaggtgcaggagtggagagtttggactttagacttcatcttcgctatgaatttctgatgttaggaattcaacctgtaatagataaattaagggaacacgaaaattcaacattagataggcatttagacttttttgaaatgctccgaaatgaagatgaactagaatttgccaaaagatttgaactggttcacatagacacaaaaagtgcaactcagatgtttgagctgaccaggaagaggctgacacatagtgaagcttacccgcatttcatgtccatcctgcaccactgcctccaaatgccttacaagaggagtggcaacactgttcagtactggctactactagatagaattatacagcagatagttatccagaatgacaaaggacaggaccctgactccacacctttggaaaactttaatattaagaatgtcgtacgaatgttggttaatgaaaatgaagttaagcagtggaaagaacaagcggaaaaaatgagaaaagagcacaatgagctacaacagaaactggaaaagaaagaacgagaatgtgatgctaagactcaagagaaggaagagatgatgcagaccttaaataaaatgaaagagaaacttgaaaaggagactactgagcataagcaagtcaagcagcaggtggcggacctcacagcacagctccatgagctcagcaggagggccgtctgtgcttcaatcccaggtggaccctcgcctggagcaccaggagggccctttccttcctctgtgcctggatctctccttcctcccccaccacccccacctctaccaggtgggatgcttccccctccaccgcctcccctccctccaggtggccctcctcctcccccagggcctcctcccttaggggcaatcatgccacctcctggtgctccaatgggcctagcactgaagaaggaaaagcattcctcagcccacaaatgccctgaaatccttcaactggtctaaactgcccgagaacaaactggaaggaacagtatggaccgaaattgatgatacaaaagtcttcaaaattctagatcttgaagacctggaaagaaccttctctgcctatcaaagacagcaggatttctttgtgaacagtaactccaagcagaaagaagcagatgccattgatgacactctgagttccaaacttaaagttaaagagctttcggtgattgatggtcggagagctcagaattgcaacatccttctatcgaggttgaaattatccaatgacgaaatcaaacgggcaattctaacaatggacgaacaggaagatctgcccaaggacatgttggaacagctcttgaaatttgttcctgaaaaaagtgacattgacctattggaggaacataaacacgaactggatcggatggccaaggctgataggttcctttttgagatgagccgaattaatcactatcagcaaaggttgcaatcgctgtacttcaaaaagaagtttgcagagcgtgtggcagaagtgaaacctaaagtggaagcaattcgttctggctcagaagaggtgtttaggagtggtgccctcaagcagttgctggaggtggttttggcatttggaaattatatgaataaaggtcaaagagggaatgcatatggattcaagatatctagcctaaacaaaattgctgacacaaaatccagcatcgacaaaaacattacccttttgcactatctcatcactattgtggaaaataagtaccccagtgttctcaatctaaatgaagaattgcgagatattcctcaagctgcgaaagtaaacatgactgagctggacaaagaaataagtaccttgagaagtggcttgaaagcagtagagacagagctggaatatcagaagtctcagcccccacagcccggagataagtttgtgtctgttgtcagccagttcatcacagtagccagcttcagcttctctgatgttgaagaccttctagcagaagctaaagacctgtttactaaagcagtgaagcactttggggaagaggctggcaaaatacaaccagatgagttctttggcatttttgatcaatttcttcaagctgtgtcagaagccaaacaagaaaacgaaaatatgagaaagaaaaaggaggaagaagaacgtcgagctcgcatggaagctcagctcaaagaacaacgtgaaagggaacgtaaaatgagaaaagctaaagagaatagtgaagaaagcggagagtttgatgaccttgtttcagctttacgctcaggagaagtgtttgacaaagacctttctaaattgaaacggaatcgcaaacgtattaccaaccagatgactgacagcagcagagagagaccaatcacaaaacttaatttctaattttccatgaatacttttttttagaaagctcattagcagccctctaaagtgactagaacgtttcattacactgccttgcaatccaaacagtggcaattttttccttcatctgtgagtgaatgtgtgaacgtgtgtatgtaaatgtatgtgtgtatatattaaaaaatgtatatagatgtctgagtgttgtctggagacctatacgtatggttaaaaagatttatgttaatgtatgtgctccaaaacctttcgtgtatgcattcacattgagtgtggctcattttctttccccgaacgccatgactgttcagaagcacaatactatctcctgaaagagataagagacattccctagattcaaaggcaaaacagaagaaacaaacaaacaaacaaacaaagcttgcaaaatattttatggtttccaagcttgatatcctttaaaattattttcattgatggaactggagttgttggaaaaacatagatttaaaatgatttttgatagctgacattgtgatgttgatgtatcacatcagtaataggaccagctttgaatttctgacattggtgtggggatacagtctgtaaatgtttattgagaacatcttgcacacaatttgaattatgtagaatgtcaatcaagtttttgtatatttaaaagttggacatcaattttttcccctgatttcatcaagttatctctgccaagtgctcttgataatttcttcagatttttggaaaaaaacactatataaatgcaatccatgctttttttaaagaacaacattgccagagtatgcttgttctaacaatatagatatataaaccttaaaaataataaaatatctcacccaagacttaaaggaagaattctctgaagggataaagattactaaaaaaaaaaaaaaaaaaaaaaaaattaatggggtgcctttttgttatagtttctattttctgttttgtaggacaagctgcattttctgtaaatataggtctggactaaaggatacataaagaatgcacaaaatgtcaacatcagcagagatgcccagatctatttatctctaagtatatttgaagtgattgctgtttatatgttgtcattttaaaattgtgtgtcagtaaagctacctgtaaaatttcagtccaaaaaaataaagctctcagggagacatgaataaaatcaatgaacattagaaaataaaatatagatgcttaccattaacctaccaactcttaatatccttaaattatgtgatatataaagaggactgttacttttttacttttttttttttttttttttttttttggctttgctttatttatttgtagttgggggctaacgttttctcttttctttctattgatcctgttgtggttgggtttcctgtggagagagtagtttgtcctgttgcactagaacattatttactcactaaattgagtttttcagtcaattaacaaatatttattaagttcctactatgtaccaggcatagtagggctacaatggtaagcaagacagagtccctgcccccaaagagcttatattctaatggggatattaagggatgaatagaataccaatgtgtgcactgtacaggaatcatactatttaaaaataatttgtataaactataatgcttagcacagatggcgagttatctgtgctatgtgaaagctgtgaaatagtgctctaagagttgtcaagagctgtggttttacatcttttcctcattgcaaatttagtgactttctacacactatatggaaataaatgactagcaaataaaacagtcataaatacaaagcagaggttgcactcccccaatcccgagttaacccaggtctgcaataacaccatgttaaaggtgcagatagagacttggctcaaaaaggcttggagatgaggaagattggaatataatgatggttttgtctgttccttaactaaagtgcctctatgtatattcttttctatttgtagcaggataaatttggtctggctcagttttggaactgtattttgaaaatggctttgtcttacagtttaaggaatagacaggtggagggaaagtcacataaaggagcaagtttgtgtagctgtccctcttgccccttttaatcatcctcctttgatatggccatcctggtgggcctcctttgccatttccatttttggtttctttccctgaaaactgtgtgcaggtaattccatgtgccattgttgaaaagaaaaaaaaaaaacaaaaaaaaacctactttttagattggtgctggtgtaagtagccacttttctctcttgggtgtgtattttaaactttttttgtttttttaaattaatgccaaaaagaaaatgcataatttgtaaacttaattatatgtcttatatcttattagcttagtagttggaaccacttagtctttaggtgcaagactgttgttagatagtactgagaaaaaaaaagtatgtgttatgagactgtacatgtttttttaaaaatagcaatatgcaataaagagatgaattcattgggtgtacatatatgctttctatgaattattaaaacagtgtcatcaaactgctttgcagtttccaccattgaatttcaattttgcaaattgttcactgaatcggaaatatatacctgtttttaaacttgtacttactggacctagaagaatatagttttctattatggcagcattcagtatgttcaggttatcatatgccac

SEQ ID NO: 320708 - DNA, 6007 bp, Homo sapiens
agtaacctacgagcggctgtgaaggaaactgtttaaccggatcccattgtacccagagtgcagagccgcctttccagcatgcaggggctgctcagcgtttagtcacatcaagaaatagaacagaattcagccatggccccaagaaagagaggtggacgaggtatttcattcatcttttgctgtttccgaaataatgatcacccagaaatcacgtatcggctgcgaaatgatagcaactttgcgcttcagaccatggaaccagcattgcccatgccccctgtggaggagctggatgtcatgttcagtgaactggtggatgaactggacctcacagacaaacacagagaagccatgtttgcacttccagctgagaaaaaatggcaaatatactgtagcaagaaaaagagaaaatctctgctggctttagagaaggaagaagaagaagaaagaagtaaaactatagagagtttaaagacagcactgaggacaaaaccaatgaggtttgtaaccagattcatcgacttggatggcctatcatgtatcctcaactttctaaagaccatggactacgagacctcagagtctcgaatacatacttctctcattggctgtataaaggcgttaatgaacaactctcaaggccgggctcacgtcctggctcattctgagagtattaatgtaattgctcagagtctgagcacagagaacattaaaacgaaggtggccgtgctggaaatcttgggcgccgtgtgcctggttcccgggggccacaagaaggttctgcaggccatgctgcactaccagaagtatgccagcgaaaggacccgctttcagacattaattaacgacttggataaaagcactgggcggtatcgagatgaagtgagtctcaagactgccatcatgtccttcattaatgcagtgctcagccaaggtgcaggagtggagagtttggactttagacttcatcttcgctatgaatttctgatgttaggaattcaacctgtaatagataaattaagggaacacgaaaattcaacattagataggcatttagacttttttgaaatgctccgaaatgaagatgaactagaatttgccaaaagatttgaactggttcacatagacacaaaaagtgcaactcagatgtttgagctgaccaggaagaggctgacacatagtgaagcttacccgcatttcatgtccatcctgcaccactgcctccaaatgccttacaagaggagtggcaacactgttcagtactggctactactagatagaattatacagcagatagttatccagaatgacaaaggacaggaccctgactccacacctttggaaaactttaatattaagaatgtcgtacgaatgttggttaatgaaaatgaagttaagcagtggaaagaacaagcggaaaaaatgagaaaagagcacaatgagctacaacagaaactggaaaagaaagaacgagaatgtgatgctaagactcaagagaaggaagagatgatgcagaccttaaataaaatgaaagagaaacttgaaaaggagactactgagcataagcaagtcaagcagcaggtggcggacctcacagcacagctccatgagctcagcaggagggccgtctgtgcttcaatcccaggtggaccctcgcctggagcaccaggagggccctttccttcctctgtgcctggatctctccttcctcccccaccacccccacctctaccaggtgggatgcttccccctccaccgcctcccctccctccaggtggccctcctcctcccccagggcctcctcccttaggggcaatcatgccacctcctggtgctccaatgggcctagcactgaagaaggaaaagcattcctcagcccacaaatgccctgaaatccttcaactggtctaaactgcccgagaacaaactggaaggaacagtatggaccgaaattgatgatacaaaagtcttcaaaattctagatcttgaagacctggaaagaaccttctctgcctatcaaagacagcagaaagaagcagatgccattgatgacactctgagttccaaacttaaagttaaagagctttcggtgattgatggtcggagagctcagaattgcaacatccttctatcgaggttgaaattatccaatgacgaaatcaaacgggcaattctaacaatggacgaacaggaagatctgcccaaggacatgttggaacagctcttgaaatttgttcctgaaaaaagtgacattgacctattggaggaacataaacacgaactggatcggatggccaaggctgataggttcctttttgagatgagccgaattaatcactatcagcaaaggttgcaatcgctgtacttcaaaaagaagtttgcagagcgtgtggcagaagtgaaacctaaagtggaagcaattcgttctggctcagaagaggtgtttaggagtggtgccctcaagcagttgctggaggtggttttggcatttggaaattatatgaataaaggtcaaagagggaatgcatatggattcaagatatctagcctaaacaaaattgctgacacaaaatccagcatcgacaaaaacattacccttttgcactatctcatcactattgtggaaaataagtaccccagtgttctcaatctaaatgaagaattgcgagatattcctcaagctgcgaaagtaaacatgactgagctggacaaagaaataagtaccttgagaagtggcttgaaagcagtagagacagagctggaatatcagaagtctcagcccccacagcccggagataagtttgtgtctgttgtcagccagttcatcacagtagccagcttcagcttctctgatgttgaagaccttctagcagaagctaaagacctgtttactaaagcagtgaagcactttggggaagaggctggcaaaatacaaccagatgagttctttggcatttttgatcaatttcttcaagctgtgtcagaagccaaacaagaaaacgaaaatatgagaaagaaaaaggaggaagaagaacgtcgagctcgcatggaagctcagctcaaagaacaacgtgaaagggaacgtaaaatgagaaaagctaaagagaatagtgaagaaagcggagagtttgatgaccttgtttcagctttacgctcaggagaagtgtttgacaaagacctttctaaattgaaacggaatcgcaaacgtattaccaaccagatgactgacagcagcagagagagaccaatcacaaaacttaatttctaattttccatgaatacttttttttagaaagctcattagcagccctctaaagtgactagaacgtttcattacactgccttgcaatccaaacagtggcaattttttccttcatctgtgagtgaatgtgtgaacgtgtgtatgtaaatgtatgtgtgtatatattaaaaaatgtatatagatgtctgagtgttgtctggagacctatacgtatggttaaaaagatttatgttaatgtatgtgctccaaaacctttcgtgtatgcattcacattgagtgtggctcattttctttccccgaacgccatgactgttcagaagcacaatactatctcctgaaagagataagagacattccctagattcaaaggcaaaacagaagaaacaaacaaacaaacaaacaaagcttgcaaaatattttatggtttccaagcttgatatcctttaaaattattttcattgatggaactggagttgttggaaaaacatagatttaaaatgatttttgatagctgacattgtgatgttgatgtatcacatcagtaataggaccagctttgaatttctgacattggtgtggggatacagtctgtaaatgtttattgagaacatcttgcacacaatttgaattatgtagaatgtcaatcaagtttttgtatatttaaaagttggacatcaattttttcccctgatttcatcaagttatctctgccaagtgctcttgataatttcttcagatttttggaaaaaaacactatataaatgcaatccatgctttttttaaagaacaacattgccagagtatgcttgttctaacaatatagatatataaaccttaaaaataataaaatatctcacccaagacttaaaggaagaattctctgaagggataaagattactaaaaaaaaaaaaaaaaaaaaaaaaattaatggggtgcctttttgttatagtttctattttctgttttgtaggacaagctgcattttctgtaaatataggtctggactaaaggatacataaagaatgcacaaaatgtcaacatcagcagagatgcccagatctatttatctctaagtatatttgaagtgattgctgtttatatgttgtcattttaaaattgtgtgtcagtaaagctacctgtaaaatttcagtccaaaaaaataaagctctcagggagacatgaataaaatcaatgaacattagaaaataaaatatagatgcttaccattaacctaccaactcttaatatccttaaattatgtgatatataaagaggactgttacttttttacttttttttttttttttttttttttttggctttgctttatttatttgtagttgggggctaacgttttctcttttctttctattgatcctgttgtggttgggtttcctgtggagagagtagtttgtcctgttgcactagaacattatttactcactaaattgagtttttcagtcaattaacaaatatttattaagttcctactatgtaccaggcatagtagggctacaatggtaagcaagacagagtccctgcccccaaagagcttatattctaatggggatattaagggatgaatagaataccaatgtgtgcactgtacaggaatcatactatttaaaaataatttgtataaactataatgcttagcacagatggcgagttatctgtgctatgtgaaagctgtgaaatagtgctctaagagttgtcaagagctgtggttttacatcttttcctcattgcaaatttagtgactttctacacactatatggaaataaatgactagcaaataaaacagtcataaatacaaagcagaggttgcactcccccaatcccgagttaacccaggtctgcaataacaccatgttaaaggtgcagatagagacttggctcaaaaaggcttggagatgaggaagattggaatataatgatggttttgtctgttccttaactaaagtgcctctatgtatattcttttctatttgtagcaggataaatttggtctggctcagttttggaactgtattttgaaaatggctttgtcttacagtttaaggaatagacaggtggagggaaagtcacataaaggagcaagtttgtgtagctgtccctcttgccccttttaatcatcctcctttgatatggccatcctggtgggcctcctttgccatttccatttttggtttctttccctgaaaactgtgtgcaggtaattccatgtgccattgttgaaaagaaaaaaaaaaaacaaaaaaaaacctactttttagattggtgctggtgtaagtagccacttttctctcttgggtgtgtattttaaactttttttgtttttttaaattaatgccaaaaagaaaatgcataatttgtaaacttaattatatgtcttatatcttattagcttagtagttggaaccacttagtctttaggtgcaagactgttgttagatagtactgagaaaaaaaaagtatgtgttatgagactgtacatgtttttttaaaaatagcaatatgcaataaagagatgaattcattgggtgtacatatatgctttctatgaattattaaaacagtgtcatcaaactgctttgcagtttccaccattgaatttcaattttgcaaattgttcactgaatcggaaatatatacctgtttttaaacttgtacttactggacctagaagaatatagttttctattatggcagcattcagtatgttcaggttatcatatgccac

SEQ ID NO: 320709 - DNA, 3473 bp, Homo sapiens
aaaatactgttgtctttctttgagatctgagcatggaagggaattttaaacatttaaattaaaataggatggacttccaagcgtgaaatatttaaacccatcttatatttaatatgtgtaagtcacatgttgattgctaaaacattgctatttacaacagcatgactgagctggacaaagaaataagtaccttgagaagtggcttgaaagcagtagagacagagctggaatatcagaagtctcagcccccacagcccggagataagtttgtgtctgttgtcagccagttcatcacagtagccagcttcagcttctctgatgttgaagaccttctagcagaagctaaagacctgtttactaaagcagtgaagcactttggggaagaggctggcaaaatacaaccagatgagttctttggcatttttgatcaatttcttcaagctgtgtcagaagccaaacaagaaaacgaaaatatgagaaagaaaaaggaggaagaagaacgtcgagctcgcatggaagctcagctcaaagaacaacgtgaaagggaacgtaaaatgagaaaagctaaagagaatagtgaagaaagcggagagtttgatgaccttgtttcagctttacgctcaggagaagtgtttgacaaagacctttctaaattgaaacggaatcgcaaacgtattaccaaccagatgactgacagcagcagagagagaccaatcacaaaacttaatttctaattttccatgaatacttttttttagaaagctcattagcagccctctaaagtgactagaacgtttcattacactgccttgcaatccaaacagtggcaattttttccttcatctgtgagtgaatgtgtgaacgtgtgtatgtaaatgtatgtgtgtatatattaaaaaatgtatatagatgtctgagtgttgtctggagacctatacgtatggttaaaaagatttatgttaatgtatgtgctccaaaacctttcgtgtatgcattcacattgagtgtggctcattttctttccccgaacgccatgactgttcagaagcacaatactatctcctgaaagagataagagacattccctagattcaaaggcaaaacagaagaaacaaacaaacaaacaaacaaagcttgcaaaatattttatggtttccaagcttgatatcctttaaaattattttcattgatggaactggagttgttggaaaaacatagatttaaaatgatttttgatagctgacattgtgatgttgatgtatcacatcagtaataggaccagctttgaatttctgacattggtgtggggatacagtctgtaaatgtttattgagaacatcttgcacacaatttgaattatgtagaatgtcaatcaagtttttgtatatttaaaagttggacatcaattttttcccctgatttcatcaagttatctctgccaagtgctcttgataatttcttcagatttttggaaaaaaacactatataaatgcaatccatgctttttttaaagaacaacattgccagagtatgcttgttctaacaatatagatatataaaccttaaaaataataaaatatctcacccaagacttaaaggaagaattctctgaagggataaagattactaaaaaaaaaaaaaaaaaaaaaaaaattaatggggtgcctttttgttatagtttctattttctgttttgtaggacaagctgcattttctgtaaatataggtctggactaaaggatacataaagaatgcacaaaatgtcaacatcagcagagatgcccagatctatttatctctaagtatatttgaagtgattgctgtttatatgttgtcattttaaaattgtgtgtcagtaaagctacctgtaaaatttcagtccaaaaaaataaagctctcagggagacatgaataaaatcaatgaacattagaaaataaaatatagatgcttaccattaacctaccaactcttaatatccttaaattatgtgatatataaagaggactgttacttttttacttttttttttttttttttttttttttggctttgctttatttatttgtagttgggggctaacgttttctcttttctttctattgatcctgttgtggttgggtttcctgtggagagagtagtttgtcctgttgcactagaacattatttactcactaaattgagtttttcagtcaattaacaaatatttattaagttcctactatgtaccaggcatagtagggctacaatggtaagcaagacagagtccctgcccccaaagagcttatattctaatggggatattaagggatgaatagaataccaatgtgtgcactgtacaggaatcatactatttaaaaataatttgtataaactataatgcttagcacagatggcgagttatctgtgctatgtgaaagctgtgaaatagtgctctaagagttgtcaagagctgtggttttacatcttttcctcattgcaaatttagtgactttctacacactatatggaaataaatgactagcaaataaaacagtcataaatacaaagcagaggttgcactcccccaatcccgagttaacccaggtctgcaataacaccatgttaaaggtgcagatagagacttggctcaaaaaggcttggagatgaggaagattggaatataatgatggttttgtctgttccttaactaaagtgcctctatgtatattcttttctatttgtagcaggataaatttggtctggctcagttttggaactgtattttgaaaatggctttgtcttacagtttaaggaatagacaggtggagggaaagtcacataaaggagcaagtttgtgtagctgtccctcttgccccttttaatcatcctcctttgatatggccatcctggtgggcctcctttgccatttccatttttggtttctttccctgaaaactgtgtgcaggtaattccatgtgccattgttgaaaagaaaaaaaaaaaacaaaaaaaaacctactttttagattggtgctggtgtaagtagccacttttctctcttgggtgtgtattttaaactttttttgtttttttaaattaatgccaaaaagaaaatgcataatttgtaaacttaattatatgtcttatatcttattagcttagtagttggaaccacttagtctttaggtgcaagactgttgttagatagtactgagaaaaaaaaagtatgtgttatgagactgtacatgtttttttaaaaatagcaatatgcaataaagagatgaattcattgggtgtacatatatgctttctatgaattattaaaacagtgtcatcaaactgctttgcagtttccaccattgaatttcaattttgcaaattgttcactgaatcggaaatatatacctgtttttaaacttgtacttactggacctagaagaatatagttttctattatggcagcattcagtatgttcaggttatcatatgccac

SEQ ID NO: 320710 - DNA, 1368 bp, Homo sapiens
cgcactcattcattaagtggcactgctcagtggtgcgggggtgggcgtgcttccgtgggctgggcgctgggttcgcggcgcgccctcctgctgcctccccggagctcccgggccagtagcgtttagtcacatcaagaaatagaacagaattcagccatggccccaagaaagagaggtggacgaggtatttcattcatcttttgctgtttccgaaataatgatcacccagaaatcacgtatcggctgcgaaatgatagcaactttgcgcttcagaccatggaaccagcattgcccatgccccctgtggaggagctggatgtcatgttcagtgaactggtggatgaactggacctcacagacaaacacagagaagccatgtttgcacttccagctgagaaaaaatggcaaatatactgtagcaagaaaaaggaccaggaagaaaacaagggagctacaagttggcctgaattctacattgatcagctcaattccatggctgctagaaaatctctgctggctttagagaaggaagaagaagaagaaagaagtaaaactatagagagtttaaagacagcactgaggacaaaaccaatgaggtttgtaaccagattcatcgacttggatggcctatcatgtatcctcaactttctaaagaccatggactacgagacctcagagtctcgaatacatacttctctcattggctgtataaaggcgttaatgaacaactctcaaggccgggctcacgtcctggctcattctgagagtattaatgtaattgctcagagtctgagcacagagaacattaaaacgaaggtggccgtgctggaaatcttgggcgccgtgtgcctggttcccgggggccacaagaaggttctgcaggccatgctgcactaccagaagtatgccagcgaaaggacccgctttcagacattaattaacgacttggataaaagcactgggcggtatcgagatgaagtgagtctcaagactgccatcatgtccttcattaatgcagtgctcagccaaggtgcaggagtggagagtttggactttagacttcatcttcgctatgaatttctgatgttaggaattcaacctgtaatagataaattaagggaacacgaaaattcaacattagataggcatttagacttttttgaaatgctccgaaatgaagatgaactagaatttgccaaaagatttgaactggttcacatagacacaaaaagtgcaactcagatgtttgagctgaccaggaagaggctgacacatagtgaagcttacccgcatttcatgtccatcctgcaccactgcctccaaatgccttgtaagtgtgttcgtgactcacatgtgtgcttctgaatg

SEQ ID NO: 320711 - DNA, 279 bp, Homo sapiens
gtgcatccgctgtgctcagaaaaaggtgtctgaggcttattttcaaatagaaggaacaagaaaatgaaaggtaaagtcagaagggataagggaagacattacagaatttatcatcaagcaggaggttttttccaggttctaagatgaggttaagtttcttaacaaaagaatcaacaactgtcctttttttgttgggggagggtctcgacagaaaaaatgaatataccctcataagctgaaaatttgttttctgtattgttatttaactagataggcagc

SEQ ID NO: 320712 - DNA, 1515 bp, Homo sapiens
ccggcccacgccagctcccggccgcggcacagcagccccggcgctccccgcgccgccccgcgcaggcgcccccgccccgccgtcgccgccgccgcagccaggagccgctgcaccatgccccgcatagatgcggacctcaagctcgacttcaaggatgtcctgctccgacctaagcggagcagcctcaagagccgagccgaggtggatcttgaacgcaccttcacgtttcgaaattcaaagcagacctactcagggattcccatcatcgtggccaacatggacactgtgggcacgtttgagatggcagccgtgatgtcacagcactccatgtttacagcaattcataagcattactccctggatgactggaagctctttgccacaaatcacccagaatgcctgcagaatgtagccgtgagttcaggcagtgggcagaatgatctggaaaagatgaccagcatcctggaagctgtgccacaggttaagtttatttgcctggatgtggccaatgggtattcagaacattttgtggaattcgtgaaacttgtccgtgccaaatttcctgaacacaccattatggcagggaacgtggtgacaggagaaatggtagaagagcttattctttccggagcagatatcatcaaagtgggagttggaccaggttctgtgtgcaccacccgcaccaagacgggagtggggtacccccagctgagtgccgtcattgagtgtgccgactctgcccatggcctgaagggccacatcatctctgatggaggctgtacgtgtccaggggatgtcgccaaagcctttggagctggagcagattttgtcatgctgggaggaatgttttcgggtcatacggagtgtgctggagaagtgattgagaggaacggacggaagctcaagctcttctacgggatgagctctgacaccgccatgaacaagcacgcaggaggagttgctgagtacagagcctctgagggtaagactgtggaagttccttacaaaggagatgtggaaaacactatcctggatattctcgggggactgaggtccacgtgcacctacgtgggggccgccaaactcaaggagctcagcaggagggcaacattcatccgggtgacccagcagcacaacaccgtgttcagctaaccctggggacaaagcagcgtctggctcgagtggaagcgtccaaacctgcttttcccatctccccccaagtctgttccgtcagagcttctggctgctcctgaatggtggaatgctgtgtcctctcttctgtctcctgctgcctggaggcttcggggctctcccgcctgccttgtcggggcccagacgcaaggcaccgattgggccaacatcagagccctgctgcccagaactcataacctcattgttcaaaccaacacttgcacctttctctttttctctttctctctccctttctttgtttttctttcttttttaaaagaagatggtttcactttaatataatgctattatcttaagacttaa

SEQ ID NO: 320713 - DNA, 489 bp, Homo sapiens
  misc_feature (379)..(379): n is a, c, g, or t
ctcacccggcccggacacggacaggattgacagattgatagctctttgccacaaatcacccagaatgcctgcagaatgtagccgtgagttcaggcagtgggcagaatgatctggaaaagatgaccagcatcctggaagctgtgccacaggttaagtttatttgcctggatgtggccaatgggtattcagaacattttgtggaattcgtgaaacttgtccgtgccaaatttcctgaacacaccattatggcagggaacgtggtgacaggagaaatggtagaagagcttattctgcctagcaaactcaaactacgaacgcactcacagtcgcatcataatcctctctcaaggacttcaaactctactcccactaatagctntttgatgacttctagcaagcctcgctaacctcgccttaccccccactattaacctactgggagaactctctgtgctagtccacgttctcctgatctatcactctcctctt

SEQ ID NO: 320714 - DNA, 1377 bp, Homo sapiens
ccggcccacgccagctcccggccgcggcacagcagccccggcgctccccgcgccgccccgcgcaggcgcccccgccccgccgtcgccgccgccgcagccaggagccgctgcaccatgccccgcatagatgcggacctcaagctcgacttcaaggatgtcctgctccgacctaagcggagcagcctcaagagccgagccgaggtggatcttgaacgcaccttcacgtttcgaaattcaaagcagacctactcagggattcccatcatcgtggccaacatggacactgtgggcacgtttgagatggcagccgtgatgtcacagcactccatgtttacagcaattcataagcattactccctggatgactggaagctctttgccacaaatcacccagaatgcctgcagaatgtagccgtgagttcaggcagtgggcagaatgatctggaaaagatgaccagcatcctggaagctgtgccacaggttaagtttatttgcctggatgtggccaatgggtattcagaacattttgtggaattcgtgaaacttgtccgtgccaaatttcctgaacacaccattatggcagggaacgtggtgacaggagaaatggtagaagagcttattctttccggagcagatatcatcaaagtgggagttggaccaggttctgtgtgcaccacccgcaccaagacgggagtggggtacccccagctgagtgccgtcattgagtgtgccgactctgcccatggcctgaagggccacatcatctctgatggaggctgtacgtgtccaggggatgtcgccaaagcctttggagctggagcagattttgtcatgctgggaggaatgttttcgggtcatacggagtgtgctggagatgtggaaaacactatcctggatattctcgggggactgaggtccacgtgcacctacgtgggggccgccaaactcaaggagctcagcaggagggcaacattcatccgggtgacccagcagcacaacaccgtgttcagctaaccctggggacaaagcagcgtctggctcgagtggaagcgtccaaacctgcttttcccatctccccccaagtctgttccgtcagagcttctggctgctcctgaatggtggaatgctgtgtcctctcttctgtctcctgctgcctggaggcttcggggctctcccgcctgccttgtcggggcccagacgcaaggcaccgattgggccaacatcagagccctgctgcccagaactcataacctcattgttcaaaccaacacttgcacctttctctttttctctttctctctccctttctttgtttttctttcttttttaaaagaagatggtttcactttaatataatgctattatcttaagacttaa

SEQ ID NO: 320715 - DNA, 1202 bp, Homo sapiens
ccggcccacgccagctcccggccgcggcacagcagccccggcgctccccgcgccgccccgcgcaggcgcccccgccccgccgtcgccgccgccgcagccaggagccgctgcaccatgccccgcatagatgcggacctcaagctcgacttcaaggatgtcctgctccgacctaagcggagcagcctcaagagccgagccgaggtggatcttgaacgcaccttcacgtttcgaaattcaaagcagacctactcagggattcccatcatcgtggccaacatggacactgtgggcacgtttgagatggcagccgtgatgtcacagcactccatgtttacagcaattcataagcattactccctggatgactggaagctctttgccacaaatcacccagaatgcctgcagaatgtagccgtgagttcaggcagtgggcagaatgatctggaaaagatgaccagcatcctggaagctgtgccacaggttaagtttatttgcctggatgtggccaatgggtattcagaacattttgtggaattcgtgaaacttgtccgtgccaaatttcctgaacacaccattatggcagggaacgtggtgacaggagaaatggtagaagagcttattctttccggagcagatatcatcaaagtgggagttggaccaggttctgtgtgcaccacccgcaccaagacgggagtggggtacccccagctgagtgccgtcattgagtgtgccgactctgcccatggcctgaagggccacatcatctctgatggaggctgtacgtgtccaggggatgtcgccaaagcctttggagctggagcagattttgtcatgctgggaggaatgttttcgggtcatacggagtgtgctggagaagtgattgagaggaacggacggaagctcaagctcttctacgggatgagctctgacaccgccatgaatggtggaatgctgtgtcctctcttctgtctcctgctgcctggaggcttcggggctctcccgcctgccttgtcggggcccagacgcaaggcaccgattgggccaacatcagagccctgctgcccagaactcataacctcattgttcaaaccaacacttgcacctttctctttttctctttctctctccctttctttgtttttctttcttttttaaaagaagatggtttcactttaatataatgctattatcttaagacttaa

SEQ ID NO: 320716 - DNA, 261 bp, Homo sapiens
aaagaagatggtttcactttaatataatgctattatcttaagacttaatggagttgctggagtttgtatttccaggagtcaagttgaatggtttgggatttgttttgctaccttcctagacaggctgatggcaagcctctcccggcgattagcagacaagtcaccttaggaggggcaaggagaggaggacagtgcgggggccaagggtggacaggccggagtcaaagtaactggcatccctcacctctagcttttggttgc

SEQ ID NO: 320717 - DNA, 793 bp, Homo sapiens
tagagacagagtttcaccatgttggccaggcttgtctcgaactcctgacctcaggtaatccacctgcctcggcctctcaaagtgctgggattacaggcatgagccaccacacttggctaatttttgtattcttagtagagatggggtttcaccatgttggccaggctggtctcaaactcctgacctcaggtgatctgcccgccttggcttcccaaagtgctaggattacagcatgagccaccgtgcctggccaaagtttagataatttaatgaatgaatcccctttacctctgctgttgcatgtgtcttgagcaggtgcactgtgcatttgattagggtagaccgaaaagggttgttgtactgtcccagaataggtgcataaatgggggcagggtctgatgtctgaatgctactgtttatgcctgtcttcttggtttattttggtgcagaatgtagccgtgagttcaggcagtgggcagaatgatctggaaaagatgaccagcatcctggaagctgtgccacaggttaagtttatttgcctggatgtggccaatgggtattcagaacattttgtggaattcgtgaaacttgtccgtgccaaatttcctgaacacaccattatggtaagtacggtagaacattacggtagaacattctcaagatggggaagccacgagggagttgttcaatgtgtcgggggagctgtatcctcttcagagcttttggtgcctctttagtcaaagattaattgaggatcatttgggaaaggataggtagccgctgcggaagatct

SEQ ID NO: 320718 - DNA, 950 bp, Homo sapiens
ccggcccacgccagctcccggccgcggcacagcagccccggcgctccccgcgccgccccgcgcaggcgcccccgccccgccgtcgccgccgccgcagccaggagccgctgcaccatgccccgcatagatgcggacctcaagctcgacttcaaggatgtcctgctccgacctaagcggagcagcctcaagagccgagccgaggtggatcttgaacgcaccttcacgtttcgaaattcaaagcagacctactcagggattcccatcatcgtggccaacatggacactgtgggcacgtttgagatggcagccgtgatgtcacagcactccatgtttacagcaattcataagcattactccctggatgactggaagctctttgccacaaatcacccagaatgcctgcagaatgtagccgtgagttcaggcagtgggcagaatgatctggaaaagatgaccagcatcctggaagctgtgccacaggttaagtttatttgcctggatgtggccaatgggtattcagaacattttgtggaattcgtgaaacttgtccgtgccaaatttcctgaacacaccattatggaagaaaggatcaagaattgttccagctgggcgcagtggctcacgactgtaatcccagcactttgggaggccgaggcaggtggatcacctgaggtcaggaatttgagaccagcctggccaacatggcgaaaccgtgtctctactaaaaatacaaaaattagccagccgtgatggcgggtgcctgtaatcccagctacttaggaggctgaggcaggagaatctcttgaacccaggaggtgaagcttgcagtgagccgagatcacaccactgcactccagcctgggcaacagagggagactccgtctcaaaaaaaaaaaaagaattggccgggtgcagtggctaatgcctgtaatcccagcactttgggaggc

SEQ ID NO: 320719 - DNA, 1784 bp, Homo sapiens
ccggcccacgccagctcccggccgcggcacagcagccccggcgctccccgcgccgccccgcgcaggcgcccccgccccgccgtcgccgccgccgcagccaggagccgctgcaccatgccccgcatagatgcggacctcaagctcgacttcaaggatgtcctgctccgacctaagcggagcagcctcaagagccgagccgaggtggatcttgaacgcaccttcacgtttcgaaattcaaagcagacctactcagggattcccatcatcgtggccaacatggacactgtgggcacgtttgagatggcagccgtgatgtcacagcactccatgtttacagcaattcataagcattactccctggatgactggaagctctttgccacaaatcacccagaatgcctgcagaatgtagccgtgagttcaggcagtgggcagaatgatctggaaaagatgaccagcatcctggaagctgtgccacaggttaagtttatttgcctggatgtggccaatgggtattcagaacattttgtggaattcgtgaaacttgtccgtgccaaatttcctgaacacaccattatggcagggaacgtggtgacaggagaaatggtagaagagcttattctttccggagcagatatcatcaaagtgggagttggaccaggttctgtgtgcaccacccgcaccaagacgggagtggggtacccccagctgagtgccgtcattgagtgtgccgactctgcccatggcctgaagggccacatcatctctgatggaggctgtacgtgtccaggggatgtcgccaaagcctttggagctggagcagattttgtcatgctgggaggaatgttttcgggtcatacggagtgtgctggagaagtgattgagaggaacggacggaagctcaagctcttctacgggatgagctctgacaccgccatgaacaagcacgcaggaggagttgctgagtacagagcctctgagggtaagactgtggaagttccttacaaaggagatgtggaaaacactatcctggatattctcgggggactgaggtccacgtgcacctacgtgggggccgccaaactcaaggagctcagcaggagggcaacattcatccgggtgacccagcagcacaacaccgtgttcagctaaccctggggacaaagcagcgtctggctcgagtggaagcgtccaaacctgcttttcccatctccccccaagtctgttccgtcagagcttctggctgctcctgaatggtggaatgctgtgtcctctcttctgtctcctgctgcctggaggcttcggggctctcccgcctgccttgtcggggcccagacgcaaggcaccgattgggccaacatcagagccctgctgcccagaactcataacctcattgttcaaaccaacacttgcacctttctctttttctctttctctctccctttctttgtttttctttcttttttaaaagaagatggtttcactttaatataatgctattatcttaagacttaaaaaaaaaaaaaaaaaaaaaaaaaaaaccggggggcattaatttgtcgcggggcggcggaaaaaaaagaggtgttcattgaaaaggggcgacacaggtggttcataggagtgggtttcccgaggcacccgcgtttctttgtacacagggggtaaaaattcggcgggacccccaatatgggggagcgagataaaattccgataaagcccgtggttaagccgcgctataagatctgtgggcaaacaggaacgacagcagcaggtgacgagaa

SEQ ID NO: 320720 - DNA, 1091 bp, Homo sapiens
ggctggcatgggatgagggctgagcccctctgccgctcacagcccctgctgcctcctgctctgcaacagaagtgtctgagcccaggcaggcaggtgggcagtgggtggtgccagcttctgacccacagaggaagcctggatgggcctggggagtgaaaggtgcaatattgaggggagtacactcgatcagacaacaacagccgtggtaggggaacttgggcccgtgggcttgctgggggctgtggtgggtctgaacccccagtcactaggtcatctggggggaggggacagcctggctgagctcccgctgatgatgtcctgtccttgctttttcctctgtgaaggatggaggctgtacgtgtccaggggatgtcgccaaagcctttggagctggagcagattttgtcatgctgggaggaatgttttcgggtcatacggagtgtgctggagaagtgattgagaggaacggacggaagctcaagctcttctacgggatgagctctgacaccgccatgaacaagcacgcaggaggagttgctgagtacagagcctctgagggtaagactgtggaagttccttacaaaggagatgtggaaaacactatcctggatattctcgggggactgaggtccacgtgcacctacgtgggggccgccaaactcaaggagctcagcaggagggcaacattcatccgggtgacccagcagcacaacaccgtgttcagctaaccctggggacaaagcagcgtctggctcgagtggaagcgtccaaacctgcttttcccatctccccccaagtctgttccgtcagagcttctggctgctcctgaatggtggaatgctgtgtcctctcttctgtctcctgctgcctggaggcttcggggctctcccgcctgccttgtcggggcccagacgcaaggcaccgattgggccaacatcagagccctgctgcccagaactcataacctcattgttcaaaccaacacttgcacctttctctttttctctttctctctccctttctttgtttttctttcttttttaaaagaagatggtttcactttaatataatgctattatcttaagacttaa

SEQ ID NO: 320721 - DNA, 1115 bp, Homo sapiens
ccggcccacgccagctcccggccgcggcacagcagccccggcgctccccgcgccgccccgcgcaggcgcccccgccccgccgtcgccgccgccgcagccaggagccgctgcaccatgccccgcatagatgcggacctcaagctcgacttcaaggatgtcctgctccgacctaagcggagcagcctcaagagccgagccgaggtggatcttgaacgcaccttcacgtttcgaaattcaaagcagacctactcagggattcccatcatcgtggccaacatggacactgtgggcacgtttgagatggcagccgtgatgtcacagcactccatgtttacagcaattcataagcattactccctggatgactggaagctctttgccacaaatcacccagaatgcctgcagaatgtagccgtgagttcaggcagtgggcagaatgatctggaaaagatgaccagcatcctggaagctgtgccacaggttaagtttatttgcctggatgtggccaatgggtattcagaacattttgtggaattcgtgaaacttgtccgtgccaaatttcctgaacacaccattatggcagggaacgtggtgacaggagaaatggtagaagagcttattctttccggagcagatatcatcaaagtgggagttggaccaggttctgtgtgcaccacccgcaccaagacgggagtggggtacccccagctgagtgccgtcattgagtgtgccgactctgcccatggcctgaagggccacatcatctctgatggaggctgtacgtgtccaggggatgtcgccaaagcctttggagctggagcagattttgtcatgctgggaggaatgttttcgggtcatacggagtgtgctggagaagtgattgagaggaacggacggaagctcaagcttctcccgcctgccttgtcggggcccagacgcaaggcaccgattgggccaacatcagagccctgctgcccagaactcataacctcattgttcaaaccaacacttgcacctttctctttttctctttctctctccctttctttgtttttctttcttttttaaaagaagatggtttcactttaatataatgctattatcttaagacttaa

SEQ ID NO: 320722 - DNA, 1754 bp, Homo sapiens
tgttggaagtggagagtggagggtcagaagggagtggaccagttcaggtcccagagggaatcctccctccctctgagccgtctttcttctcctccctatttcgcagatatcccgagattaggtccccagcttccaaagagaggatcagaatgtctcaggataatgacacattgatgagagacatcctggggcatgagctcgctgctatgaggctgcagaagctggaacagcagcggcggctgtttgaaaagaagcagcgacagaagcgccaggagctcctcatggttcaggccaatcctgacgcttccccgtggctttggcgctcttgtctgcgggaggagcgccttttaggtgacagaggccttgggaaccctttcctccggaagaaagtgtcagaggcacatctgccctctggcatccacagtgccctgggcaccgtgagctgtggtggagacggcaggggcgagcgcggcctcccgacaccgcggacagaagcagtgttcaggaatctcggtctccagtcccctttcttatcctggctcccagacaattccgatgcagaattggaggaagtctccgtggagaatggttccgtctctcccccaccttttaaacagtctccgagaatccgacgcaagggttggcaagcccaccaacgacctgggacccgtgcagagggtgagagtgactcccaggatatgggagatgcacacaagtcacccaatatgggaccaaaccctggaatggatggtgactgtgtatatgaaaacttggccttccaaaaggaagaagacttggaaaagaagagagaggcctctgagtctacagggacgaactcctcagcagcacacaacgaagagttgtccaaggccctgaaaggcgagggtggcacggacagcgaccatatgaggcacgaagcctccttggcaatccgctccccctgccctgggctggaggaggacatggaagcctacgtgctgcggccagcgctcccgggcaccatgatgcagtgctacctcacccgtgacaagcacggcgtggacaagggcttgttccccctctactacctctacctggagacctctgacagcctgcagcgcttcctcctggctgggcgaaagagaagaaggagcaaaacttctaattacctcatctccctggatcctacacacctatctcgggacggggacaatttcgtgggcaaagtcagatccaatgtcttcagcaccaagttcaccatctttgacaatggggtgaatcctgaccgggagcatttaaccaggaatactgcccggatcagacaggagctgggggctgtgtgttatgagcccaacgtcttaggatacctggggcctcggaaaatgactgtgattctcccaggaaccaacagccagaaccagcgaatcaatgtccagccactaaatgaacaggagtcgctactgagtcgttaccaacgtggggacaaacaagggttgcttttgttgcacaacaaaaccccgtcgtgggacaaggagaacggtgtctacacgctcaatttccatggtcgagtcactcgggcttcggtgaagaacttccaaatcgtggatcccaaacaccaagaacatctggtgctccagttcggccgagtgggcccagacacattcaccatggacttctgctttccatttagcccgctccaggccttcagcatctgcttgtccagtttcaattagaagctggctgttgaataactcaataaaataccatacccttgc

SEQ ID NO: 320723 - DNA, 1655 bp, Homo sapiens
tgttggaagtggagagtggagggtcagaagggagtggaccagttcaggtcccagagggaatcctccctccctctgagccgtctttcttctcctccctatttcgcagatatcccgagattaggtccccagcttccaaagagaggatcagaatgtctcaggataatgacacattgatgagagacatcctggggcatgagctcgctgctatgaggctgcagaagctggaacagcagcggcggctgtttgaaaagaagcagcgacagaagcgccaggagctcctcatggttcaggccaatcctgacgcttccccgtggctttggcgctcttgtctgcgggaggagcgccttttaggtgacagaggccttgggaaccctttcctccggaagaaagtgtcagaggcacatctgccctctggcatccacagtgccctgggcaccgtgagctgtggtggagacggcaggggcgagcgcggcctcccgacaccgcggacagaagcagtgttcaggaatctcggtctccagtcccctttcttatcctggctcccagacaattccgatgcagaattggaggaagtctccgtggagaatggttccgtctctcccccaccttttaaacagtctccgagaatccgacgcaagggttggcaagcccaccaacgacctgggacccgtgcagagggtgagagtgactcccaggatatgggagatgcacacaagtcacccaatatgggaccaaaccctggaatggatggtgactgtgtatatgaaaacttggccttccaaaaggaagaagacttggaaaagaagagagaggcctctgagtctacagggacgaactcctcagcagcacacaacgaagagttgtccaaggccctgaaaggcgagggtggcacggacagcgaccatatgaggcacgaagcctccttggcaatccgctccccctgccctgggctggaggaggacatggaagcctacgtgctgcggccagcgctcccgggcaccatgatgcagtgctacctcacccgtgacaagcacggcgtggacaagggcttgttccccctctactacctctacctggagacctctgacagcctgcagcgcttcctcctggctgggcgaaagagaagaaggagcaaaacttctaattacctcatctccctggatcctacacacctatctcgggacggggacaatttcgtgggcaaagtcagatccaatgtcttcagcaccaagttcaccatctttgacaatggggtgaatcctgaccgggagcatttaaccaggaatactgcccggatcagacaggagctgggggctgtgtgttatgaacaggagtcgctactgagtcgttaccaacgtggggacaaacaagggttgcttttgttgcacaacaaaaccccgtcgtgggacaaggagaacggtgtctacacgctcaatttccatggtcgagtcactcgggcttcggtgaagaacttccaaatcgtggatcccaaacaccaagaacatctggtgctccagttcggccgagtgggcccagacacattcaccatggacttctgctttccatttagcccgctccaggccttcagcatctgcttgtccagtttcaattagaagctggctgttgaataactcaataaaataccatacccttgc

SEQ ID NO: 320724 - DNA, 1636 bp, Homo sapiens
gggactctcttgggcaaccgaggttccctgtgcactgtcaccatgggcctgtgtctctctcagcatcctggggcatgagctcgctgctatgaggctgcagaagctggaacagcagcggcggctgtttgaaaagaagcagcgacagaagcgccaggagctcctcatggttcaggccaatcctgacgcttccccgtggctttggcgctcttgtctgcgggaggagcgccttttaggtgacagaggccttgggaaccctttcctccggaagaaagtgtcagaggcacatctgccctctggcatccacagtgccctgggcaccgtgagctgtggtggagacggcaggggcgagcgcggcctcccgacaccgcggacagaagcagtgttcaggaatctcggtctccagtcccctttcttatcctggctcccagacaattccgatgcagaattggaggaagtctccgtggagaatggttccgtctctcccccaccttttaaacagtctccgagaatccgacgcaagggttggcaagcccaccaacgacctgggacccgtgcagagggtgagagtgactcccaggatatgggagatgcacacaagtcacccaatatgggaccaaaccctggaatggatggtgactgtgtatatgaaaacttggccttccaaaaggaagaagacttggaaaagaagagagaggcctctgagtctacagggacgaactcctcagcagcacacaacgaagagttgtccaaggccctgaaaggcgagggtggcacggacagcgaccatatgaggcacgaagcctccttggcaatccgctccccctgccctgggctggaggaggacatggaagcctacgtgctgcggccagcgctcccgggcaccatgatgcagtgctacctcacccgtgacaagcacggcgtggacaagggcttgttccccctctactacctctacctggagacctctgacagcctgcagcgcttcctcctggctgggcgaaagagaagaaggagcaaaacttctaattacctcatctccctggatcctacacacctatctcgggacggggacaatttcgtgggcaaagtcagatccaatgtcttcagcaccaagttcaccatctttgacaatggggtgaatcctgaccgggagcatttaaccaggaatactgcccggatcagacaggagctgggggctgtgtgttatgagcccaacgtcttaggatacctggggcctcggaaaatgactgtgattctcccaggaaccaacagccagaaccagcgaatcaatgtccagccactaaatgaacaggagtcgctactgagtcgttaccaacgtggggacaaacaagggttgcttttgttgcacaacaaaaccccgtcgtgggacaaggagaacggtgtctacacgctcaatttccatggtcgagtcactcgggcttcggtgaagaacttccaaatcgtggatcccaaacaccaagaacatctggtgctccagttcggccgagtgggcccagacacattcaccatggacttctgctttccatttagcccgctccaggccttcagcatctgcttgtccagtttcaattagaagctggctgttgaataactcaataaaataccatacccttgc

SEQ ID NO: 320725 - DNA, 1787 bp, Homo sapiens
tgttggaagtggagagtggagggtcagaagggagtggaccagttcaggtcccagagggaatcctccctccctctgagccgtctttcttctcctccctatttcgcagatatcccgagattaggtccccagcttccaaagagaggatcagaatgtctcaggataatgacacattgatgagagacatcctggggcatgagctcgctgctatgaggctgcagaagctggaacagcagcggcggctgtttgaaaagaagcagcgacagaagcgccaggagctcctcatggttcaggccaatcctgacgcttccccgtggctttggcgctcttgtctgcgggaggagcgccttttaggtgacagaggccttgggaaccctttcctccggaagaaagtgtcagaggcacatctgccctctggcatccacagtgccctgggcaccgtgagctgtggtggagacggcaggggcgagcgcggcctcccgacaccgcggacagaagcagtgttcaggaatctcggtctccagtcccctttcttatcctggctcccagacaattccgatgcagaattggaggaagtctccgtggagaatggttccgtctctcccccaccttttaaacagtctccgagaatccgacgcaagggttggcaagcccaccaacgacctgggacccgtgcagagggtgagagtgactcccaggatatgggagatgcacacaagtcacccaatatgggaccaaaccctggaatggatggtgactgtgtatatgaaaacttggccttccaaaaggaagaagacttggaaaagaagagagaggcctctgagtctacagggacgaactcctcagcagcacacaacgaagagttgtccaaggccctgaaaggcgagggtggcacggacagcgaccatatgaggcacgaagcctccttggcaatccgctccccctgccctgggctggaggaggacatggaagcctacgtgctgcggccagcgctcccgggcaccatgatgcagtgctacctcacccgtgacaagcacggcgtggacaagggcttgttccccctctactacctctacctggagacctctgacagcctgcagcgcttcctcctggctgggcgaaagagaagaaggagcaaaacttctaattacctcatctccctggatcctacacacctatctcgggacggggacaatttcgtgggcaaagtcagatccaatgtcttcagcaccaagttcaccatctttgacaatggggtgaatcctgaccgggagcatttaaccaggaatactgcccggatcagacaggagctgggggctgtgtgttatgagcccaacgtcttaggatacctggggcctcggaaaatgactgtgattctcccaggaaccaacagccagaaccagcgaatcaatgtccagccactaaatgaacaggagtcgctactgagtcgttaccaacgtggggacaaacaagggttgcttttgttgcacaacaaaaccccgtcgtgggacaaggagaacggtgtctacacgctcaatttccatggtcgagtcactcgggcttcggtgaagaacttccaaatcgtggatcccaaacaccgtgagctcctggaaaccagtttagccgggccagaagaacatctggtgctccagttcggccgagtgggcccagacacattcaccatggacttctgctttccatttagcccgctccaggccttcagcatctgcttgtccagtttcaattagaagctggctgttgaataactcaataaaataccatacccttgc

SEQ ID NO: 320726 - DNA, 1774 bp, Homo sapiens
tcaagggtgcagaggccaggcagagtgggtgcagagtgggggatgggcaaccagcctggtaacacctgggtgaggtgagcgagtcaagcccatctggaaatgctaaactcatcagctcagtacctaactgccaatcaacacactgccaatgcgggtgggctaagccgccaggatgcctgcagcagatggacgctgcccatccttgagccagccagctgggggcagagaggtgggtggcgggcacctcatgccagctgagaccaagagtggttgtatacatttctgcagcttgcagatttcatttttttggtcaccctttaagtgtccttctctcccaggatgagtgaggagctgtgctgatgttgggaacttatctttttccaggatccataacatttaggggaattatttgcgggctttcctagtgtattctaagaagttctaactctccatcaagaagcccaagattcctggagtctttttttcctctgccctgatcaactggggcccaggaaaagcaatgtctcttcacgggcctcagggccccagcagatggggctgggtcaggaaccatctctgtcccaggtgctcagccctcatatgcattttcttctggagcctcttagaatctcctccagaggactcatagagctgcctcccccaggatggtgaagttgggagcaaaatggggcttctgtaagtagaggtggaaaaccagagagatgtttccacagcagccatttccctaccctgtttcctaacttatgctgacaagttcttcctcttcctaccgtggggttcgagccccacttctggttgcatgttcccaccaccacgctctgctggttttagtcggctgacttttcaactgccccagcctctcctgctctctcagaacctccctctgcccccaccccccatctgtctcttcctcctaattaagggccactgcaaagagagacgggctggctaacccatgggatttagcttataagaacaaagcacaattattcaggactgaactgctttgaggtgccttggaactggctttggaaatagctatctgccccctagctatggactcttcacagttatttccagtttataaaaaggaaaagctgatcggatccatgtttctctctgcgagtctccttggggaggttgggctggtaaatatttgcaaggtcaggttaagcagacagacaattgaaaatactgggcaggtccaaaaggatagttccaggccataggaatggcttggtgcagttaacgggtgatgaagcaagaaatcttccttcctacttatgtcttaaagatggacagcctgtgtctcttgctgtgcctcttgctggcgtcttcctttattgaagcttgctgatgcactgtacatagtctctctctctaggtatagatatattatatatacaaatatcaaacatctcaccacacccaccccaaaagttacactgtgtgtgtgtggggaggtgtaataacttctcagtgttttgagttgattcaccaaaggcaaattttggaatgttcttgcgctttgtgcacttggaggggaaaacccaactacatatgcactttcttggttgtgtgtgctatagagaggttggaaggggtggttggaaggggagagaaactgagatggccctctgtgactcgactgctgggatgtatctgcttttgggagcagactgagtttcttttgcaatttgtcttattgtttgggtctactggcgacaataaactatctcccctgaaaatccct

SEQ ID NO: 320727 - DNA, 2119 bp, Homo sapiens
ggcacgaggaaagaaacaacaactggaaaagaagcattgcataagaccaggatgtctctgaaatggacgtcagtctttctgctgatacagctcagttgttactttagctctggaagctgtggaaaggtgctagtgtggcccacagaatacagccattggataaatatgaagacaatcctggaagagcttgttcagaggggtcatgaggtgactgtgttgacatcttcggcttctactcttgtcaatgccagtaaatcatctgctattaaattagaagtttatcctacatctttaactaaaaatgatttggaagattctcttctgaaaattctcgatagatggatatatggtgtttcaaaaaatacattttggtcatatttttcacaattacaagaattgtgttgggaatattatgactacagtaacaagctctgtaaagatgcagttttgaataagaaacttatgatgaaactacaagagtcaaagtttgatgtcattctggcagatgcccttaatccctgtggtgagctactggctgaactatttaacataccctttctgtacagtcttcgattctctgttggctacacatttgagaagaatggtggaggatttctgttccctccttcctatgtacctgttgttatgtcagaattaagtgatcaaatgattttcatggagaggataaaaaatatgatacatatgctttattttgacttttggtttcaaatttatgatctgaagaagtgggaccagttttatagtgaagttctaggaagacccactacattatttgagacaatggggaaagctgaaatgtggctcattcgaacctattgggattttgaatttcctcgcccattcttaccaaatgttgattttgttggaggacttcactgtaaaccagccaaacccctgcctaaggaaatggaagagtttgtgcagagctctggagaaaatggtattgtggtgttttctctggggtcgatgatcagtaacatgtcagaagaaagtgccaacatgattgcatcagcccttgcccagatcccacaaaaggttctatggagatttgatggcaagaagccaaatactttaggttccaatactcgactgtacaagtggttaccccagaatgaccttcttggtcatcccaaaaccaaagcttttataactcatggtggaaccaatggcatctatgaggcgatctaccatgggatccctatggtgggcattcccttgtttgcggatcaacatgataacattgctcacatgaaagccaagggagcagccctcagtgtggacatcaggaccatgtcaagtagagatttgctcaatgcattgaagtcagtcattaatgaccctgtctataaagagaatatcatgaaattatcaagaattcatcatgatcaaccggtgaagcccctggatcgagcagtcttctggattgagtttgtcatgcgccataaaggagccaagcaccttcgggtcgcagcccacaacctcacctggatccagtaccactctttggatgtgatagcattcctgctggcctgcgtggcaactatgatatttatgatcacaaaatgttgcctgttttgtttccgaaagcttgccaaaacaggaaagaagaagaaaagggattagttatatcaaaagcctgaagtggaatgaccaaaagatgggactcctcctttattccagcatggagggttttaaatggaggatttcctttttcctgcgacaaaacgtcttttcacaacttaccctgttaagtcaaaatttattttccaggaatttaatatgtactttagttggaattattctatgtcaatgatttttaagctatgaaaaatacaatggggggaaggatagcatttggagatatacctaatgttaaatgacgagttactggatgcagcacgccaacatggcacatgtatacatatgtagctaaccctgcgttgtgcacatgtaccctaaaacttaaagtataatttaaaaaaagcaaaaaaaaaaaataccaactcttttttttaaaccaggaaggaaaatgtgaacatggaaacaacttctagtattggatctgaaaataaagtgtcatccaagccataaaaaaaaa

SEQ ID NO: 320728 - DNA, 2142 bp, Homo sapiens
  misc_feature (2082)..(2082): n is a, c, g, or t
ggcacgaggaaagaaacaacaactggaaaagaagcattgcataagaccaggatgtctctgaaatggacgtcagtctttctgctgatacagctcagttgttactttagctctggaagctgtggaaaggtgctagtgtggcccacagaatacagccattggataaatatgaagacaatcctggaagagcttgttcagaggggtcatgaggtgactgtgttgacatcttcggcttctactcttgtcaatgccagtaaatcatctgctattaaattagaagtttatcctacatctttaactaaaaatgatttggaagattctcttctgaaaattctcgatagatggatatatggtgtttcaaaaaatacattttggtcatatttttcacaattacaagaattgtgttgggaatattatgactacagtaacaagctctgtaaagatgcagttttgaataagaaacttatgatgaaactacaagagtcaaagtttgatgtcattctggcagatgcccttaatccctgtggtgagctactggctgaactatttaacataccctttctgtacagtcttcgattctctgttggctacacatttgagaagaatggtggaggatttctgttccctccttcctatgtacctgttgttatgtcagaattaagtgatcaaatgattttcatggagaggataaaaaatatgatacatatgctttattttgacttttggtttcaaatttatgatctgaagaagtgggaccagttttatagtgaagttctaggaagacccactacattatttgagacaatggggaaagctgaaatgtggctcattcgaacctattgggattttgaatttcctcgcccattcttaccaaatgttgattttgttggaggacttcactgtaaaccagccaaacccctgcctaaggaaatggaagagtttgtgcagagctctggagaaaatggtattgtggtgttttctctggggtcgatgatcagtaacatgtcagaagaaagtgccaacatgattgcatcagcccttgcccagatcccacaaaaggttctatggagatttgatggcaagaagccaaatactttaggttccaatactcgactgtacaagtggttaccccagaatgaccttcttggtcatcccaaaaccaaagcttttataactcatggtggaaccaatggcatctatgaggcgatctaccatgggatccctatggtgggcattcccttgtttgcggatcaacatgataacattgctcacatgaaagccaagggagcagccctcagtgtggacatcaggaccatgtcaagtagagatttgctcaatgcattgaagtcagtcattaatgaccctgtctataaagagaatatcatgaaattatcaagaattcatcatgatcaaccggtgaagcccctggatcgagcagtcttctggattgagtttgtcatgcgccataaaggagccaagcaccttcgggtcgcagcccacaacctcacctggatccagtaccactctttggatgtgatagcattcctgctggcctgcgtggcaactatgatatttatgatcacaaaatgttgcctgttttgtttccgaaagcttgccaaaacaggaaagaagaagaaaagggattagttatatcaaaagcctgaagtggaatgaccaaaagatgggactcctcctttattccagcatggagggttttaaatggaggatttcctttttcctgcgacaaaacgtcttttcacaacttaccctgttaagtcaaaatttattttccaggaatttaatatgtactttagttggaattattctatgtcaatgatttttaagctatgaaaaataataatataaaaccttatgggcttatattgaaatttattattctaatccaaaagttaccccacacaaaagttactgagcttccttatgtttcacacattgtatttgaacacaaaacattaacaactccactcatagtatcaacattgttttgcaaatactcagaatattttggcttcattttgagcagaatttttgtttttaattttgccaatgaaatcttcaaatttnggaaaaataaactgagcaggccgttccctttaggagggtaattcatagcctcgctcctgt

SEQ ID NO: 320729 - DNA, 820 bp, Homo sapiens
  misc_feature (28)..(28): n is a, c, g, or t
  misc_feature (760)..(760): n is a, c, g, or t
gtcatatcgttaaccgactctcttaatnaaccaccgctacagctataaagagaatatcatgaaattatcaagaattcatcatgatcaaccggtgaagcccctggatcgagcagtcttctggattgagtttgtcatgcgccataaaggagccaagcaccttcgggtcgcagcccacaacctcacctggatccagtaccactctttggatgtgatagcattcctgctggcctgcgtggcaactatgatatttatgatcacaaaatgttgcctgttttgtttccgaaagcttgccaaaacaggaaagaagaagaaaagggattagttatatcaaaagcctgaagtggaatgaccaaaagatgggactcctcctttattccagcatggagggttttaaatggaggatttcctttttcctgcgacaaaacgtcttttcacaacttaccctgttaagtcaaaatttattttccaggaatttaatatgtactttagttggaattattctatgtcaatgatttttaagctatgaaaaataataatataaaaccttatgggcttatattgaaatttattattctaatccaaaagttaccccacacaaaagttactgagcttccttatgtttcacacattgtatttgaacacaaaacattaacaactccactcatagtatcaacattgttttgcaaatactcagaatattttggcttcattttgagcagaatttttgtttttaattttgccaatgaaatcttcaaatttnggaaaaataaactgagcaggccgttccctttaggagggtaattcatagcctcgctcctgt

SEQ ID NO: 320730 - DNA, 595 bp, Homo sapiens
gaagatgcagccccttcctccagcctgagagaataaagcatcattggcttatgcaaccatggcaatcccattccccttttctcatgattgatttgggaatgggcaagtgacccagttctaaccaatgagacgaaagaaaaagtctgttggtcagcttatctcagaagatttttgtttcctgctataaagagaaacagtaagttccttcctgcctgacttaaatgcaattgtgtgcaaacatgttacttgggagctacagcaacgattctgtgaccatgaggcaataagccaaggacaaaggatagaatagtgaaaagacagagtattggattttttttatgatatcattgaactgctggacccaatgtggaaccatctacttttagtctttcatgatttgtgagatgattaaacatttcttttttttagccattatttcttttctgttacttgcaactgaagacatcctacataatacaaacactatccaacttggattgtaatttatctattttcagatctgtgtgttctgtcttactgatttttgtattcttagcactgagtataaggctgctacttagtaagacttcaataa

SEQ ID NO: 320731 - DNA, 405 bp, Homo sapiens
ctgtggaacagaattttaggggcttcatttatcttccaggtagaaaagagctgataaggggttatggagatgttgtcacctggcattatatgctataatccttggtcacatttataagtttttttattctaatacaatggatctgagtgtcattaggagccttgcagacaagtgtttctgggtaacttctcagtaacatctttgacatttgtttagttgcagacctaaatggccactgatggatactgcagtttcagtaagcagtggagtttatttccctggaagtagaatgaggcagacccagaatattgtagagtgcttgtcatcagctgtatttcttcatggcccagaaaaactcctatgtaacttcccttagagaaatgaaactgaacgggaagcagaagt

SEQ ID NO: 320732 - DNA, 694 bp, Homo sapiens
gccttaacaatagtcccactgaattatgttggttcaataaaggttggctattataatttttattattttcatgaacttaatagcttgttaatcttggttccacaggatttcaaatatgcgtgcattagagaatgattttttcaattctcccccaagaaaaactgttcggtttggtggaactgtgacagaagtcttgctgaagtacaaaaagggtgaaacaaatgactttgagttgttgaagaaccagctgttagatccagacataaaggtaattaattttgtgtttgatcattagcaaaattattgccactttatacagacatagtttgctctttgggtcccattctgttctgcagaacttgctctctccatggtcctcccttactttaatctggtggttctcaaccagggacagttttaccccctagaagacatttggtgatggctgcagatatttttgtcacaactgggaggaaagggtgctactggcatctagtgggtgaatgacagagatgctgctaaacatctcacagtgcacagggcagcctcccataaccaagagtgatccagccccaaatgacaacagtgttgaggctgggaaaccctgctctaatgcttcctttctattagattactacctctttcctccatgctgcatgcaactcttttgtctctttaaagctaaaacaaacca

SEQ ID NO: 320733 - DNA, 915 bp, Homo sapiens
tagaagcatttctactatatctcagcagtagagggaaaatgttaagtaaccgtatgtttatatgaaatatccatttgtatccatatttgagtgaatacttttttagatcctcctgaattagatcattagagctggctgttttttcccctcatgctttttgagaattcgcaggagtatcaactattatattcaaatgtcaatacagaagtatagctaaatgtagtttatcattttcctttttccaagccctctggctgcactaacatgagtgtttaaatttttgtagtcatgattttataatccgcaattgacatgtgaaagttagtgttccttttataatttcatctgatgttaaagtacggttaaaagtcttgctgttgatactaaacaggaaacaaaagcataacttaattctttccccttcttgttaagggtgaaacaaatgactttgagttgttgaagaaccagctgttagatccagacataaaggtaattaattttgtgtttgatcattagcaaaattattgccactttatacagacatagtttgctctttgggtcccattctgttctgcagaacttgctctctccatggtcctcccttactttaatctggtggttctcaaccagggacagttttaccccctagaagacatttggtgatggctgcagatatttttgtcacaactgggaggaaagggtgctactggcatctagtgggtgaatgacagagatgctgctaaacatctcacagtgcacagggcagcctcccataaccaagagtgatccagccccaaatgacaacagtgttgaggctgggaaaccctgctctaatgcttcctttctattagattactacctctttcctccatgctgcatgcaactcttttgtctctttaaagctaaaacaaacca

SEQ ID NO: 320734 - DNA, 1190 bp, Homo sapiens
gggacagaggctgtggctggaaggagctgggcatccggcctgaggcgcagcggtcgcgttagttcggcccaatggcggcaccgctgcttcacacgttgtttgtcgggagatgcggccgcttcgtcctctgcagtcaagacgctgggcgcgtcgaggactggcttctacttgaatgaagacaaaaatctaggccgggcgcggttgctcacgcctgtaatcccagcactttgggaggccgaggtgggcggatcacctgaagtcaggagttcgagaccagcctggccaacatgcgaaacctcgtctctactgaaaatacaaaaattagccaggcgtggtggcaggatttcaaatatgcgtgcattagagaatgattttttcaattctcccccaagaaaaactgttcggtttggtggaactgtgacagaagtcttgctgaagtacaaaaagggtgaaacaaatgactttgagttgttgaagaaccagctgttagatccagacataaaggatgaccagatcatcaactggctgctagaattccgttcttctgtcatgtacttgacaaaagactttgagcaacttatcagtattatattgagattgccttggttgaatagaagtcaaacagtagtggaagagtatttggcttttcttggtaatcttgtatcagcatagactgttttcctcagaccgtgtctcagcatgattgcttcccattttgtgcctccccgagtgatcattaaggaaggcgatgtagatgtttcagattctgatgatgaagatgataatcttcctgcaaattttgacacatatcacagagccttgcaaataatagcaagatatgtaccatcatgagtatacttttccttattttgaatgtttaattctcaagaaaattgtaatcaattagtaaaaattataaaatgttaatagtattaaagcttgagtcttacattgcattttttttttttgtatccacttgaggaaacattacattctacaaaaagtggcatttccattttctatttattctctttaattgtttttcaaagttcgtatgcagattctcccccaattttgtatggtggttggaattttgtttttatcttcaacagatatgctatccaaaatttttcagtgagaaacccctgggtgtgtttgtgtcatgccatatgaataaaaattgcacttct

SEQ ID NO: 320735 - DNA, 369 bp, Homo sapiens
gtttgtgaccttttccccccaacctattcttgataaatgattgatataagatagctgtaaatttctgttatcttagaggatttgtgattttgaaagtactctttgtttaacttaaggatgaccagatcatcaactggctgctagaattccgttcttctgtcatgtacttgacaaaagactttgagcaacttatcagtattatattgagattgccttggttgaatagaagtcaaacagtagtggaagagtatttggcttttcttggtaatcttgtatcagcatagactgttttcctcagaccgtgtctcagcatgattgcttcccattttgtgcctcgtaagtcattactctttgcttgcttggaatttt

SEQ ID NO: 320736 - DNA, 1791 bp, Homo sapiens
ggctactggcctcctgcagtgatgatggggaggtggccttctggaagtatcagcggcctgaaggcctctgagctacctcgactttggacagagtaatgactccccagaaaacgtcatataagactttaccagcccctgagaggaccaggaggagcatccttgaccttcatttaacttggctcacttctcttcagacttgggtagaagtgcagagccacagaattgctttccttccccgcctttgacatgaggccttcagtaaagagctacagaacatgagtaaaaaaaaaaaaaaaaaaaactcgactcgtgccgaattcggcacgaggcggtcgcgttagttcggcccaatggcggcaccgctgcttcacacgttgtttgtcgggagatgcggccgcttcgtcctctgcagtcaagacgctgggcgcgtcgaggactgggatttcaaatatgcgtgcattagagaatgattttttcaattctcccccaagaaaaactgttcggtttggtggaactgtgacagaagtcttgctgaagtacaaaaagggtgaaacaaatgactttgagttgttgaagaaccagctgttagatccagacataaaggatgaccagatcatcaactggctgctagaattccgttcttctgtcatgtacttgacaaaagactttgagcaacttatcagtattatattgagattgccttggttgaatagaagtcaaacagtagtggaagagtatttggcttttcttggtaatcttgtatcagcatagactgttttcctcagaccgtgtctcagcatgattgcttcccattttgtgcctccccgagtgatcattaaggaaggcgatgtagatgtttcagattctgatgatgaagatgataatcttcctgcaaattttgacacatatcacagagccttgcaaataatagcaagatatgtaccatcatgagtatacttttccttattttgaatgtttaattctcaagaaaattgtaatcaattagtaaaaattataaaatgttaatagtattaaagcttgagtcttacattgcattttttttttttgtatccacttgaggaaacattacattctacaaaaagtggcatttccattttctatttattctctttaattgtttttcaaagttcgtatgcagattctcccccaattttgtatggtggttggaattttgtttttatcttcaacagatatgctatccaaaatttttcagtgagaaacccctgggtgtgtttgtgtcatgccatatgaataaaaattgcacttctaagaaaagcttttcaggtttgtgggtttcttttggaggggtggatttctagttccctctgtctgttgattatttgttaacttaaaaaaatccaacttgattattttttcttcttttaaaaataatatacatgtgtagtgggaaatgtcagcaaaagtgctgttatgtttctgtgggagagaagctccctctttgatttgctgttgatatcagagttaacagaagcttattttctctaagttgttatagactttctcagaagctatacattgtaagttccacgcgccttgtctctgttatatttatttctctatttaaattgatggatatatgcaaacctgatcattatcatacttatgccttgacacaagagaggcaataaactaatctaagtgatgcttgtgatgccaaagatgtcagaacactttctgggccaatggcagatacctcatgtcaccagatgctaagggtccacaataaaaagcgttgaatgaaaaaaaaaa

SEQ ID NO: 320737 - DNA, 2163 bp, Homo sapiens
ggctactggcctcctgcagtgatgatggggaggtggccttctggaagtatcagcggcctgaaggcctctgagctacctcgactttggacagagtaatgactccccagaaaacgtcatataagactttaccagcccctgagaggaccaggaggagcatccttgaccttcatttaacttggctcacttctcttcagacttgggtagaagtgcagagccacagaattgctttccttccccgcctttgacatgaggccttcagtaaagagctacagaacatgagtaaaaaaaaaaaaaaaaaaaactcgactcgtgccgaattcggcacgaggcggtcgcgttagttcggcccaatggcggcaccgctgcttcacacgttgtttgtcgggagatgcggccgcttcgtcctctgcagtcaagacgctgggcgcgtcgaggactggcttctacttgaatgaagacaaaaatctaggccgggcgcggttgctcacgcctgtaatcccagcactttgggaggccgaggtgggcggatcacctgaagtcaggagttcgagaccagcctggccaacatgcgaaacctcgtctctactgaaaatacaaaaattagccaggcgtggtggcaggtgcctgtaatcccagctactcaggaggctgaggcaggagaattgcttgaacccggagatggaggttgcagttaagctgagatcacaccactgcactccagcctgggcagcagagcaagactccatctcaaaaaaaaaaaaaaatccagccacgtagagatttgggaaaagagtatttccaatagagtgaacgatttcaaatatgcgtgcattagagaatgattttttcaattctcccccaagaaaaactgttcggtttggtggaactgtgacagaagtcttgctgaagtacaaaaagggtgaaacaaatgactttgagttgttgaagaaccagctgttagatccagacataaaggatgaccagatcatcaactggctgctagaattccgttcttctgtcatgtacttgacaaaagactttgagcaacttatcagtattatattgagattgccttggttgaatagaagtcaaacagtagtggaagagtatttggcttttcttggtaatcttgtatcagcatagactgttttcctcagaccgtgtctcagcatgattgcttcccattttgtgcctccccgagtgatcattaaggaaggcgatgtagatgtttcagattctgatgatgaagatgataatcttcctgcaaattttgacacatatcacagagccttgcaaataatagcaagatatgtaccatcatgagtatacttttccttattttgaatgtttaattctcaagaaaattgtaatcaattagtaaaaattataaaatgttaatagtattaaagcttgagtcttacattgcattttttttttttgtatccacttgaggaaacattacattctacaaaaagtggcatttccattttctatttattctctttaattgtttttcaaagttcgtatgcagattctcccccaattttgtatggtggttggaattttgtttttatcttcaacagatatgctatccaaaatttttcagtgagaaacccctgggtgtgtttgtgtcatgccatatgaataaaaattgcacttctaagaaaagcttttcaggtttgtgggtttcttttggaggggtggatttctagttccctctgtctgttgattatttgttaacttaaaaaaatccaacttgattattttttcttcttttaaaaataatatacatgtgtagtgggaaatgtcagcaaaagtgctgttatgtttctgtgggagagaagctccctctttgatttgctgttgatatcagagttaacagaagcttattttctctaagttgttatagactttctcagaagctatacattgtaagttccacgcgccttgtctctgttatatttatttctctatttaaattgatggatatatgcaaacctgatcattatcatacttatgccttgacacaagagaggcaataaactaatctaagtgatgcttgtgatgccaaagatgtcagaacactttctgggccaatggcagatacctcatgtcaccagatgctaagggtccacaataaaaagcgttgaatgaaaaaaaaaa

SEQ ID NO: 320738 - DNA, 1456 bp, Homo sapiens
gccttaacaatagtcccactgaattatgttggttcaataaaggttggctattataatttttattattttcatgaacttaatagcttgttaatcttggttccacaggatttcaaatatgcgtgcattagagaatgattttttcaattctcccccaagaaaaactgttcggtttggtggaactgtgacagaagtcttgctgaagtacaaaaagggtgaaacaaatgactttgagttgttgaagaaccagctgttagatccagacataaaggatgaccagatcatcaactggctgctagaattccgttcttctgtcatgtacttgacaaaagactttgagcaacttatcagtattatattgagattgccttggttgaatagaagtcaaacagtagtggaagagtatttggcttttcttggtaatcttgtatcagcatagactgttttcctcagaccgtgtctcagcatgattgcttcccattttgtgcctccccgagtgatcattaaggaaggcgatgtagatgtttcagattctgatgatgaagatgataatcttcctgcaaattttgacacatatcacagagccttgcaaataatagcaagatatgtaccatcatgagtatacttttccttattttgaatgtttaattctcaagaaaattgtaatcaattagtaaaaattataaaatgttaatagtattaaagcttgagtcttacattgcattttttttttttgtatccacttgaggaaacattacattctacaaaaagtggcatttccattttctatttattctctttaattgtttttcaaagttcgtatgcagattctcccccaattttgtatggtggttggaattttgtttttatcttcaacagatatgctatccaaaatttttcagtgagaaacccctgggtgtgtttgtgtcatgccatatgaataaaaattgcacttctaagaaaagcttttcaggtttgtgggtttcttttggaggggtggatttctagttccctctgtctgttgattatttgttaacttaaaaaaatccaacttgattattttttcttcttttaaaaataatatacatgtgtagtgggaaatgtcagcaaaagtgctgttatgtttctgtgggagagaagctccctctttgatttgctgttgatatcagagttaacagaagcttattttctctaagttgttatagactttctcagaagctatacattgtaagttccacgcgccttgtctctgttatatttatttctctatttaaattgatggatatatgcaaacctgatcattatcatacttatgccttgacacaagagaggcaataaactaatctaagtgatgcttgtgatgccaaagatgtcagaacactttctgggccaatggcagatacctcatgtcaccagatgctaagggtccacaataaaaagcgttgaatgaaaaaaaaaa

SEQ ID NO: 320739 - DNA, 2154 bp, Homo sapiens
gggacagaggctgtggctggaaggagctgggcatccggcctgaggcgcagcggtcgcgttagttcggcccaatggcggcaccgctgcttcacacgttgtttgtcgggagatgcggccgcttcgtcctctgcagtcaagacgctgggcgcgtcgaggactgggtaagattcaggccgcttccttctgcgcgtctgggaccaaagctcaggaccgcgcttagaggagcggattgaaaggatgtgggacaaagctaatggcgtgtgataggagcacggggtcgagggtcatctcacgttcacagaaatgagctcattcctcctaactgggtaatagacatgggtggggcctggaaaagtgagtatgttctctgttctggaggcccactttcccgactgtgtctcttcgtgatttcccaggcctgggtactgccttctgcgccttgacccctcttccttccctcttcttcgtccaaatttggaagggatttccctgggctatgtgggttatcagccgaacgttgtcactcatggcaaattgaatattacatcttttttgtttgaaatttgtttcgacacacgtatttgtttcgcagtctttattttgctccacttttaaaatccctaacccccatagcactcttggcgtttaactttcagagtcattaggatgctatgttttttcattaatttactacgtgtaagtgaagcaaaccttgtaaaacaattagcgtaatatgattcctaatatttatcgagctcctgcttactgtgttaaacactggggacagtggtttatccaaagacactaatgtccctgctttctacagagcttacagcatagggtgggaaggcagtacacaggccaataaataaacgaacacgatgatttcagttatacaacaaggtaatgggggagggagaagggagagaaggagtgttcgagatttctcattgggaagacatctgtcatttcagcttctacttgaatgaagacaaaaatctaggccgggcgcggttgctcacgcctgtaatcccagcactttgggaggccgaggtgggcggatcacctgaagtcaggagttcgagaccagcctggccaacatgcgaaacctcgtctctactgaaaatacaaaaattagccaggcgtggtggcaggtgcctgtaatcccagctactcaggaggctgaggcaggagaattgcttgaacccggagatggaggttgcagttaagctgagatcacaccactgcactccagcctgggcagcagagcaagactccatctcaaaaaaaaaaaaaaatccagccacgtagagatttgggaaaagagtatttccaatagagtgaacgatttcaaatatgcgtgcattagagaatgattttttcaattctcccccaagaaaaactgttcggtttggtggaactgtgacagaagtcttgctgaagtacaaaaagggtgaaacaaatgactttgagttgttgaagaaccagctgttagatccagacataaaggatgaccagatcatcaactggctgctagaattccgttcttctgtcatgtacttgacaaaagactttgagcaacttatcagtattatattgagattgccttggttgaatagaagtcaaacagtagtggaagagtatttggcttttcttggtaatcttgtatcagcatagactgttttcctcagaccgtgtctcagcatgattgcttcccattttgtgcctccccgagtgatcattaaggaaggcgatgtagatgtttcagattctgatgatgaagatgatagtaagtataaaaaggtttaaagcctgggcacagtggcttacacccataatcccagcattttgggaggccaagatgggaggatcacttgaggccaagagtttgagaccagcctgggcaacatagtgagaccttgtctctgcaaaaaaacattttttttcaaatattttcttaaaaaaggcttaaagtagaactaggcagggtagtgtgtgtctttagtcacagctacctgggaggcttaagtgggtggattgcttgagcccaggagttcaagctctgcctggtggcaagactctgtcttctttaaaaaaaaaaaagtaaagcacagaatacctggcatctattctaataagtagactgcaacaaat

SEQ ID NO: 320740 - DNA, 1261 bp, Homo sapiens
gtaatgacccctatggaggtgtctagattcatttgttgctgtgagtttgatgaattataacttgctttattgaactcctggtgaaatctaggaatttttagccatttaaaaactataaagttgcattactttttttcagattgtgcatttaattaatcattgggctaactttggattatggaaaaataactttttttatagctgttcattgtctaggtcaataactttttttgtatagccattcattgtctagatcaatgacagaacaacatattttctttttccctcaaaagcccgagtgatcattaaggaaggcgatgtagatgtttcagattctgatgatgaagatgataatcttcctgcaaattttgacacatatcacagagccttgcaaataatagcaagatatgtaccatcatgagtatacttttccttattttgaatgtttaattctcaagaaaattgtaatcaattagtaaaaattataaaatgttaatagtattaaagcttgagtcttacattgcattttttttttttgtatccacttgaggaaacattacattctacaaaaagtggcatttccattttctatttattctctttaattgtttttcaaagttcgtatgcagattctcccccaattttgtatggtggttggaattttgtttttatcttcaacagatatgctatccaaaatttttcagtgagaaacccctgggtgtgtttgtgtcatgccatatgaataaaaattgcacttctaagaaaagcttttcaggtttgtgggtttcttttggaggggtggatttctagttccctctgtctgttgattatttgttaacttaaaaaaatccaacttgattattttttcttcttttaaaaataatatacatgtgtagtgggaaatgtcagcaaaagtgctgttatgtttctgtgggagagaagctccctctttgatttgctgttgatatcagagttaacagaagcttattttctctaagttgttatagactttctcagaagctatacattgtaagttccacgcgccttgtctctgttatatttatttctctatttaaattgatggatatatgcaaacctgatcattatcatacttatgccttgacacaagagaggcaataaactaatctaagtgatgcttgtgatgccaaagatgtcagaacactttctgggccaatggcagatacctcatgtcaccagatgctaagggtccacaataaaaagcgttgaatgaaaaaaaaaa

SEQ ID NO: 320741 - DNA, 718 bp, Homo sapiens
gtaatgacccctatggaggtgtctagattcatttgttgctgtgagtttgatgaattataacttgctttattgaactcctggtgaaatctaggaatttttagccatttaaaaactataaagttgcattactttttttcagattgtgcatttaattaatcattgggctaactttggattatggaaaaataactttttttatagctgttcattgtctaggtcaataactttttttgtatagccattcattgtctagatcaatgacagaacaacatattttctttttccctcaaaagcccgagtgatcattaaggaaggcgatgtagatgtttcagattctgatgatgaagatgatagtaagtataaaaaggtttaaagcctgggcacagtggcttacacccataatcccagcattttgggaggccaagatgggaggatcacttgaggccaagagtttgagaccagcctgggcaacatagtgagaccttgtctctgcaaaaaaacattttttttcaaatattttcttaaaaaaggcttaaagtagaactaggcagggtagtgtgtgtctttagtcacagctacctgggaggcttaagtgggtggattgcttgagcccaggagttcaagctctgcctggtggcaagactctgtcttctttaaaaaaaaaaaagtaaagcacagaatacctggcatctattctaataagtagactgcaacaaat

SEQ ID NO: 320742 - DNA, 395 bp, Homo sapiens
aaaatttttcagtgagaaacccctgggtgtgtttgtgtcatgccatatgaataaaaattgcacttctaagaaaagcttttcaggtttgtgggtttcttttggaggggtggatttctagttccctctgtctgttgattatttgttaacttaaaaaaatccaacttgattattttttcttcttttaaaaataatatacatgtgtagtgggaaatgtcagcaaaagtgctgttatgtttctgtgggagagaagctccctctttgatttgctgttgatatcagagttaacagaagcttattttctctaagttgttatagactttctcagaagctatacattgtaagttccagttctggccgggcgcggtggctcacacctgtaatcccagcactttggg

SEQ ID NO: 320743 - DNA, 2697 bp, Homo sapiens
gggacagaggctgtggctggaaggagctgggcatccggcctgaggcgcagcggtcgcgttagttcggcccaatggcggcaccgctgcttcacacgttgtttgtcgggagatgcggccgcttcgtcctctgcagtcaagacgctgggcgcgtcgaggactgggtaagattcaggccgcttccttctgcgcgtctgggaccaaagctcaggaccgcgcttagaggagcggattgaaaggatgtgggacaaagctaatggcgtgtgataggagcacggggtcgagggtcatctcacgttcacagaaatgagctcattcctcctaactgggtaatagacatgggtggggcctggaaaagtgagtatgttctctgttctggaggcccactttcccgactgtgtctcttcgtgatttcccaggcctgggtactgccttctgcgccttgacccctcttccttccctcttcttcgtccaaatttggaagggatttccctgggctatgtgggttatcagccgaacgttgtcactcatggcaaattgaatattacatcttttttgtttgaaatttgtttcgacacacgtatttgtttcgcagtctttattttgctccacttttaaaatccctaacccccatagcactcttggcgtttaactttcagagtcattaggatgctatgttttttcattaatttactacgtgtaagtgaagcaaaccttgtaaaacaattagcgtaatatgattcctaatatttatcgagctcctgcttactgtgttaaacactggggacagtggtttatccaaagacactaatgtccctgctttctacagagcttacagcatagggtgggaaggcagtacacaggccaataaataaacgaacacgatgatttcagttatacaacaaggtaatgggggagggagaagggagagaaggagtgttcgagatttctcattgggaagacatctgtcatttcagcttctacttgaatgaagacaaaaatctaggccgggcgcggttgctcacgcctgtaatcccagcactttgggaggccgaggtgggcggatcacctgaagtcaggagttcgagaccagcctggccaacatgcgaaacctcgtctctactgaaaatacaaaaattagccaggcgtggtggcaggtgcctgtaatcccagctactcaggaggctgaggcaggagaattgcttgaacccggagatggaggttgcagttaagctgagatcacaccactgcactccagcctgggcagcagagcaagactccatctcaaaaaaaaaaaaaaatccagccacgtagagatttgggaaaagagtatttccaatagagtgaacgatttcaaatatgcgtgcattagagaatgattttttcaattctcccccaagaaaaactgttcggtttggtggaactgtgacagaagtcttgctgaagtacaaaaagggtgaaacaaatgactttgagttgttgaagaaccagctgttagatccagacataaaggatgaccagatcatcaactggctgctagaattccgttcttctgtcatgtacttgacaaaagactttgagcaacttatcagtattatattgagattgccttggttgaatagaagtcaaacagtagtggaagagtatttggcttttcttggtaatcttgtatcagcatagactgttttcctcagaccgtgtctcagcatgattgcttcccattttgtgcctccccgagtgatcattaaggaaggcgatgtagatgtttcagattctgatgatgaagatgataatcttcctgcaaattttgacacatatcacagagccttgcaaataatagcaagatatgtaccatcatgagtatacttttccttattttgaatgtttaattctcaagaaaattgtaatcaattagtaaaaattataaaatgttaatagtattaaagcttgagtcttacattgcattttttttttttgtatccacttgaggaaacattacattctacaaaaagtggcatttccattttctatttattctctttaattgtttttcaaagttcgtatgcagattctcccccaattttgtatggtggttggaattttgtttttatcttcaacagatatgctatccaaaatttttcagtgagaaacccctgggtgtgtttgtgtcatgccatatgaataaaaattgcacttctaagaaaagcttttcaggtttgtgggtttcttttggaggggtggatttctagttccctctgtctgttgattatttgttaacttaaaaaaatccaacttgattattttttcttcttttaaaaataatatacatgtgtagtgggaaatgtcagcaaaagtgctgttatgtttctgtgggagagaagctccctctttgatttgctgttgatatcagagttaacagaagcttattttctctaagttgttatagactttctcagaagctatacattgtaagttccacgcgccttgtctctgttatatttatttctctatttaaattgatggatatatgcaaacctgatcattatcatacttatgccttgacacaagagaggcaataaactaatctaagtgatgcttgtgatgccaaagatgtcagaacactttctgggccaatggcagatacctcatgtcaccagatgctaagggtccacaataaaaagcgttgaatgaaaaaaaaaa

SEQ ID NO: 320744 - DNA, 1935 bp, Homo sapiens
gggacagaggctgtggctggaaggagctgggcatccggcctgaggcgcagcggtcgcgttagttcggcccaatggcggcaccgctgcttcacacgttgtttgtcgggagatgcggccgcttcgtcctctgcagtcaagacgctgggcgcgtcgaggactgggtaagattcaggccgcttccttctgcgcgtctgggaccaaagctcaggaccgcgcttagaggagcggattgaaaggatgtgggacaaagctaatggcgtgtgataggagcacggggtcgagggtcatctcacgttcacagaaatgagctcattcctcctaactgggtaatagacatgggtggggcctggaaaagtgagtatgttctctgttctggaggcccactttcccgactgtgtctcttcgtgatttcccaggcctgggtactgccttctgcgccttgacccctcttccttccctcttcttcgtccaaatttggaagggatttccctgggctatgtgggttatcagccgaacgttgtcactcatggcaaattgaatattacatcttttttgtttgaaatttgtttcgacacacgtatttgtttcgcagtctttattttgctccacttttaaaatccctaacccccatagcactcttggcgtttaactttcagagtcattaggatgctatgttttttcattaatttactacgtgtaagtgaagcaaaccttgtaaaacaattagcgtaatatgattcctaatatttatcgagctcctgcttactgtgttaaacactggggacagtggtttatccaaagacactaatgtccctgctttctacagagcttacagcatagggtgggaaggcagtacacaggccaataaataaacgaacacgatgatttcagttatacaacaaggtaatgggggagggagaagggagagaaggagtgttcgagatttctcattgggaagacatctgtcatttcagcttctacttgaatgaagacaaaaatctaggccgggcgcggttgctcacgcctgtaatcccagcactttgggaggccgaggtgggcggatcacctgaagtcaggagttcgagaccagcctggccaacatgcgaaacctcgtctctactgaaaatacaaaaattagccaggcgtggtggcaggtgcctgtaatcccagctactcaggaggctgaggcaggagaattgcttgaacccggagatggaggttgcagttaagctgagatcacaccactgcactccagcctgggcagcagagcaagactccatctcaaaaaaaaaaaaaaatccagccacgtagagatttgggaaaagagtatttccaatagagtgaacgatttcaaatatgcgtgcattagagaatgattttttcaattctcccccaagaaaaactgttcggtttggtggaactgtgacagaagtcttgctgaagtacaaaaagggtgaaacaaatgactttgagttgttgaagaaccagctgttagatccagacataaaggtaattaattttgtgtttgatcattagcaaaattattgccactttatacagacatagtttgctctttgggtcccattctgttctgcagaacttgctctctccatggtcctcccttactttaatctggtggttctcaaccagggacagttttaccccctagaagacatttggtgatggctgcagatatttttgtcacaactgggaggaaagggtgctactggcatctagtgggtgaatgacagagatgctgctaaacatctcacagtgcacagggcagcctcccataaccaagagtgatccagccccaaatgacaacagtgttgaggctgggaaaccctgctctaatgcttcctttctattagattactacctctttcctccatgctgcatgcaactcttttgtctctttaaagctaaaacaaacca

SEQ ID NO: 320745 - DNA, 1341 bp, Homo sapiens
gggacagaggctgtggctggaaggagctgggcatccggcctgaggcgcagcggtcgcgttagttcggcccaatggcggcaccgctgcttcacacgttgtttgtcgggagatgcggccgcttcgtcctctgcagtcaagacgctgggcgcgtcgaggactgggtaagattcaggccgcttccttctgcgcgtctgggaccaaagctcaggaccgcgcttagaggagcggattgaaaggatgtgggacaaagctaatggcgtgtgataggagcacggggtcgagggtcatctcacgttcacagaaatgagctcattcctcctaactgggtaatagacatgggtggggcctggaaaagtgagtatgttctctgttctggaggcccactttcccgactgtgtctcttcgtgatttcccaggcctgggtactgccttctgcgccttgacccctcttccttccctcttcttcgtccaaatttggaagggatttccctgggctatgtgggttatcagccgaacgttgtcactcatggcaaattgaatattacatcttttttgtttgaaatttgtttcgacacacgtatttgtttcgcagtctttattttgctccacttttaaaatccctaacccccatagcactcttggcgtttaactttcagagtcattaggatgctatgttttttcattaatttactacgtgtaagtgaagcaaaccttgtaaaacaattagcgtaatatgattcctaatatttatcgagctcctgcttactgtgttaaacactggggacagtggtttatccaaagacactaatgtccctgctttctacagagcttacagcatagggtgggaaggcagtacacaggccaataaataaacgaacacgatgatttcagttatacaacaaggtaatgggggagggagaagggagagaaggagtgttcgagatttctcattgggaagacatctgtcatttcagcttctacttgaatgaagacaaaaatctaggccgggcgcggttgctcacgcctgtaatcccagcactttgggaggccgaggtgggcggatcactcctgacctcagatgatccacccaccttgacctcacttacaggcgtgagccaccgcgccttgtctctgttatatttatttctctatttaaattgatggatatatgcaaacctgatcattatcatacttatgccttgacacaagagaggcaataaactaatctaagtgatgcttgtgatgccaaagatgtcagaacactttctgggccaatggcagatacctcatgtcaccagatgctaagggtccacaataaaaagcgttgaatgaaaaaaaaaa

SEQ ID NO: 320746 - DNA, 543 bp, Homo sapiens
ctgggaggctgaggctgatggagagcgggcaggtagggtggagaggcaggaaggttggtggcagccacatggctgagggcctagagcctggccagggagtcgtggagagaggcagtgggtgggctgggggttcaggcctgcctgaaggggaggcagctggtgcagtggcccataccccatggggtgaaggcctgggcagggcccaggggcagcttcgagggtgacctggagctgctcaggaagtgagatggcccagcctgacctgaccattggctggcaaggaacgggatggagaagttgtgtcctgggccttcagcgagtgtgacattgtcattgttgggatagctttaaagatctgattgcttatgacatgccttgtagcgctaccagcatcttggcatttggcaggtctagtccagctcgctgtttgcacgtcttctgtcttattcctagaagagagagttcccagccttgcttgatttccccccattgatgggaggctcatcacttcatgggagactcattttacttaggccttctgag

SEQ ID NO: 320747 - DNA, 564 bp, Homo sapiens
  misc_feature (4)..(4): n is a, c, g, or t
tctnccagctgccggaccagcgggcctgccgcctctacggaccagtccctgctcaggtgtcacttttgctggcaggccgagattagggcaggagagtgggcaaggcgtcgcggccaggaggagaagggctctaccacgccaccctcctttggcctccgaacgcggaccccgcacacacacacccgcgcctctttggcaagcgtgccttgtcggctgggttaagccgcagtgcgtgcacaccgagcggcggggcgctgtggaacgcgggagcggactagcggaggaggatgcggaccaagccccagcgacccagggcaactcggagctacctcgggcagccctgcgggtctccgaggagaaccgaggagacgggagaaacatgggagagggtggccttttccctgttcacacacacatgcacgcagccactggccgggacagttgacacccatcttccttccctgctccttccagtcattctacacccaaggactggcaacgtggttggagcttttggggggaattatgaagaaatctgaataaatttctcacccttcaaaattc

SEQ ID NO: 320748 - DNA, 418 bp, Homo sapiens
cgttggcggcttaggggctgttactgtgtcccacccaggcgtgcacaccgagcggcggggcgctgtggaacgcgggagcggactagcggaggaggatgcggaccaagccccagcgacccagggcaactcggagctacctcgggcagccctgcgggtctccgaggagaaccgaggagacgggagaaacatgggagagggtggccttttccctgttcacacacacatgcacgcagccactggccgggacagttgacacccatcttccttccctgctccttccagtcattctacacccgcttggtgctgccagtgcgggcagggccttggagcccaaagcggatccccacacttgtccctacggtcggaaggaaagtagaggagagaaagtcaggcgcggcagggctaagagcaatagtgg

SEQ ID NO: 320749 - DNA, 796 bp, Homo sapiens
  misc_feature (4)..(4): n is a, c, g, or t
tctnccagctgccggaccagcgggcctgccgcctctacggaccagtccctgctcaggtgtcacttttgctggcaggccgagattagggcaggagagtgggcaaggcgtcgcggccaggaggagaagggctctaccacgccaccctcctttggcctccgaacgcggaccccgcacacacacacccgcgcctctttggcaagcgtgccttgtcggctgggttaagccgcagtgcgtgcacaccgagcggcggggcgctgtggaacgcgggagcggactagcggaggaggatgcggaccaagccccagcgacccagggcaactcggagctacctcgggcagccctgcgggtctccgaggagaaccgaggagacgggagaaacatgggagagggtggccttttccctgttcacacacacatgcacgcagccactggccgggacagttgacacccatcttccttccctgctccttccagtcattctacacccgcttggtgctgccagtgcgggcagggccttggagcccaaagcggatccccacacttgtccctacggtcggaaggaaagtagaggagagaaagtcaggcgcggcagggctaagagcaatagtggcccaaatgttcctggcccgcctgctgcgccacagagtctgaaaagcgggtctccgtctaccagaaggtgacctccacacagcccctctccccgaccaactgcagcacccaaggactggcaacgtggttggagcttttggggggaattatgaagaaatctgaataaatttctcacccttcaaaattc

SEQ ID NO: 320750 - DNA, 390 bp, Homo sapiens
  misc_feature (4)..(4): n is a, c, g, or t
tctnccagctgccggaccagcgggcctgccgcctctacggaccagtccctgctcaggcgtgcacaccgagcggcggggcgctgtggaacgcgggagcggactagcggaggaggatgcggaccaagccccagcgacccagggcaactcggagctacctcgggcagccctgcgggtctccgaggagaaccgaggagacgggagaaacatgggagagggtggccttttccctgttcacacacacatgcacgcagccactggccgggacagttgacacccatcttccttccctgctccttccagtcattctacacccaaggactggcaacgtggttggagcttttggggggaattatgaagaaatctgaataaatttctcacccttcaaaattc

SEQ ID NO: 320751 - DNA, 1921 bp, Homo sapiens
  misc_feature (1921)..(1921): n is a, c, g, or t
agcgggcgggggggcggggcctccccgggctcggccgcgccgccgcctcctccgcctcctcctcctcaccagcgctaaagccgggactggaccgagcggagttgtgcgtgtcgccgaaggggggtgggccgggggaggggaggttcgttccgcggagccgcagccagaaccgggaccaagaatcgccttcagccctgtctggtgcatccttggcagaaagtgaggaggaaaacacccccattgttctttggcatggacacaagttcagtgggaggattagaattgactgatcagactcctgttttattagggagtacggccatggcaactagtctcacgaatgtaggaaactcatttagtggtccagctaatcctttagtgtctagatctaataagtttcagaactcgtcagtggaagatgatgatgatgttgtttttatcgaacctgtacaacctcccccaccttctgtaccagtggtagctgatcaaagaaccataacatttacatcatcaaaaaatgaagaactacaaggaaatgattccaaaattactccttcctcaaaagagttggcatctcagaagggaagtgtaagtgagacaattgtcattgatgatgaagaggacatggaaacaaatcaagggcaagagaaaaattcctccaattttattgaacgaagacctcctgagactaaaaacagaaccaatgatgtggatttctccacttccagtttttcaagaagtaagaccaagactggagtaggaccttttaatcctggtagaatgaatgtggcaggagacgtttttcagaatggagaatctgcaactcatcataatcctgattcttggatctcccagtcagcttcatttccccgtaatcagaaacaaccaggggtggactctttatcaccagtggcctcacttcctaaacagattttccagccgtctgtccaacagcagcctactaaaccagttaaagtcacttgtgcaaactgcaaaaaacctttacagaagggccagacagcttatcaacgaaaaggatcagctcacctcttttgttctaccacctgcctttcttccttctcccacaagcctgctccaaagaaactctgtgttatgtgtaaaaaagatataactacaatgaaaggaaccattgttgctcaagtggattcaagtgagtccttccaggaattctgtagtacatcttgtttatctctctatgaagacaaacagaatcctactaaaggagctctaaataaatcaagatgtacaatctgtggtaaactaactgagattcgccatgaagtcagctttaaaaatatgactcataagctgtgcagtgaccactgctttaatagatatagaatggccaatggtttaataatgaattgctgtgaacagtgtggagagtacttgcccagtaaaggtgctggaaataatgttctggtgattgatggtcaacagaaaagattttgctgtcaaagttgtgtcagtgaatacaaacaggtaggtagccatccaagcttcctgaaggaggttcgagatcacatgcaggactctttcttaatgcagcctgaggtaagcaggaatgtaaatggagttcaaggccttaacatttttgagcactgctactactgtcattaatatgtatctgaaaaatcttgtccaatttgaaatatattaaaatttccaaacttaaattgtatcaaatgatgaatgttttatctctgagacatagatttctaatttcactaattttacatgtattttcttgtgatatgctcatttgtctttagttatttatgttcttaggaaattattttcagatttttttagtgcacaataccttgtacacagtaggcatttaataaagggatataaaaatcctctcttttgtgcctacctgaaaagttaaaaaaaaaan

SEQ ID NO: 320752 - DNA, 7543 bp, Homo sapiens
agcgggcgggggggcggggcctccccgggctcggccgcgccgccgcctcctccgcctcctcctcctcaccagcgctaaagccgggactggaccgagcggagttgtgcgtgtcgccgaaggggggtgggccgggggaggggaggttcgttccgcggagccgcagccagaaccgggaccaagaatcgccttcagccctgtctggtgcatccttggcagaaagtgaggaggaaaacacccccattgttagatgaggtcttaatcatggaacatttgaagtcacgtaaagaaggttctttggcatggacacaagttcagtgggaggattagaattgactgatcagactcctgttttattagggagtacggccatggcaactagtctcacgaatgtaggaaactcatttagtggtccagctaatcctttagtgtctagatctaataagtttcagaactcgtcagtggaagatgatgatgatgttgtttttatcgaacctgtacaacctcccccaccttctgtaccagtggtagctgatcaaagaaccataacatttacatcatcaaaaaatgaagaactacaaggaaatgattccaaaattactccttcctcaaaagagttggcatctcagaagggaagtgtaagtgagacaattgtcattgatgatgaagaggacatggaaacaaatcaagggcaagagaaaaattcctccaattttattgaacgaagacctcctgagactaaaaacagaaccaatgatgtggatttctccacttccagtttttcaagaagtaaggtaaatgcaggaatgggtaatagtggtatcaccacagaaccagactctgaaattcagattgctaatgttacaactttagaaacaggtgtaagctctgtgaatgatggccaattagaaaatactgacgggcgagatatgaacttaatgattacacatgtaacatcactgcagaataccaacttgggagatgtctctaacggactgcagtcaagtaattttggtgttaatatacaaacatacaccccatctttaacttcacagaccaagactggagtaggaccttttaatcctggtagaatgaatgtggcaggagacgtttttcagaatggagaatctgcaactcatcataatcctgattcttggatctcccagtcagcttcatttccccgtaatcagaaacaaccaggggtggactctttatcaccagtggcctcacttcctaaacagattttccagccgtctgtccaacagcagcctactaaaccagttaaagtcacttgtgcaaactgcaaaaaacctttacagaagggccagacagcttatcaacgaaaaggatcagctcacctcttttgttctaccacctgcctttcttccttctcccacaagcctgctccaaagaaactctgtgttatgtgtaaaaaagatataactacaatgaaaggaaccattgttgctcaagtggattcaagtgagtccttccaggaattctgtagtacatcttgtttatctctctatgaagacaaacagaatcctactaaaggagctctaaataaatcaagatgtacaatctgtggtaaactaactgagattcgccatgaagtcagctttaaaaatatgactcataagctgtgcagtgaccactgctttaatagatatagaatggccaatggtttaataatgaattgctgtgaacagtgtggagagtacttgcccagtaaaggtgctggaaataatgttctggtgattgatggtcaacagaaaagattttgctgtcaaagttgtgtcagtgaatacaaacaggtaggtagccatccaagcttcctgaaggaggttcgagatcacatgcaggactctttcttaatgcagcctgagaaatatggaaaactgacaacttgtactggttgccgaacacagtgcaggttttttgatatgactcagtgtataggtcctaatggatatatggagccatattgttcaactgcttgtatgaacagtcacaagacaaaatatgcaaaatcacaaagtttgggaattatttgccatttttgtaagcgaaactctttacctcaataccaagccacaatgcctgatggaaaactgtacaacttttgcaattccagttgtgtggctaaatttcaggctctaagtatgcagtcatctccaaatggccagtttgtagcgccaagtgatattcagttgaaatgcaactactgcaaaaattccttttgttcaaaaccagaaatcctggaatgggagaacaaagtgcatcagttctgcagcaaaacttgttcagatgactataagaagttgcattgcatagttacatattgcgaatactgtcaagaggagaagactcttcatgaaacagtaaatttctctggcgttaagagacctttctgtagtgaaggctgcaaattattatacaaacaggattttgccagacgtttaggattgagatgtgttacttgcaactattgttctcagctatgtaagaagggagcaactaaagaactcgatggtgttgtgagagatttctgcagtgaagattgctgtaaaaaatttcaggattggtactacaaggctgcaaggtgtgactgttgtaaatctcaaggaactcttaaagagcgagttcagtggcgtggggaaatgaaacatttctgtgatcaacattgcttactgcgtttctactgtcaacaaaatgagcccaacatgacaactcagaaaggacctgaaaacttacattatgatcagggttgtcagacatctcgaaccaaaatgacaggttcagcaccacccccttctccaacacctaacaaagagatgaagaacaaagcagttctttgcaaacctttaacaatgacaaaagctacttactgtaaacctcacatgcagaccaaatcttgtcagacagatgatacttggaggacagaatatgttccagtgcctatccctgtgcctgtgtatatcccagttcctatgcacatgtacagtcagaatattcctgttcctactacagttcctgttcctgtgccagttcctgtttttctgcctgctccattggacagcagtgagaagattcctgcagcaattgaggagctaaaaagcaaggtttcttcagatgctcttgatacagagttgcttacaatgacggatatgatgagtgaagacgaggggaaaacagagacaaccaacatcaacagtgtaattattgaaacagatataattggttcagaccttttgaagaactctgacccagagacacagtccagcatgcctgatgtaccatatgaaccagatttggatatcgaaatagattttcccagagctgctgaggagcttgatatggaaaatgaatttttattaccacctgtttttggcgaagaatatgaggaacagcccagacctcgatctaaaaaaaagggagccaagagaaaggctgtatcaggataccagtctcatgatgatagttctgacaattcagaatgcagctttcctttcaaatatacgtatggcgtaaatgcatggaaacactgggtcaaaactaggcaacttgatgaagatcttctggtattagatgagttaaaatcttctaaatcagtaaagttaaaagaggatctactctctcacaccacagctgagcttaactatgggttagctcattttgtcaatgagatccgacggccaaatggagagaattatgcacctgacagcatctattacctttgccttggaatacaggagtatttgtgtggaagtaatcgaaaagacaacatatttattgatcctggataccaaacatttgagcaagaattgaataaaatactgcgaagctggcaaccaagcatacttccagatgggtcaatattctctcgagttgaagaagactatctctggaggataaaacaactaggatcacactctccagtagctcttctgaatacactgttctactttaacactaagtattttggcctgaaaacagtggaacaacacttaagactttcctttggcactgtgtttaggcattggaaaaaaaatcctttaacgatggaaaacaaagcgtgtcttcgataccaagtgtcttccttgtgtggaacagataatgaagataaaattactactggaaaaagaaaacatgaagatgatgagccagtatttgaacaaattgaaaacacagccaatccttccagatgtcctgtgaaaatgtttgaatgctacttgtctaaaagtccacagaatcttaatcagaggatggatgttttttatttgcaaccagaatgctctagttctacagatagccctgtctggtatacgtctacttcactggaccgaaacaccttggaaaatatgcttgtacgggttcttctagtaaaagatatttatgataaagacaattatgaactggatgaagacacagactaaaaaggaacgttgcagaagcaatcgggataaaacagcattagatagtcatgctgctagatctttattatggaaaacatttcaagtttactccttctgttttgagttttgtagcagtgtacccacgctgggtattaccatgtaaataatctgtgagtgaaagttgccattattctatgtagtggttttaggatacttaacaaatacattcaaattctttttttattattatttatttgattaggtatgtttgtaactttttacattacagaatatgaatgagaatgtgccatgtataatttttttcttgtagtaagaaacatccatattgcacaactctactgttgcaaagcttccttggaagggggctcttttactgggttcttaaccagatggttgtgtatgggtagcactactaaaagtttagaacttgcagtgtctttcggaatttttaaaataaactgtaaactaataggctggggtttttgttttgttttggggttttgttttgtttggttttacattttagttactgaagccttacaaggttatgtagagagataccatcttctgtaccaaaaatagacaagagaatgctgtcaatattggtgtactgtaatgtgaatctatgctggtgaaaacaattttttgttccccttattaaaaccttagtgtccttttctcatttgtggctttctgcatcacccaatcaataaaaaacaaatatatatatgtatatatatgtatgtatgtgtgtgtgtatatatatatatatatatatatatataaatgattgtaagttgaaaacaagatcatcaagacatttcctttgtaaaaatgtctggtgaaagtataaaattctgttttcttctatgccagccataagtatctgaaatcctcttcatttatagaggtttgatttttatttctttttttccctcttaaggatacagatcatgctgcaatgttagctgtgtagtactctaaaacttagcaattttatcagaattcttgtgcctgtttacattggataaaattgtttttagaaattccactcctgaaatagttacagaaagtcaagctatgttaaataagataggatcacattttataatgaagattaccagtgtagtaattctgatattgcaaatgattgaggaacaaacaaagaaactaatagagaaagtcagtctcagaggaaatcccatttaatgttagattgtttggcttttgaaattacttcttatagaagattgcattaaaaaaaaaaacaactttgtgcttctgcatagcaatttatccattcagaccttttcttttagaataaggaaacttaaaatctactttctaaagactgaacaaagtgctagctgcaaattatcttgaaatcatttggctcttttctagcatgtgtgtaatcatgttttcttctgattcctgaatgaccatggtagcattagtgtttagaaattgttcaggggaaaattgagctattttccatagtggctagcaattgctacacatccttagatactcctctctcccataggataaatgttacagcacacaaaagaaattttctcaattctgatttggaaaatttcacaggtgtcattattgtatatctaagcaataattatctgaatgttttggcataaaaaattataatgttctaacttgttttataagttgaatgacttttcagtcccttgattttatattgttgagtgataatcagactgatagtagcaaatctgatcatacattactaaaatagattgctgattgtctatttaacgaagacaagtgggtaacatttaaaatatataatacaaaaattttctctaacttacctttttccagaactacttctttaagcacttttcctattaatgcctattgttgattaaaaggtggttaattctaaccatcttttagtcttcaaagtggtgctatattccatcaagagcaataaagtttttcccaggtgtcacttattgtatatgttaccaaataccatgaatttctgccatagtactactatcaagcaccttgtcttgctatttacagtttcttcatttgtatatttttagcttttctaagtggaaatgtctacataattttgatcttgacatgattgaggatttagagctcttgtctttgtcttgattgcaatccaacgatagattaacttgattctcagggggaaaagaaaaacttattttatgagaattgtttgttctgtgaaactcacttcacctagaacacatttcattgattcttggatcttagtttatgtggtcatagttgactgctgagaaaaggacaatgaaatgatagcaatttccttttgcttctaggtgatctctgattatagatagcatcctgtaaatataactttattgtcttgaaatgtttattgaagatgctatatttttctgttctgttttctgaagattttgccatttaaaatgatccagtgaaaaatatttatccacattgaagaaagtggatttcccatgcaaattgaatcttcattaacacattttaaaaggctttactgtattaggtaacatagatattaaaggatttttctaggcaagaagctcaactttttttttccataaaaataatttttgcttaaatagtaactcatggttttcttttattaaatggggttgttgtcagtatgttaaacattgaagtaggaggaggatgcatattgtactatgcattcaaatttatcactgttttttctgacagactttccctttgtcctttctagttatgacttgggaatggggtaacttctttatgcatagtattaagggttatagtatgaagaaatcataaaattgcaagttttggtttgcattactctaatgtgggttcatttaatctgagatcttaaatatcttgcagccttaaatcactacaaacatttgcatttttattatgccagttatttccaaaatgtattgttatacatgtcacttatgtttttaagctaatattgactgtaggataatctccttgttcccctcaaaatagtcatgaaagtgtacatgaaaatatttttaaagaataaatttctttaaattacaaaatttgga

SEQ ID NO: 320753 - DNA, 7496 bp, Homo sapiens
agcgggcgggggggcggggcctccccgggctcggccgcgccgccgcctcctccgcctcctcctcctcaccagcgctaaagccgggactggaccgagcggagttgtgcgtgtcgccgaaggggggtgggccgggggaggggaggttcgttccgcggagccgcagccagaaccgggaccaagaatcgccttcagccctgtctggtgcatccttggcagaaagtgaggaggaaaacacccccattgttctttggcatggacacaagttcagtgggaggattagaattgactgatcagactcctgttttattagggagtacggccatggcaactagtctcacgaatgtaggaaactcatttagtggtccagctaatcctttagtgtctagatctaataagtttcagaactcgtcagtggaagatgatgatgatgttgtttttatcgaacctgtacaacctcccccaccttctgtaccagtggtagctgatcaaagaaccataacatttacatcatcaaaaaatgaagaactacaaggaaatgattccaaaattactccttcctcaaaagagttggcatctcagaagggaagtgtaagtgagacaattgtcattgatgatgaagaggacatggaaacaaatcaagggcaagagaaaaattcctccaattttattgaacgaagacctcctgagactaaaaacagaaccaatgatgtggatttctccacttccagtttttcaagaagtaaggtaaatgcaggaatgggtaatagtggtatcaccacagaaccagactctgaaattcagattgctaatgttacaactttagaaacaggtgtaagctctgtgaatgatggccaattagaaaatactgacgggcgagatatgaacttaatgattacacatgtaacatcactgcagaataccaacttgggagatgtctctaacggactgcagtcaagtaattttggtgttaatatacaaacatacaccccatctttaacttcacagaccaagactggagtaggaccttttaatcctggtagaatgaatgtggcaggagacgtttttcagaatggagaatctgcaactcatcataatcctgattcttggatctcccagtcagcttcatttccccgtaatcagaaacaaccaggggtggactctttatcaccagtggcctcacttcctaaacagattttccagccgtctgtccaacagcagcctactaaaccagttaaagtcacttgtgcaaactgcaaaaaacctttacagaagggccagacagcttatcaacgaaaaggatcagctcacctcttttgttctaccacctgcctttcttccttctcccacaagcctgctccaaagaaactctgtgttatgtgtaaaaaagatataactacaatgaaaggaaccattgttgctcaagtggattcaagtgagtccttccaggaattctgtagtacatcttgtttatctctctatgaagacaaacagaatcctactaaaggagctctaaataaatcaagatgtacaatctgtggtaaactaactgagattcgccatgaagtcagctttaaaaatatgactcataagctgtgcagtgaccactgctttaatagatatagaatggccaatggtttaataatgaattgctgtgaacagtgtggagagtacttgcccagtaaaggtgctggaaataatgttctggtgattgatggtcaacagaaaagattttgctgtcaaagttgtgtcagtgaatacaaacaggtaggtagccatccaagcttcctgaaggaggttcgagatcacatgcaggactctttcttaatgcagcctgagaaatatggaaaactgacaacttgtactggttgccgaacacagtgcaggttttttgatatgactcagtgtataggtcctaatggatatatggagccatattgttcaactgcttgtatgaacagtcacaagacaaaatatgcaaaatcacaaagtttgggaattatttgccatttttgtaagcgaaactctttacctcaataccaagccacaatgcctgatggaaaactgtacaacttttgcaattccagttgtgtggctaaatttcaggctctaagtatgcagtcatctccaaatggccagtttgtagcgccaagtgatattcagttgaaatgcaactactgcaaaaattccttttgttcaaaaccagaaatcctggaatgggagaacaaagtgcatcagttctgcagcaaaacttgttcagatgactataagaagttgcattgcatagttacatattgcgaatactgtcaagaggagaagactcttcatgaaacagtaaatttctctggcgttaagagacctttctgtagtgaaggctgcaaattattatacaaacaggattttgccagacgtttaggattgagatgtgttacttgcaactattgttctcagctatgtaagaagggagcaactaaagaactcgatggtgttgtgagagatttctgcagtgaagattgctgtaaaaaatttcaggattggtactacaaggctgcaaggtgtgactgttgtaaatctcaaggaactcttaaagagcgagttcagtggcgtggggaaatgaaacatttctgtgatcaacattgcttactgcgtttctactgtcaacaaaatgagcccaacatgacaactcagaaaggacctgaaaacttacattatgatcagggttgtcagacatctcgaaccaaaatgacaggttcagcaccacccccttctccaacacctaacaaagagatgaagaacaaagcagttctttgcaaacctttaacaatgacaaaagctacttactgtaaacctcacatgcagaccaaatcttgtcagacagatgatacttggaggacagaatatgttccagtgcctatccctgtgcctgtgtatatcccagttcctatgcacatgtacagtcagaatattcctgttcctactacagttcctgttcctgtgccagttcctgtttttctgcctgctccattggacagcagtgagaagattcctgcagcaattgaggagctaaaaagcaaggtttcttcagatgctcttgatacagagttgcttacaatgacggatatgatgagtgaagacgaggggaaaacagagacaaccaacatcaacagtgtaattattgaaacagatataattggttcagaccttttgaagaactctgacccagagacacagtccagcatgcctgatgtaccatatgaaccagatttggatatcgaaatagattttcccagagctgctgaggagcttgatatggaaaatgaatttttattaccacctgtttttggcgaagaatatgaggaacagcccagacctcgatctaaaaaaaagggagccaagagaaaggctgtatcaggataccagtctcatgatgatagttctgacaattcagaatgcagctttcctttcaaatatacgtatggcgtaaatgcatggaaacactgggtcaaaactaggcaacttgatgaagatcttctggtattagatgagttaaaatcttctaaatcagtaaagttaaaagaggatctactctctcacaccacagctgagcttaactatgggttagctcattttgtcaatgagatccgacggccaaatggagagaattatgcacctgacagcatctattacctttgccttggaatacaggagtatttgtgtggaagtaatcgaaaagacaacatatttattgatcctggataccaaacatttgagcaagaattgaataaaatactgcgaagctggcaaccaagcatacttccagatgggtcaatattctctcgagttgaagaagactatctctggaggataaaacaactaggatcacactctccagtagctcttctgaatacactgttctactttaacactaagtattttggcctgaaaacagtggaacaacacttaagactttcctttggcactgtgtttaggcattggaaaaaaaatcctttaacgatggaaaacaaagcgtgtcttcgataccaagtgtcttccttgtgtggaacagataatgaagataaaattactactggaaaaagaaaacatgaagatgatgagccagtatttgaacaaattgaaaacacagccaatccttccagatgtcctgtgaaaatgtttgaatgctacttgtctaaaagtccacagaatcttaatcagaggatggatgttttttatttgcaaccagaatgctctagttctacagatagccctgtctggtatacgtctacttcactggaccgaaacaccttggaaaatatgcttgtacgggttcttctagtaaaagatatttatgataaagacaattatgaactggatgaagacacagactaaaaaggaacgttgcagaagcaatcgggataaaacagcattagatagtcatgctgctagatctttattatggaaaacatttcaagtttactccttctgttttgagttttgtagcagtgtacccacgctgggtattaccatgtaaataatctgtgagtgaaagttgccattattctatgtagtggttttaggatacttaacaaatacattcaaattctttttttattattatttatttgattaggtatgtttgtaactttttacattacagaatatgaatgagaatgtgccatgtataatttttttcttgtagtaagaaacatccatattgcacaactctactgttgcaaagcttccttggaagggggctcttttactgggttcttaaccagatggttgtgtatgggtagcactactaaaagtttagaacttgcagtgtctttcggaatttttaaaataaactgtaaactaataggctggggtttttgttttgttttggggttttgttttgtttggttttacattttagttactgaagccttacaaggttatgtagagagataccatcttctgtaccaaaaatagacaagagaatgctgtcaatattggtgtactgtaatgtgaatctatgctggtgaaaacaattttttgttccccttattaaaaccttagtgtccttttctcatttgtggctttctgcatcacccaatcaataaaaaacaaatatatatatgtatatatatgtatgtatgtgtgtgtgtatatatatatatatatatatatatataaatgattgtaagttgaaaacaagatcatcaagacatttcctttgtaaaaatgtctggtgaaagtataaaattctgttttcttctatgccagccataagtatctgaaatcctcttcatttatagaggtttgatttttatttctttttttccctcttaaggatacagatcatgctgcaatgttagctgtgtagtactctaaaacttagcaattttatcagaattcttgtgcctgtttacattggataaaattgtttttagaaattccactcctgaaatagttacagaaagtcaagctatgttaaataagataggatcacattttataatgaagattaccagtgtagtaattctgatattgcaaatgattgaggaacaaacaaagaaactaatagagaaagtcagtctcagaggaaatcccatttaatgttagattgtttggcttttgaaattacttcttatagaagattgcattaaaaaaaaaaacaactttgtgcttctgcatagcaatttatccattcagaccttttcttttagaataaggaaacttaaaatctactttctaaagactgaacaaagtgctagctgcaaattatcttgaaatcatttggctcttttctagcatgtgtgtaatcatgttttcttctgattcctgaatgaccatggtagcattagtgtttagaaattgttcaggggaaaattgagctattttccatagtggctagcaattgctacacatccttagatactcctctctcccataggataaatgttacagcacacaaaagaaattttctcaattctgatttggaaaatttcacaggtgtcattattgtatatctaagcaataattatctgaatgttttggcataaaaaattataatgttctaacttgttttataagttgaatgacttttcagtcccttgattttatattgttgagtgataatcagactgatagtagcaaatctgatcatacattactaaaatagattgctgattgtctatttaacgaagacaagtgggtaacatttaaaatatataatacaaaaattttctctaacttacctttttccagaactacttctttaagcacttttcctattaatgcctattgttgattaaaaggtggttaattctaaccatcttttagtcttcaaagtggtgctatattccatcaagagcaataaagtttttcccaggtgtcacttattgtatatgttaccaaataccatgaatttctgccatagtactactatcaagcaccttgtcttgctatttacagtttcttcatttgtatatttttagcttttctaagtggaaatgtctacataattttgatcttgacatgattgaggatttagagctcttgtctttgtcttgattgcaatccaacgatagattaacttgattctcagggggaaaagaaaaacttattttatgagaattgtttgttctgtgaaactcacttcacctagaacacatttcattgattcttggatcttagtttatgtggtcatagttgactgctgagaaaaggacaatgaaatgatagcaatttccttttgcttctaggtgatctctgattatagatagcatcctgtaaatataactttattgtcttgaaatgtttattgaagatgctatatttttctgttctgttttctgaagattttgccatttaaaatgatccagtgaaaaatatttatccacattgaagaaagtggatttcccatgcaaattgaatcttcattaacacattttaaaaggctttactgtattaggtaacatagatattaaaggatttttctaggcaagaagctcaactttttttttccataaaaataatttttgcttaaatagtaactcatggttttcttttattaaatggggttgttgtcagtatgttaaacattgaagtaggaggaggatgcatattgtactatgcattcaaatttatcactgttttttctgacagactttccctttgtcctttctagttatgacttgggaatggggtaacttctttatgcatagtattaagggttatagtatgaagaaatcataaaattgcaagttttggtttgcattactctaatgtgggttcatttaatctgagatcttaaatatcttgcagccttaaatcactacaaacatttgcatttttattatgccagttatttccaaaatgtattgttatacatgtcacttatgtttttaagctaatattgactgtaggataatctccttgttcccctcaaaatagtcatgaaagtgtacatgaaaatatttttaaagaataaatttctttaaattacaaaatttgga

SEQ ID NO: 320754 - DNA, 7521 bp, Homo sapiens
agcgggcgggggggcggggcctccccgggctcggccgcgccgccgcctcctccgcctcctcctcctcaccagcgctaaagccgggactggaccgagcggagttgtgcgtgtcgccgaaggggggtgggccgggggaggggaggttcgttccgcggagccgcagccagaaccgggaccaagaatcgccttcagccctgtctggtgcatccttggcagaaagtgaggaggaaaacacccccattgttctttggcatggacacaagttcagtgggaggattagaattgactgatcagactcctgttttattagggagtacggccatggcaactagtctcacgaatgtaggaaactcatttagtggtccagctaatcctttagtgtctagatctaataagtttcagaactcgtcagtggaagatgatgatgatgttgtttttatcgaacctgtacaacctcccccaccttctgtaccagtggtagctgatcaaagaaccataacatttacatcatcaaaaaatgaagaactacaaggaaatgattccaaaattactccttcctcaaaagagttggcatctcagaagggaagtgtaagtgagacaattgtcattgatgatgaagaggacatggaaacaaatcaagggcaagagaaaaattcctccaattttattgaacgaagacctcctgagactaaaaacagaaccaatgatgtggatttctccacttccagtttttcaagaagtaaggtaaatgcaggaatgggtaatagtggtatcaccacagaaccagactctgaaattcagattgctaatgttacaactttagaaacaggtgtaagctctgtgaatgatggccaattagaaaatactgacgggcgagatatgaacttaatgattacacatgtaacatcactgcagaataccaacttgggagatgtctctaacggactgcagtcaagtaattttggtgttaatatacaaacatacaccccatctttaacttcacagaccaagactggagtaggaccttttaatcctggtagaatgaatgtggcaggagacgtttttcagaatggagaatctgcaactcatcataatcctgattcttggatctcccagtcagcttcatttccccgtaatcagaaacaaccaggggtggactctttatcaccagtggcctcacttcctaaacagattttccagccgtctgtccaacagcagcctactaaaccagttaaagtcacttgtgcaaactgcaaaaaacctttacagaagggccagacagcttatcaacgaaaaggatcagctcacctcttttgttctaccacctgcctttcttccttctcccacaagcctgctccaaagaaactctgtgttatgtgtaaaaaagatataactacaatgaaaggaaccattgttgctcaagtggattcaagtgagtccttccaggaattctgtagtacatcttgtttatctctctatgaagacaaacagaatcctactaaaggagctctaaataaatcaagatgtacaatctgtggtaaactaactgagattcgccatgaagtcagctttaaaaatatgactcataagctgtgcagtgaccactgctttaatagatatagaatggccaatggtttaataatgaattgctgtgaacagtgtggagagtacttgcccagtaaaggtgctggaaataatgttctggtgattgatggtcaacagaaaagattttgctgtcaaagttgtgtcagtgaatacaaacaggtaggtagccatccaagcttcctgaaggaggttcgagatcacatgcaggactctttcttaatgcagcctgagaaatatggaaaactgacaacttgtactggttgccgaacacagtgcaggttttttgatatgactcagtgtataggtcctaatggatatatggagccatattgttcaactgcttgtatgaacagtcacaagacaaaatatgcaaaatcacaaagtttgggaattatttgccatttttgtaagcgaaactctttacctcaataccaagccacaatgcctgatggaaaactgtacaacttttgcaattccagttgtgtggctaaatttcaggctctaagtatgcagtcatctccaaatggccagtttgtagcgccaagtgatattcagttgaaatgcaactactgcaaaaattccttttgttcaaaaccagaaatcctggaatgggagaacaaagtgcatcagttctgcagcaaaacttgttcagatgactataagaagttgcattgcatagttacatattgcgaatactgtcaagaggagaagactcttcatgaaacagtaaatttctctggcgttaagagacctttctgtagtgaaggctgcaaattattatacaaacaggattttgccagacgtttaggattgagatgtgttacttgcaactattgttctcagctatgtaagaagggagcaactaaagaactcgatggtgttgtgagagatttctgcagtgaagattgctgtaaaaaatttcaggattggtactacaaggctgcaaggtgtgactgttgtaaatctcaaggaactcttaaagagcgagttcagtggcgtggggaaatgaaacatttctgtgatcaacattgcttactgcgtttctactgtcaacaaaatgagcccaacatgacaactcagaaaggacctgaaaacttacattatgatcagggttgtcagacatctcgaaccaaaatgacaggttcagcaccacccccttctccaacacctaacaaagagatgaagaacaaagcagttctttgcaaacctttaacaatgacaaaagctacttactgtaaacctcacatgcagaccaaatcttgtcagacagatgatacttggaggacagaatatgttccagtgcctatccctgtgcctgtgtatatcccagttcctatgcacatgtacagtcagaatattcctgttcctactacagttcctgttcctgtgccagttcctgtttttctgcctgctccattggacagcagtgagaagattcctgcagcaattgaggagctaaaaagcaaggtttcttcagatgctcttgatacagagttgcttacaatgacggatatgatgagtgaagacgaggggaaaacagagacaaccaacatcaacagtgtaattattgaaacagatataattggttcagaccttttgaagaactctgacccagagacacagtccagcatgcctgatgtaccatatgaaccagatttggatatcgaaatagattttcccagagctgctgaggagcttgatatggaaaatgaatttttattaccacctgtttttggcgaagaatatgaggaacagcccagacctcgatctaaaaaaaagggagccaagagaaaggctgtatcaggataccagtctcatgatgatagttctgacaattcagaatgcagctttcctttcaaatatacgtatggcgtaaatgcatggaaacactgggtcaaaactaggcaacttgatgaagatcttctggtattagatgagttaaaatcttctaaatcagtaaagttaaaagaggatctactctctcacaccacagctgagcttaactatgggttagctcattttgtcaatgagatccgacggccaaatggagagaattatgcacctgacagcatctattacctttgccttggaatacaggagtatttgtgtggaagtaatcgaaaagacaacatatttattgatcctggataccaaacatttgagcaagaattgaataaaatactgcgaagctggcaaccaagcatacttccagatgggtcaatattctctcgagttgaagaagactatctctggaggataaaacaactaggatcacactctccagtagctcttctgaatacactgttctactttaacactaagtattttggcctgaaaacagtggaacaacacttaagactttcctttggcactgtgtttaggcattggaaaaaaaatcctttaacgatggaaaacaaagcgtgtcttcgataccaagtgtcttccttgtgtggaacagataatgaaggtttatttcacttttattttttaagataaaattactactggaaaaagaaaacatgaagatgatgagccagtatttgaacaaattgaaaacacagccaatccttccagatgtcctgtgaaaatgtttgaatgctacttgtctaaaagtccacagaatcttaatcagaggatggatgttttttatttgcaaccagaatgctctagttctacagatagccctgtctggtatacgtctacttcactggaccgaaacaccttggaaaatatgcttgtacgggttcttctagtaaaagatatttatgataaagacaattatgaactggatgaagacacagactaaaaaggaacgttgcagaagcaatcgggataaaacagcattagatagtcatgctgctagatctttattatggaaaacatttcaagtttactccttctgttttgagttttgtagcagtgtacccacgctgggtattaccatgtaaataatctgtgagtgaaagttgccattattctatgtagtggttttaggatacttaacaaatacattcaaattctttttttattattatttatttgattaggtatgtttgtaactttttacattacagaatatgaatgagaatgtgccatgtataatttttttcttgtagtaagaaacatccatattgcacaactctactgttgcaaagcttccttggaagggggctcttttactgggttcttaaccagatggttgtgtatgggtagcactactaaaagtttagaacttgcagtgtctttcggaatttttaaaataaactgtaaactaataggctggggtttttgttttgttttggggttttgttttgtttggttttacattttagttactgaagccttacaaggttatgtagagagataccatcttctgtaccaaaaatagacaagagaatgctgtcaatattggtgtactgtaatgtgaatctatgctggtgaaaacaattttttgttccccttattaaaaccttagtgtccttttctcatttgtggctttctgcatcacccaatcaataaaaaacaaatatatatatgtatatatatgtatgtatgtgtgtgtgtatatatatatatatatatatatatataaatgattgtaagttgaaaacaagatcatcaagacatttcctttgtaaaaatgtctggtgaaagtataaaattctgttttcttctatgccagccataagtatctgaaatcctcttcatttatagaggtttgatttttatttctttttttccctcttaaggatacagatcatgctgcaatgttagctgtgtagtactctaaaacttagcaattttatcagaattcttgtgcctgtttacattggataaaattgtttttagaaattccactcctgaaatagttacagaaagtcaagctatgttaaataagataggatcacattttataatgaagattaccagtgtagtaattctgatattgcaaatgattgaggaacaaacaaagaaactaatagagaaagtcagtctcagaggaaatcccatttaatgttagattgtttggcttttgaaattacttcttatagaagattgcattaaaaaaaaaaacaactttgtgcttctgcatagcaatttatccattcagaccttttcttttagaataaggaaacttaaaatctactttctaaagactgaacaaagtgctagctgcaaattatcttgaaatcatttggctcttttctagcatgtgtgtaatcatgttttcttctgattcctgaatgaccatggtagcattagtgtttagaaattgttcaggggaaaattgagctattttccatagtggctagcaattgctacacatccttagatactcctctctcccataggataaatgttacagcacacaaaagaaattttctcaattctgatttggaaaatttcacaggtgtcattattgtatatctaagcaataattatctgaatgttttggcataaaaaattataatgttctaacttgttttataagttgaatgacttttcagtcccttgattttatattgttgagtgataatcagactgatagtagcaaatctgatcatacattactaaaatagattgctgattgtctatttaacgaagacaagtgggtaacatttaaaatatataatacaaaaattttctctaacttacctttttccagaactacttctttaagcacttttcctattaatgcctattgttgattaaaaggtggttaattctaaccatcttttagtcttcaaagtggtgctatattccatcaagagcaataaagtttttcccaggtgtcacttattgtatatgttaccaaataccatgaatttctgccatagtactactatcaagcaccttgtcttgctatttacagtttcttcatttgtatatttttagcttttctaagtggaaatgtctacataattttgatcttgacatgattgaggatttagagctcttgtctttgtcttgattgcaatccaacgatagattaacttgattctcagggggaaaagaaaaacttattttatgagaattgtttgttctgtgaaactcacttcacctagaacacatttcattgattcttggatcttagtttatgtggtcatagttgactgctgagaaaaggacaatgaaatgatagcaatttccttttgcttctaggtgatctctgattatagatagcatcctgtaaatataactttattgtcttgaaatgtttattgaagatgctatatttttctgttctgttttctgaagattttgccatttaaaatgatccagtgaaaaatatttatccacattgaagaaagtggatttcccatgcaaattgaatcttcattaacacattttaaaaggctttactgtattaggtaacatagatattaaaggatttttctaggcaagaagctcaactttttttttccataaaaataatttttgcttaaatagtaactcatggttttcttttattaaatggggttgttgtcagtatgttaaacattgaagtaggaggaggatgcatattgtactatgcattcaaatttatcactgttttttctgacagactttccctttgtcctttctagttatgacttgggaatggggtaacttctttatgcatagtattaagggttatagtatgaagaaatcataaaattgcaagttttggtttgcattactctaatgtgggttcatttaatctgagatcttaaatatcttgcagccttaaatcactacaaacatttgcatttttattatgccagttatttccaaaatgtattgttatacatgtcacttatgtttttaagctaatattgactgtaggataatctccttgttcccctcaaaatagtcatgaaagtgtacatgaaaatatttttaaagaataaatttctttaaattacaaaatttgga

SEQ ID NO: 320755 - DNA, 7119 bp, Homo sapiens
ctggtacggtcggaagtcctttggatggtcgttccgcggagccgcagccagaaccgggaccaagaatcgccttcagccctgtctggtgcatccttggcagaaagtgaggaggaaaacacccccattgttctttggcatggacacaagttcagtgggaggattagaattgactgatcagactcctgttttattagggagtacggccatggcaactagtctcacgaatgtaggaaactcatttagtggtccagctaatcctttagtgtctagatctaataagtttcagaactcgtcagtggaagatgatgatgatgttgtttttatcgaacctgtacaacctcccccaccttctgtaccagtggtagctgatcaaagaaccataacatttacatcatcaaaaaatgaagaactacaaggaaatgattccaaaattactccttcctcaaaagagttggcatctcagaagggaagtgtaagtgagacaattgtcattgatgatgaagaggacatggaaacaaatcaagggcaagagaaaaattcctccaattttattgaacgaagacctcctgagactaaaaacagaaccaatgatgtggatttctccacttccagtttttcaagaagtaagaccaagactggagtaggaccttttaatcctggtagaatgaatgtggcaggagacgtttttcagaatggagaatctgcaactcatcataatcctgattcttggatctcccagtcagcttcatttccccgtaatcagaaacaaccaggggtggactctttatcaccagtggcctcacttcctaaacagattttccagccgtctgtccaacagcagcctactaaaccagttaaagtcacttgtgcaaactgcaaaaaacctttacagaagggccagacagcttatcaacgaaaaggatcagctcacctcttttgttctaccacctgcctttcttccttctcccacaagcctgctccaaagaaactctgtgttatgtgtaaaaaagatataactacaatgaaaggaaccattgttgctcaagtggattcaagtgagtccttccaggaattctgtagtacatcttgtttatctctctatgaagacaaacagaatcctactaaaggagctctaaataaatcaagatgtacaatctgtggtaaactaactgagattcgccatgaagtcagctttaaaaatatgactcataagctgtgcagtgaccactgctttaatagatatagaatggccaatggtttaataatgaattgctgtgaacagtgtggagagtacttgcccagtaaaggtgctggaaataatgttctggtgattgatggtcaacagaaaagattttgctgtcaaagttgtgtcagtgaatacaaacaggtaggtagccatccaagcttcctgaaggaggttcgagatcacatgcaggactctttcttaatgcagcctgagaaatatggaaaactgacaacttgtactggttgccgaacacagtgcaggttttttgatatgactcagtgtataggtcctaatggatatatggagccatattgttcaactgcttgtatgaacagtcacaagacaaaatatgcaaaatcacaaagtttgggaattatttgccatttttgtaagcgaaactctttacctcaataccaagccacaatgcctgatggaaaactgtacaacttttgcaattccagttgtgtggctaaatttcaggctctaagtatgcagtcatctccaaatggccagtttgtagcgccaagtgatattcagttgaaatgcaactactgcaaaaattccttttgttcaaaaccagaaatcctggaatgggagaacaaagtgcatcagttctgcagcaaaacttgttcagatgactataagaagttgcattgcatagttacatattgcgaatactgtcaagaggagaagactcttcatgaaacagtaaatttctctggcgttaagagacctttctgtagtgaaggctgcaaattattatacaaacaggattttgccagacgtttaggattgagatgtgttacttgcaactattgttctcagctatgtaagaagggagcaactaaagaactcgatggtgttgtgagagatttctgcagtgaagattgctgtaaaaaatttcaggattggtactacaaggctgcaaggtgtgactgttgtaaatctcaaggaactcttaaagagcgagttcagtggcgtggggaaatgaaacatttctgtgatcaacattgcttactgcgtttctactgtcaacaaaatgagcccaacatgacaactcagaaaggacctgaaaacttacattatgatcagggttgtcagacatctcgaaccaaaatgacaggttcagcaccacccccttctccaacacctaacaaagagatgaagaacaaagcagttctttgcaaacctttaacaatgacaaaagctacttactgtaaacctcacatgcagaccaaatcttgtcagacagatgatacttggaggacagaatatgttccagtgcctatccctgtgcctgtgtatatcccagttcctatgcacatgtacagtcagaatattcctgttcctactacagttcctgttcctgtgccagttcctgtttttctgcctgctccattggacagcagtgagaagattcctgcagcaattgaggagctaaaaagcaaggtttcttcagatgctcttgatacagagttgcttacaatgacggatatgatgagtgaagacgaggggaaaacagagacaaccaacatcaacagtgtaattattgaaacagatataattggttcagaccttttgaagaactctgacccagagacacagtccagcatgcctgatgtaccatatgaaccagatttggatatcgaaatagattttcccagagctgctgaggagcttgatatggaaaatgaatttttattaccacctgtttttggcgaagaatatgaggaacagcccagacctcgatctaaaaaaaagggagccaagagaaaggctgtatcaggataccagtctcatgatgatagttctgacaattcagaatgcagctttcctttcaaatatacgtatggcgtaaatgcatggaaacactgggtcaaaactaggcaacttgatgaagatcttctggtattagatgagttaaaatcttctaaatcagtaaagttaaaagaggatctactctctcacaccacagctgagcttaactatgggttagctcattttgtcaatgagatccgacggccaaatggagagaattatgcacctgacagcatctattacctttgccttggaatacaggagtatttgtgtggaagtaatcgaaaagacaacatatttattgatcctggataccaaacatttgagcaagaattgaataaaatactgcgaagctggcaaccaagcatacttccagatgggtcaatattctctcgagttgaagaagactatctctggaggataaaacaactaggatcacactctccagtagctcttctgaatacactgttctactttaacactaagtattttggcctgaaaacagtggaacaacacttaagactttcctttggcactgtgtttaggcattggaaaaaaaatcctttaacgatggaaaacaaagcgtgtcttcgataccaagtgtcttccttgtgtggaacagataatgaagataaaattactactggaaaaagaaaacatgaagatgatgagccagtatttgaacaaattgaaaacacagccaatccttccagatgtcctgtgaaaatgtttgaatgctacttgtctaaaagtccacagaatcttaatcagaggatggatgttttttatttgcaaccagaatgctctagttctacagatagccctgtctggtatacgtctacttcactggaccgaaacaccttggaaaatatgcttgtacgggttcttctagtaaaagatatttatgataaagacaattatgaactggatgaagacacagactaaaaaggaacgttgcagaagcaatcgggataaaacagcattagatagtcatgctgctagatctttattatggaaaacatttcaagtttactccttctgttttgagttttgtagcagtgtacccacgctgggtattaccatgtaaataatctgtgagtgaaagttgccattattctatgtagtggttttaggatacttaacaaatacattcaaattctttttttattattatttatttgattaggtatgtttgtaactttttacattacagaatatgaatgagaatgtgccatgtataatttttttcttgtagtaagaaacatccatattgcacaactctactgttgcaaagcttccttggaagggggctcttttactgggttcttaaccagatggttgtgtatgggtagcactactaaaagtttagaacttgcagtgtctttcggaatttttaaaataaactgtaaactaataggctggggtttttgttttgttttggggttttgttttgtttggttttacattttagttactgaagccttacaaggttatgtagagagataccatcttctgtaccaaaaatagacaagagaatgctgtcaatattggtgtactgtaatgtgaatctatgctggtgaaaacaattttttgttccccttattaaaaccttagtgtccttttctcatttgtggctttctgcatcacccaatcaataaaaaacaaatatatatatgtatatatatgtatgtatgtgtgtgtgtatatatatatatatatatatatatataaatgattgtaagttgaaaacaagatcatcaagacatttcctttgtaaaaatgtctggtgaaagtataaaattctgttttcttctatgccagccataagtatctgaaatcctcttcatttatagaggtttgatttttatttctttttttccctcttaaggatacagatcatgctgcaatgttagctgtgtagtactctaaaacttagcaattttatcagaattcttgtgcctgtttacattggataaaattgtttttagaaattccactcctgaaatagttacagaaagtcaagctatgttaaataagataggatcacattttataatgaagattaccagtgtagtaattctgatattgcaaatgattgaggaacaaacaaagaaactaatagagaaagtcagtctcagaggaaatcccatttaatgttagattgtttggcttttgaaattacttcttatagaagattgcattaaaaaaaaaaacaactttgtgcttctgcatagcaatttatccattcagaccttttcttttagaataaggaaacttaaaatctactttctaaagactgaacaaagtgctagctgcaaattatcttgaaatcatttggctcttttctagcatgtgtgtaatcatgttttcttctgattcctgaatgaccatggtagcattagtgtttagaaattgttcaggggaaaattgagctattttccatagtggctagcaattgctacacatccttagatactcctctctcccataggataaatgttacagcacacaaaagaaattttctcaattctgatttggaaaatttcacaggtgtcattattgtatatctaagcaataattatctgaatgttttggcataaaaaattataatgttctaacttgttttataagttgaatgacttttcagtcccttgattttatattgttgagtgataatcagactgatagtagcaaatctgatcatacattactaaaatagattgctgattgtctatttaacgaagacaagtgggtaacatttaaaatatataatacaaaaattttctctaacttacctttttccagaactacttctttaagcacttttcctattaatgcctattgttgattaaaaggtggttaattctaaccatcttttagtcttcaaagtggtgctatattccatcaagagcaataaagtttttcccaggtgtcacttattgtatatgttaccaaataccatgaatttctgccatagtactactatcaagcaccttgtcttgctatttacagtttcttcatttgtatatttttagcttttctaagtggaaatgtctacataattttgatcttgacatgattgaggatttagagctcttgtctttgtcttgattgcaatccaacgatagattaacttgattctcagggggaaaagaaaaacttattttatgagaattgtttgttctgtgaaactcacttcacctagaacacatttcattgattcttggatcttagtttatgtggtcatagttgactgctgagaaaaggacaatgaaatgatagcaatttccttttgcttctaggtgatctctgattatagatagcatcctgtaaatataactttattgtcttgaaatgtttattgaagatgctatatttttctgttctgttttctgaagattttgccatttaaaatgatccagtgaaaaatatttatccacattgaagaaagtggatttcccatgcaaattgaatcttcattaacacattttaaaaggctttactgtattaggtaacatagatattaaaggatttttctaggcaagaagctcaactttttttttccataaaaataatttttgcttaaatagtaactcatggttttcttttattaaatggggttgttgtcagtatgttaaacattgaagtaggaggaggatgcatattgtactatgcattcaaatttatcactgttttttctgacagactttccctttgtcctttctagttatgacttgggaatggggtaacttctttatgcatagtattaagggttatagtatgaagaaatcataaaattgcaagttttggtttgcattactctaatgtgggttcatttaatctgagatcttaaatatcttgcagccttaaatcactacaaacatttgcatttttattatgccagttatttccaaaatgtattgttatacatgtcacttatgtttttaagctaatattgactgtaggataatctccttgttcccctcaaaatagtcatgaaagtgtacatgaaaatatttttaaagaataaatttctttaaattacaaaatttgga

SEQ ID NO: 320756 - DNA, 4568 bp, Homo sapiens
ctcctgtaaaatttataggattaaaagttttcatgtgcttgtgactaattatgaggtttatagtggtttacattttgagatagttatatatataatatgcccttttcttttgtgacattatacgtatttttttatattgcatttaaaattaaatgacttgcttttgccagattaaatacagataccattggggttttctgttttgattcctaatgataatatggattgatttcaggtgtaattattgaaacagatataattggttcagaccttttgaagaactctgacccagagacacagtccagcatgcctgatgtaccatatgaaccagatttggatatcgaaatagattttcccagagctgctgaggagcttgatatggaaaatgaatttttattaccacctgtttttggcgaagaatatgaggaacagcccagacctcgatctaaaaaaaagggagccaagagaaaggctgtatcaggataccagtctcatgatgatagttctgacaattcagaatgcagctttcctttcaaatatacgtatggcgtaaatgcatggaaacactgggtcaaaactaggcaacttgatgaagatcttctggtattagatgagttaaaatcttctaaatcagtaaagttaaaagaggatctactctctcacaccacagctgagcttaactatgggttagctcattttgtcaatgagatccgacggccaaatggagagaattatgcacctgacagcatctattacctttgccttggaatacaggagtatttgtgtggaagtaatcgaaaagacaacatatttattgatcctggataccaaacatttgagcaagaattgaataaaatactgcgaagctggcaaccaagcatacttccagatgggtcaatattctctcgagttgaagaagactatctctggaggataaaacaactaggatcacactctccagtagctcttctgaatacactgttctactttaacactaagtattttggcctgaaaacagtggaacaacacttaagactttcctttggcactgtgtttaggcattggaaaaaaaatcctttaacgatggaaaacaaagcgtgtcttcgataccaagtgtcttccttgtgtggaacagataatgaagataaaattactactggaaaaagaaaacatgaagatgatgagccagtatttgaacaaattgaaaacacagccaatccttccagatgtcctgtgaaaatgtttgaatgctacttgtctaaaagtccacagaatcttaatcagaggatggatgttttttatttgcaaccagaatgctctagttctacagatagccctgtctggtatacgtctacttcactggaccgaaacaccttggaaaatatgcttgtacgggttcttctagtaaaagatatttatgataaagacaattatgaactggatgaagacacagactaaaaaggaacgttgcagaagcaatcgggataaaacagcattagatagtcatgctgctagatctttattatggaaaacatttcaagtttactccttctgttttgagttttgtagcagtgtacccacgctgggtattaccatgtaaataatctgtgagtgaaagttgccattattctatgtagtggttttaggatacttaacaaatacattcaaattctttttttattattatttatttgattaggtatgtttgtaactttttacattacagaatatgaatgagaatgtgccatgtataatttttttcttgtagtaagaaacatccatattgcacaactctactgttgcaaagcttccttggaagggggctcttttactgggttcttaaccagatggttgtgtatgggtagcactactaaaagtttagaacttgcagtgtctttcggaatttttaaaataaactgtaaactaataggctggggtttttgttttgttttggggttttgttttgtttggttttacattttagttactgaagccttacaaggttatgtagagagataccatcttctgtaccaaaaatagacaagagaatgctgtcaatattggtgtactgtaatgtgaatctatgctggtgaaaacaattttttgttccccttattaaaaccttagtgtccttttctcatttgtggctttctgcatcacccaatcaataaaaaacaaatatatatatgtatatatatgtatgtatgtgtgtgtgtatatatatatatatatatatatatataaatgattgtaagttgaaaacaagatcatcaagacatttcctttgtaaaaatgtctggtgaaagtataaaattctgttttcttctatgccagccataagtatctgaaatcctcttcatttatagaggtttgatttttatttctttttttccctcttaaggatacagatcatgctgcaatgttagctgtgtagtactctaaaacttagcaattttatcagaattcttgtgcctgtttacattggataaaattgtttttagaaattccactcctgaaatagttacagaaagtcaagctatgttaaataagataggatcacattttataatgaagattaccagtgtagtaattctgatattgcaaatgattgaggaacaaacaaagaaactaatagagaaagtcagtctcagaggaaatcccatttaatgttagattgtttggcttttgaaattacttcttatagaagattgcattaaaaaaaaaaacaactttgtgcttctgcatagcaatttatccattcagaccttttcttttagaataaggaaacttaaaatctactttctaaagactgaacaaagtgctagctgcaaattatcttgaaatcatttggctcttttctagcatgtgtgtaatcatgttttcttctgattcctgaatgaccatggtagcattagtgtttagaaattgttcaggggaaaattgagctattttccatagtggctagcaattgctacacatccttagatactcctctctcccataggataaatgttacagcacacaaaagaaattttctcaattctgatttggaaaatttcacaggtgtcattattgtatatctaagcaataattatctgaatgttttggcataaaaaattataatgttctaacttgttttataagttgaatgacttttcagtcccttgattttatattgttgagtgataatcagactgatagtagcaaatctgatcatacattactaaaatagattgctgattgtctatttaacgaagacaagtgggtaacatttaaaatatataatacaaaaattttctctaacttacctttttccagaactacttctttaagcacttttcctattaatgcctattgttgattaaaaggtggttaattctaaccatcttttagtcttcaaagtggtgctatattccatcaagagcaataaagtttttcccaggtgtcacttattgtatatgttaccaaataccatgaatttctgccatagtactactatcaagcaccttgtcttgctatttacagtttcttcatttgtatatttttagcttttctaagtggaaatgtctacataattttgatcttgacatgattgaggatttagagctcttgtctttgtcttgattgcaatccaacgatagattaacttgattctcagggggaaaagaaaaacttattttatgagaattgtttgttctgtgaaactcacttcacctagaacacatttcattgattcttggatcttagtttatgtggtcatagttgactgctgagaaaaggacaatgaaatgatagcaatttccttttgcttctaggtgatctctgattatagatagcatcctgtaaatataactttattgtcttgaaatgtttattgaagatgctatatttttctgttctgttttctgaagattttgccatttaaaatgatccagtgaaaaatatttatccacattgaagaaagtggatttcccatgcaaattgaatcttcattaacacattttaaaaggctttactgtattaggtaacatagatattaaaggatttttctaggcaagaagctcaactttttttttccataaaaataatttttgcttaaatagtaactcatggttttcttttattaaatggggttgttgtcagtatgttaaacattgaagtaggaggaggatgcatattgtactatgcattcaaatttatcactgttttttctgacagactttccctttgtcctttctagttatgacttgggaatggggtaacttctttatgcatagtattaagggttatagtatgaagaaatcataaaattgcaagttttggtttgcattactctaatgtgggttcatttaatctgagatcttaaatatcttgcagccttaaatcactacaaacatttgcatttttattatgccagttatttccaaaatgtattgttatacatgtcacttatgtttttaagctaatattgactgtaggataatctccttgttcccctcaaaatagtcatgaaagtgtacatgaaaatatttttaaagaataaatttctttaaattacaaaatttgga

SEQ ID NO: 320757 - DNA, 3724 bp, Homo sapiens
tcgcctgaggatccccgtacagcagctatccaagcatacttccagatgggtcaatattctctcgagttgaagaagactatctctggaggataaaacaactaggatcacactctccagtagctcttctgaatacactgttctactttaacactaagtattttggcctgaaaacagtggaacaacacttaagactttcctttggcactgtgtttaggcattggaaaaaaaatcctttaacgatggaaaacaaagcgtgtcttcgataccaagtgtcttccttgtgtggaacagataatgaagataaaattactactggaaaaagaaaacatgaagatgatgagccagtatttgaacaaattgaaaacacagccaatccttccagatgtcctgtgaaaatgtttgaatgctacttgtctaaaagtccacagaatcttaatcagaggatggatgttttttatttgcaaccagaatgctctagttctacagatagccctgtctggtatacgtctacttcactggaccgaaacaccttggaaaatatgcttgtacgggttcttctagtaaaagatatttatgataaagacaattatgaactggatgaagacacagactaaaaaggaacgttgcagaagcaatcgggataaaacagcattagatagtcatgctgctagatctttattatggaaaacatttcaagtttactccttctgttttgagttttgtagcagtgtacccacgctgggtattaccatgtaaataatctgtgagtgaaagttgccattattctatgtagtggttttaggatacttaacaaatacattcaaattctttttttattattatttatttgattaggtatgtttgtaactttttacattacagaatatgaatgagaatgtgccatgtataatttttttcttgtagtaagaaacatccatattgcacaactctactgttgcaaagcttccttggaagggggctcttttactgggttcttaaccagatggttgtgtatgggtagcactactaaaagtttagaacttgcagtgtctttcggaatttttaaaataaactgtaaactaataggctggggtttttgttttgttttggggttttgttttgtttggttttacattttagttactgaagccttacaaggttatgtagagagataccatcttctgtaccaaaaatagacaagagaatgctgtcaatattggtgtactgtaatgtgaatctatgctggtgaaaacaattttttgttccccttattaaaaccttagtgtccttttctcatttgtggctttctgcatcacccaatcaataaaaaacaaatatatatatgtatatatatgtatgtatgtgtgtgtgtatatatatatatatatatatatatataaatgattgtaagttgaaaacaagatcatcaagacatttcctttgtaaaaatgtctggtgaaagtataaaattctgttttcttctatgccagccataagtatctgaaatcctcttcatttatagaggtttgatttttatttctttttttccctcttaaggatacagatcatgctgcaatgttagctgtgtagtactctaaaacttagcaattttatcagaattcttgtgcctgtttacattggataaaattgtttttagaaattccactcctgaaatagttacagaaagtcaagctatgttaaataagataggatcacattttataatgaagattaccagtgtagtaattctgatattgcaaatgattgaggaacaaacaaagaaactaatagagaaagtcagtctcagaggaaatcccatttaatgttagattgtttggcttttgaaattacttcttatagaagattgcattaaaaaaaaaaacaactttgtgcttctgcatagcaatttatccattcagaccttttcttttagaataaggaaacttaaaatctactttctaaagactgaacaaagtgctagctgcaaattatcttgaaatcatttggctcttttctagcatgtgtgtaatcatgttttcttctgattcctgaatgaccatggtagcattagtgtttagaaattgttcaggggaaaattgagctattttccatagtggctagcaattgctacacatccttagatactcctctctcccataggataaatgttacagcacacaaaagaaattttctcaattctgatttggaaaatttcacaggtgtcattattgtatatctaagcaataattatctgaatgttttggcataaaaaattataatgttctaacttgttttataagttgaatgacttttcagtcccttgattttatattgttgagtgataatcagactgatagtagcaaatctgatcatacattactaaaatagattgctgattgtctatttaacgaagacaagtgggtaacatttaaaatatataatacaaaaattttctctaacttacctttttccagaactacttctttaagcacttttcctattaatgcctattgttgattaaaaggtggttaattctaaccatcttttagtcttcaaagtggtgctatattccatcaagagcaataaagtttttcccaggtgtcacttattgtatatgttaccaaataccatgaatttctgccatagtactactatcaagcaccttgtcttgctatttacagtttcttcatttgtatatttttagcttttctaagtggaaatgtctacataattttgatcttgacatgattgaggatttagagctcttgtctttgtcttgattgcaatccaacgatagattaacttgattctcagggggaaaagaaaaacttattttatgagaattgtttgttctgtgaaactcacttcacctagaacacatttcattgattcttggatcttagtttatgtggtcatagttgactgctgagaaaaggacaatgaaatgatagcaatttccttttgcttctaggtgatctctgattatagatagcatcctgtaaatataactttattgtcttgaaatgtttattgaagatgctatatttttctgttctgttttctgaagattttgccatttaaaatgatccagtgaaaaatatttatccacattgaagaaagtggatttcccatgcaaattgaatcttcattaacacattttaaaaggctttactgtattaggtaacatagatattaaaggatttttctaggcaagaagctcaactttttttttccataaaaataatttttgcttaaatagtaactcatggttttcttttattaaatggggttgttgtcagtatgttaaacattgaagtaggaggaggatgcatattgtactatgcattcaaatttatcactgttttttctgacagactttccctttgtcctttctagttatgacttgggaatggggtaacttctttatgcatagtattaagggttatagtatgaagaaatcataaaattgcaagttttggtttgcattactctaatgtgggttcatttaatctgagatcttaaatatcttgcagccttaaatcactacaaacatttgcatttttattatgccagttatttccaaaatgtattgttatacatgtcacttatgtttttaagctaatattgactgtaggataatctccttgttcccctcaaaatagtcatgaaagtgtacatgaaaatatttttaaagaataaatttctttaaattacaaaatttgga

SEQ ID NO: 320758 - DNA, 3814 bp, Homo sapiens
tggtgaggctggtctcgaactcccgacctcaggtgatctgcccacctcagcctcccaaagtgctgggattacaggcgtgagccaccacgcatggcccagatttctattttgggattgtctatggtagggatatccaaaccttgccttactaaagaccacctgggtcacttgttaagaacctaaggactgtcagttttataaaataagacaacctatgtcttaagatgtctcagttccttttgtttgaaaaattgtacattaccagaagccataacttaaaactccaaggggcacctggtcctattctttggtataacagacactaggagtgatgtttatatctttcttcaagattagtttaggaggtttatttcacttttattttttaagataaaattactactggaaaaagaaaacatgaagatgatgagccagtatttgaacaaattgaaaacacagccaatccttccagatgtcctgtgaaaatgtttgaatgctacttgtctaaaagtccacagaatcttaatcagaggatggatgttttttatttgcaaccagaatgctctagttctacagatagccctgtctggtatacgtctacttcactggaccgaaacaccttggaaaatatgcttgtacgggttcttctagtaaaagatatttatgataaagacaattatgaactggatgaagacacagactaaaaaggaacgttgcagaagcaatcgggataaaacagcattagatagtcatgctgctagatctttattatggaaaacatttcaagtttactccttctgttttgagttttgtagcagtgtacccacgctgggtattaccatgtaaataatctgtgagtgaaagttgccattattctatgtagtggttttaggatacttaacaaatacattcaaattctttttttattattatttatttgattaggtatgtttgtaactttttacattacagaatatgaatgagaatgtgccatgtataatttttttcttgtagtaagaaacatccatattgcacaactctactgttgcaaagcttccttggaagggggctcttttactgggttcttaaccagatggttgtgtatgggtagcactactaaaagtttagaacttgcagtgtctttcggaatttttaaaataaactgtaaactaataggctggggtttttgttttgttttggggttttgttttgtttggttttacattttagttactgaagccttacaaggttatgtagagagataccatcttctgtaccaaaaatagacaagagaatgctgtcaatattggtgtactgtaatgtgaatctatgctggtgaaaacaattttttgttccccttattaaaaccttagtgtccttttctcatttgtggctttctgcatcacccaatcaataaaaaacaaatatatatatgtatatatatgtatgtatgtgtgtgtgtatatatatatatatatatatatatataaatgattgtaagttgaaaacaagatcatcaagacatttcctttgtaaaaatgtctggtgaaagtataaaattctgttttcttctatgccagccataagtatctgaaatcctcttcatttatagaggtttgatttttatttctttttttccctcttaaggatacagatcatgctgcaatgttagctgtgtagtactctaaaacttagcaattttatcagaattcttgtgcctgtttacattggataaaattgtttttagaaattccactcctgaaatagttacagaaagtcaagctatgttaaataagataggatcacattttataatgaagattaccagtgtagtaattctgatattgcaaatgattgaggaacaaacaaagaaactaatagagaaagtcagtctcagaggaaatcccatttaatgttagattgtttggcttttgaaattacttcttatagaagattgcattaaaaaaaaaaacaactttgtgcttctgcatagcaatttatccattcagaccttttcttttagaataaggaaacttaaaatctactttctaaagactgaacaaagtgctagctgcaaattatcttgaaatcatttggctcttttctagcatgtgtgtaatcatgttttcttctgattcctgaatgaccatggtagcattagtgtttagaaattgttcaggggaaaattgagctattttccatagtggctagcaattgctacacatccttagatactcctctctcccataggataaatgttacagcacacaaaagaaattttctcaattctgatttggaaaatttcacaggtgtcattattgtatatctaagcaataattatctgaatgttttggcataaaaaattataatgttctaacttgttttataagttgaatgacttttcagtcccttgattttatattgttgagtgataatcagactgatagtagcaaatctgatcatacattactaaaatagattgctgattgtctatttaacgaagacaagtgggtaacatttaaaatatataatacaaaaattttctctaacttacctttttccagaactacttctttaagcacttttcctattaatgcctattgttgattaaaaggtggttaattctaaccatcttttagtcttcaaagtggtgctatattccatcaagagcaataaagtttttcccaggtgtcacttattgtatatgttaccaaataccatgaatttctgccatagtactactatcaagcaccttgtcttgctatttacagtttcttcatttgtatatttttagcttttctaagtggaaatgtctacataattttgatcttgacatgattgaggatttagagctcttgtctttgtcttgattgcaatccaacgatagattaacttgattctcagggggaaaagaaaaacttattttatgagaattgtttgttctgtgaaactcacttcacctagaacacatttcattgattcttggatcttagtttatgtggtcatagttgactgctgagaaaaggacaatgaaatgatagcaatttccttttgcttctaggtgatctctgattatagatagcatcctgtaaatataactttattgtcttgaaatgtttattgaagatgctatatttttctgttctgttttctgaagattttgccatttaaaatgatccagtgaaaaatatttatccacattgaagaaagtggatttcccatgcaaattgaatcttcattaacacattttaaaaggctttactgtattaggtaacatagatattaaaggatttttctaggcaagaagctcaactttttttttccataaaaataatttttgcttaaatagtaactcatggttttcttttattaaatggggttgttgtcagtatgttaaacattgaagtaggaggaggatgcatattgtactatgcattcaaatttatcactgttttttctgacagactttccctttgtcctttctagttatgacttgggaatggggtaacttctttatgcatagtattaagggttatagtatgaagaaatcataaaattgcaagttttggtttgcattactctaatgtgggttcatttaatctgagatcttaaatatcttgcagccttaaatcactacaaacatttgcatttttattatgccagttatttccaaaatgtattgttatacatgtcacttatgtttttaagctaatattgactgtaggataatctccttgttcccctcaaaatagtcatgaaagtgtacatgaaaatatttttaaagaataaatttctttaaattacaaaatttgga

SEQ ID NO: 320759 - DNA, 4193 bp, Homo sapiens
agcgggcgggggggcggggcctccccgggctcggccgcgccgccgcctcctccgcctcctcctcctcaccagcgctaaagccgggactggaccgagcggagttgtgcgtgtcgccgaaggggggtgggccgggggaggggaggttcgttccgcggagccgcagccagaaccgggaccaagaatcgccttcagccctgtctggtgcatccttggcagaaagtgaggaggaaaacacccccattgttctttggcatggacacaagttcagtgggaggattagaattgactgatcagactcctgttttattagggagtacggccatggcaactagtctcacgaatgtaggaaactcatttagtggtccagctaatcctttagtgtctagatctaataagtttcagaactcgtcagtggaagatgatgatgatgttgtttttatcgaacctgtacaacctcccccaccttctgtaccagtggtagctgatcaaagaaccataacatttacatcatcaaaaaatgaagaactacaaggaaatgattccaaaattactccttcctcaaaagagttggcatctcagaagggaagtgtaagtgagacaattgtcattgatgatgaagaggacatggaaacaaatcaagggcaagagaaaaattcctccaattttattgaacgaagacctcctgagactaaaaacagaaccaatgatgtggatttctccacttccagtttttcaagaagtaaggtaaatgcaggaatgggtaatagtggtatcaccacagaaccagactctgaaattcagattgctaatgttacaactttagaaacaggtgtaagctctgtgaatgatggccaattagaaaatactgacgggcgagatatgaacttaatgattacacatgtaacatcactgcagaataccaacttgggagatgtctctaacggactgcagtcaagtaattttggtgttaatatacaaacatacaccccatctttaacttcacagaccaagactggagtaggaccttttaatcctggtagaatgaatgtggcaggagacgtttttcagaatggagaatctgcaactcatcataatcctgattcttggatctcccagtcagcttcatttccccgtaatcagaaacaaccaggggtggactctttatcaccagtggcctcacttcctaaacagattttccagccgtctgtccaacagcagcctactaaaccagttaaagtcacttgtgcaaactgcaaaaaacctttacagaagggccagacagcttatcaacgaaaaggatcagctcacctcttttgttctaccacctgcctttcttccttctcccacaagcctgctccaaagaaactctgtgttatgtgtaaaaaagatataactacaatgaaaggaaccattgttgctcaagtggattcaagtgagtccttccaggaattctgtagtacatcttgtttatctctctatgaagacaaacagaatcctactaaaggagctctaaataaatcaagatgtacaatctgtggtaaactaactgagattcgccatgaagtcagctttaaaaatatgactcataagctgtgcagtgaccactgctttaatagatatagaatggccaatggtttaataatgaattgctgtgaacagtgtggagagtacttgcccagtaaaggtgctggaaataatgttctggtgattgatggtcaacagaaaagattttgctgtcaaagttgtgtcagtgaatacaaacaggtaggtagccatccaagcttcctgaaggaggttcgagatcacatgcaggactctttcttaatgcagcctgagaaatatggaaaactgacaacttgtactggttgccgaacacagtgcaggttttttgatatgactcagtgtataggtcctaatggatatatggagccatattgttcaactgcttgtatgaacagtcacaagacaaaatatgcaaaatcacaaagtttgggaattatttgccatttttgtaagcgaaactctttacctcaataccaagccacaatgcctgatggaaaactgtacaacttttgcaattccagttgtgtggctaaatttcaggctctaagtatgcagtcatctccaaatggccagtttgtagcgccaagtgatattcagttgaaatgcaactactgcaaaaattccttttgttcaaaaccagaaatcctggaatgggagaacaaagtgcatcagttctgcagcaaaacttgttcagatgactataagaagttgcattgcatagttacatattgcgaatactgtcaagaggagaagactcttcatgaaacagtaaatttctctggcgttaagagacctttctgtagtgaaggctgcaaattattatacaaacaggattttgccagacgtttaggattgagatgtgttacttgcaactattgttctcagctatgtaagaagggagcaactaaagaactcgatggtgttgtgagagatttctgcagtgaagattgctgtaaaaaatttcaggattggtactacaaggctgcaaggtgtgactgttgtaaatctcaaggaactcttaaagagcgagttcagtggcgtggggaaatgaaacatttctgtgatcaacattgcttactgcgtttctactgtcaacaaaatgagcccaacatgacaactcagaaaggacctgaaaacttacattatgatcagggttgtcagacatctcgaaccaaaatgacaggttcagcaccacccccttctccaacacctaacaaagagatgaagaacaaagcagttctttgcaaacctttaacaatgacaaaagctacttactgtaaacctcacatgcagaccaaatcttgtcagacagatgatacttggaggacagaatatgttccagtgcctatccctgtgcctgtgtatatcccagttcctatgcacatgtacagtcagaatattcctgttcctactacagttcctgttcctgtgccagttcctgtttttctgcctgctccattggacagcagtgagaagattcctgcagcaattgaggagctaaaaagcaaggtttcttcagatgctcttgatacagagttgcttacaatgacggatatgatgagtgaagacgaggggaaaacagagacaaccaacatcaacagtgtaattattgaaacagatataattggttcagaccttttgaagaactctgacccagagacacagtccagcatgcctgatgtaccatatgaaccagatttggatatcgaaatagattttcccagagctgctgaggagcttgatatggaaaatgaatttttattaccacctgtttttggcgaagaatatgaggaacagcccagacctcgatctaaaaaaaagggagccaagagaaaggctgtatcaggataccagtctcatgatgatagttctgacaattcagaatgcagctttcctttcaaatatacgtatggcgtaaatgcatggaaacactgggtcaaaactaggcaacttgatgaagatcttctggtattagatgagttaaaatcttctaaatcagtaaagttaaaagaggatctactctctcacaccacagctgagcttaactatgggttagctcattttgtcaatgagatccgacggccaaatggagagaattatgcacctgacagcatctattacctttgccttggaatacaggagtatttgtgtggaagtaatcgaaaagacaacatatttattgatcctggataccaaacatttgagcaagaattgaataaaatactgcgaagctggcaaccaagcatacttccagatgggtcaatattctctcgagttgaagaagactatctctggaggataaaacaactaggatcacactctccagtagctcttctgaatacactgttctactttaacactaagtattttggcctgaaaacagtggaacaacacttaagactttcctttggcactgtgtttaggcattggaaaaaaaatcctttaacgatggaaaacaaagcgtgtcttcgataccaagtgtcttccttgtgtggaacagataatgaagggtagtgtaacagatttctatttttatttttatttttaaattttttttgagacagagttttcactcttgttgcccaggctgggagtgcagtggtgcagtctcggctcaccgcaacctctac

SEQ ID NO: 320760 - DNA, 4170 bp, Homo sapiens
agcgggcgggggggcggggcctccccgggctcggccgcgccgccgcctcctccgcctcctcctcctcaccagcgctaaagccgggactggaccgagcggagttgtgcgtgtcgccgaaggggggtgggccgggggaggggaggttcgttccgcggagccgcagccagaaccgggaccaagaatcgccttcagccctgtctggtgcatccttggcagaaagtgaggaggaaaacacccccattgttctttggcatggacacaagttcagtgggaggattagaattgactgatcagactcctgttttattagggagtacggccatggcaactagtctcacgaatgtaggaaactcatttagtggtccagctaatcctttagtgtctagatctaataagtttcagaactcgtcagtggaagatgatgatgatgttgtttttatcgaacctgtacaacctcccccaccttctgtaccagtggtagctgatcaaagaaccataacatttacatcatcaaaaaatgaagaactacaaggaaatgattccaaaattactccttcctcaaaagagttggcatctcagaagggaagtgtaagtgagacaattgtcattgatgatgaagaggacatggaaacaaatcaagggcaagagaaaaattcctccaattttattgaacgaagacctcctgagactaaaaacagaaccaatgatgtggatttctccacttccagtttttcaagaagtaaggtaaatgcaggaatgggtaatagtggtatcaccacagaaccagactctgaaattcagattgctaatgttacaactttagaaacaggtgtaagctctgtgaatgatggccaattagaaaatactgacgggcgagatatgaacttaatgattacacatgtaacatcactgcagaataccaacttgggagatgtctctaacggactgcagtcaagtaattttggtgttaatatacaaacatacaccccatctttaacttcacagaccaagactggagtaggaccttttaatcctggtagaatgaatgtggcaggagacgtttttcagaatggagaatctgcaactcatcataatcctgattcttggatctcccagtcagcttcatttccccgtaatcagaaacaaccaggggtggactctttatcaccagtggcctcacttcctaaacagattttccagccgtctgtccaacagcagcctactaaaccagttaaagtcacttgtgcaaactgcaaaaaacctttacagaagggccagacagcttatcaacgaaaaggatcagctcacctcttttgttctaccacctgcctttcttccttctcccacaagcctgctccaaagaaactctgtgttatgtgtaaaaaagatataactacaatgaaaggaaccattgttgctcaagtggattcaagtgagtccttccaggaattctgtagtacatcttgtttatctctctatgaagacaaacagaatcctactaaaggagctctaaataaatcaagatgtacaatctgtggtaaactaactgagattcgccatgaagtcagctttaaaaatatgactcataagctgtgcagtgaccactgctttaatagatatagaatggccaatggtttaataatgaattgctgtgaacagtgtggagagtacttgcccagtaaaggtgctggaaataatgttctggtgattgatggtcaacagaaaagattttgctgtcaaagttgtgtcagtgaatacaaacaggtaggtagccatccaagcttcctgaaggaggttcgagatcacatgcaggactctttcttaatgcagcctgagaaatatggaaaactgacaacttgtactggttgccgaacacagtgcaggttttttgatatgactcagtgtataggtcctaatggatatatggagccatattgttcaactgcttgtatgaacagtcacaagacaaaatatgcaaaatcacaaagtttgggaattatttgccatttttgtaagcgaaactctttacctcaataccaagccacaatgcctgatggaaaactgtacaacttttgcaattccagttgtgtggctaaatttcaggctctaagtatgcagtcatctccaaatggccagtttgtagcgccaagtgatattcagttgaaatgcaactactgcaaaaattccttttgttcaaaaccagaaatcctggaatgggagaacaaagtgcatcagttctgcagcaaaacttgttcagatgactataagaagttgcattgcatagttacatattgcgaatactgtcaagaggagaagactcttcatgaaacagtaaatttctctggcgttaagagacctttctgtagtgaaggctgcaaattattatacaaacaggattttgccagacgtttaggattgagatgtgttacttgcaactattgttctcagctatgtaagaagggagcaactaaagaactcgatggtgttgtgagagatttctgcagtgaagattgctgtaaaaaatttcaggattggtactacaaggctgcaaggtgtgactgttgtaaatctcaaggaactcttaaagagcgagttcagtggcgtggggaaatgaaacatttctgtgatcaacattgcttactgcgtttctactgtcaacaaaatgagcccaacatgacaactcagaaaggacctgaaaacttacattatgatcagggttgtcagacatctcgaaccaaaatgacaggttcagcaccacccccttctccaacacctaacaaagagatgaagaacaaagcagttctttgcaaacctttaacaatgacaaaagctacttactgtaaacctcacatgcagaccaaatcttgtcagacagatgatacttggaggacagaatatgttccagtgcctatccctgtgcctgtgtatatcccagttcctatgcacatgtacagtcagaatattcctgttcctactacagttcctgttcctgtgccagttcctgtttttctgcctgctccattggacagcagtgagaagattcctgcagcaattgaggagctaaaaagcaaggtttcttcagatgctcttgatacagagttgcttacaatgacggatatgatgagtgaagacgaggggaaaacagagacaaccaacatcaacagtgtaattattgaaacagatataattggttcagaccttttgaagaactctgacccagagacacagtccagcatgcctgatgtaccatatgaaccagatttggatatcgaaatagattttcccagagctgctgaggagcttgatatggaaaatgaatttttattaccacctgtttttggcgaagaatatgaggaacagcccagacctcgatctaaaaaaaagggagccaagagaaaggctgtatcaggataccagtctcatgatgatagttctgacaattcagaatgcagctttcctttcaaatatacgtatggcgtaaatgcatggaaacactgggtcaaaactaggcaacttgatgaagatcttctggtattagatgagttaaaatcttctaaatcagtaaagttaaaagaggatctactctctcacaccacagctgagcttaactatgggttagctcattttgtcaatgagatccgacggccaaatggagagaattatgcacctgacagcatctattacctttgccttggaatacaggagtatttgtgtggaagtaatcgaaaagacaacatatttattgatcctggataccaaacatttgagcaagaattgaataaaatactgcgaagctggcaaccaagcatacttccagatgggtcaatattctctcgagttgaagaagactatctctggaggataaaacaactaggatcacactctccagtagctcttctgaatacactgttctactttaacactaagtattttggcctgaaaacagtggaacaacacttaagactttcctttggcactgtgtttaggcattggaaaaaaaatcctttaacgatggaaaacaaagcgtgtcttcgataccaagtgtcttccttgtgtggaacagataatgaagtggagataaattacactggtcagatgtctgtgaaatgtttgaatgcacttgtctgtcacagatcttaataagggtggatgttttatttgccagtgtct

SEQ ID NO: 320761 - DNA, 2930 bp, Homo sapiens
gagtatccccgcctctctaacattattcaaattctttttttattattatttatttgattaggtatgtttgtaactttttacattacagaatatgaatgagaatgtgccatgtataatttttttcttgtagtaagaaacatccatattgcacaactctactgttgcaaagcttccttggaagggggctcttttactgggttcttaaccagatggttgtgtatgggtagcactactaaaagtttagaacttgcagtgtctttcggaatttttaaaataaactgtaaactaataggctggggtttttgttttgttttggggttttgttttgtttggttttacattttagttactgaagccttacaaggttatgtagagagataccatcttctgtaccaaaaatagacaagagaatgctgtcaatattggtgtactgtaatgtgaatctatgctggtgaaaacaattttttgttccccttattaaaaccttagtgtccttttctcatttgtggctttctgcatcacccaatcaataaaaaacaaatatatatatgtatatatatgtatgtatgtgtgtgtgtatatatatatatatatatatatatataaatgattgtaagttgaaaacaagatcatcaagacatttcctttgtaaaaatgtctggtgaaagtataaaattctgttttcttctatgccagccataagtatctgaaatcctcttcatttatagaggtttgatttttatttctttttttccctcttaaggatacagatcatgctgcaatgttagctgtgtagtactctaaaacttagcaattttatcagaattcttgtgcctgtttacattggataaaattgtttttagaaattccactcctgaaatagttacagaaagtcaagctatgttaaataagataggatcacattttataatgaagattaccagtgtagtaattctgatattgcaaatgattgaggaacaaacaaagaaactaatagagaaagtcagtctcagaggaaatcccatttaatgttagattgtttggcttttgaaattacttcttatagaagattgcattaaaaaaaaaaacaactttgtgcttctgcatagcaatttatccattcagaccttttcttttagaataaggaaacttaaaatctactttctaaagactgaacaaagtgctagctgcaaattatcttgaaatcatttggctcttttctagcatgtgtgtaatcatgttttcttctgattcctgaatgaccatggtagcattagtgtttagaaattgttcaggggaaaattgagctattttccatagtggctagcaattgctacacatccttagatactcctctctcccataggataaatgttacagcacacaaaagaaattttctcaattctgatttggaaaatttcacaggtgtcattattgtatatctaagcaataattatctgaatgttttggcataaaaaattataatgttctaacttgttttataagttgaatgacttttcagtcccttgattttatattgttgagtgataatcagactgatagtagcaaatctgatcatacattactaaaatagattgctgattgtctatttaacgaagacaagtgggtaacatttaaaatatataatacaaaaattttctctaacttacctttttccagaactacttctttaagcacttttcctattaatgcctattgttgattaaaaggtggttaattctaaccatcttttagtcttcaaagtggtgctatattccatcaagagcaataaagtttttcccaggtgtcacttattgtatatgttaccaaataccatgaatttctgccatagtactactatcaagcaccttgtcttgctatttacagtttcttcatttgtatatttttagcttttctaagtggaaatgtctacataattttgatcttgacatgattgaggatttagagctcttgtctttgtcttgattgcaatccaacgatagattaacttgattctcagggggaaaagaaaaacttattttatgagaattgtttgttctgtgaaactcacttcacctagaacacatttcattgattcttggatcttagtttatgtggtcatagttgactgctgagaaaaggacaatgaaatgatagcaatttccttttgcttctaggtgatctctgattatagatagcatcctgtaaatataactttattgtcttgaaatgtttattgaagatgctatatttttctgttctgttttctgaagattttgccatttaaaatgatccagtgaaaaatatttatccacattgaagaaagtggatttcccatgcaaattgaatcttcattaacacattttaaaaggctttactgtattaggtaacatagatattaaaggatttttctaggcaagaagctcaactttttttttccataaaaataatttttgcttaaatagtaactcatggttttcttttattaaatggggttgttgtcagtatgttaaacattgaagtaggaggaggatgcatattgtactatgcattcaaatttatcactgttttttctgacagactttccctttgtcctttctagttatgacttgggaatggggtaacttctttatgcatagtattaagggttatagtatgaagaaatcataaaattgcaagttttggtttgcattactctaatgtgggttcatttaatctgagatcttaaatatcttgcagccttaaatcactacaaacatttgcatttttattatgccagttatttccaaaatgtattgttatacatgtcacttatgtttttaagctaatattgactgtaggataatctccttgttcccctcaaaatagtcatgaaagtgtacatgaaaatatttttaaagaataaatttctttaaattacaaaatttgga

SEQ ID NO: 320762 - DNA, 3966 bp, Homo sapiens
agcgggcgggggggcggggcctccccgggctcggccgcgccgccgcctcctccgcctcctcctcctcaccagcgctaaagccgggactggaccgagcggagttgtgcgtgtcgccgaaggggggtgggccgggggaggggaggttcgttccgcggagccgcagccagaaccgggaccaagaatcgccttcagccctgtctggtgcatccttggcagaaagtgaggaggaaaacacccccattgttctttggcatggacacaagttcagtgggaggattagaattgactgatcagactcctgttttattagggagtacggccatggcaactagtctcacgaatgtaggaaactcatttagtggtccagctaatcctttagtgtctagatctaataagtttcagaactcgtcagtggaagatgatgatgatgttgtttttatcgaacctgtacaacctcccccaccttctgtaccagtggtagctgatcaaagaaccataacatttacatcatcaaaaaatgaagaactacaaggaaatgattccaaaattactccttcctcaaaagagttggcatctcagaagggaagtgtaagtgagacaattgtcattgatgatgaagaggacatggaaacaaatcaagggcaagagaaaaattcctccaattttattgaacgaagacctcctgagactaaaaacagaaccaatgatgtggatttctccacttccagtttttcaagaagtaaggtaaatgcaggaatgggtaatagtggtatcaccacagaaccagactctgaaattcagattgctaatgttacaactttagaaacaggtgtaagctctgtgaatgatggccaattagaaaatactgacgggcgagatatgaacttaatgattacacatgtaacatcactgcagaataccaacttgggagatgtctctaacggactgcagtcaagtaattttggtgttaatatacaaacatacaccccatctttaacttcacagaccaagactggagtaggaccttttaatcctggtagaatgaatgtggcaggagacgtttttcagaatggagaatctgcaactcatcataatcctgattcttggatctcccagtcagcttcatttccccgtaatcagaaacaaccaggggtggactctttatcaccagtggcctcacttcctaaacagattttccagccgtctgtccaacagcagcctactaaaccagttaaagtcacttgtgcaaactgcaaaaaacctttacagaagggccagacagcttatcaacgaaaaggatcagctcacctcttttgttctaccacctgcctttcttccttctcccacaagcctgctccaaagaaactctgtgttatgtgtaaaaaagatataactacaatgaaaggaaccattgttgctcaagtggattcaagtgagtccttccaggaattctgtagtacatcttgtttatctctctatgaagacaaacagaatcctactaaaggagctctaaataaatcaagatgtacaatctgtggtaaactaactgagattcgccatgaagtcagctttaaaaatatgactcataagctgtgcagtgaccactgctttaatagatatagaatggccaatggtttaataatgaattgctgtgaacagtgtggagagtacttgcccagtaaaggtgctggaaataatgttctggtgattgatggtcaacagaaaagattttgctgtcaaagttgtgtcagtgaatacaaacaggtaggtagccatccaagcttcctgaaggaggttcgagatcacatgcaggactctttcttaatgcagcctgagaaatatggaaaactgacaacttgtactggttgccgaacacagtgcaggttttttgatatgactcagtgtataggtcctaatggatatatggagccatattgttcaactgcttgtatgaacagtcacaagacaaaatatgcaaaatcacaaagtttgggaattatttgccatttttgtaagcgaaactctttacctcaataccaagccacaatgcctgatggaaaactgtacaacttttgcaattccagttgtgtggctaaatttcaggctctaagtatgcagtcatctccaaatggccagtttgtagcgccaagtgatattcagttgaaatgcaactactgcaaaaattccttttgttcaaaaccagaaatcctggaatgggagaacaaagtgcatcagttctgcagcaaaacttgttcagatgactataagaagttgcattgcatagttacatattgcgaatactgtcaagaggagaagactcttcatgaaacagtaaatttctctggcgttaagagacctttctgtagtgaaggctgcaaattattatacaaacaggattttgccagacgtttaggattgagatgtgttacttgcaactattgttctcagctatgtaagaagggagcaactaaagaactcgatggtgttgtgagagatttctgcagtgaagattgctgtaaaaaatttcaggattggtactacaaggctgcaaggtgtgactgttgtaaatctcaaggaactcttaaagagcgagttcagtggcgtggggaaatgaaacatttctgtgatcaacattgcttactgcgtttctactgtcaacaaaatgagcccaacatgacaactcagaaaggacctgaaaacttacattatgatcagggttgtcagacatctcgaaccaaaatgacaggttcagcaccacccccttctccaacacctaacaaagagatgaagaacaaagcagttctttgcaaacctttaacaatgacaaaagctacttactgtaaacctcacatgcagaccaaatcttgtcagacagatgatacttggaggacagaatatgttccagtgcctatccctgtgcctgtgtatatcccagttcctatgcacatgtacagtcagaatattcctgttcctactacagttcctgttcctgtgccagttcctgtttttctgcctgctccattggacagcagtgagaagattcctgcagcaattgaggagctaaaaagcaaggtttcttcagatgctcttgatacagagttgcttacaatgacggatatgatgagtgaagacgaggggaaaacagagacaaccaacatcaacagtgtaattattgaaacagatataattggttcagaccttttgaagaactctgacccagagacacagtccagcatgcctgatgtaccatatgaaccagatttggatatcgaaatagattttcccagagctgctgaggagcttgatatggaaaatgaatttttattaccacctgtttttggcgaagaatatgaggaacagcccagacctcgatctaaaaaaaagggagccaagagaaaggctgtatcaggataccagtctcatgatgatagttctgacaattcagaatgcagctttcctttcaaatatacgtatggcgtaaatgcatggaaacactgggtcaaaactaggcaacttgatgaagatcttctggtattagatgagttaaaatcttctaaatcagtaaagttaaaagaggatctactctctcacaccacagctgagcttaactatgggttagctcattttgtcaatgagatccgacggccaaatggagagaattatgcacctgacagcatctattacctttgccttggaatacaggagaaatttgcttaagattctgtaagtggtggtgcagatatatagtgcatggctataaatcactgtattcaaggaccatcatatatcttgcagtagcaacctaaaagatacgtgaataggtttacttttttcttattctcgttttataggtttacatgtactttgagcctcatgcttagatgataatataggtccaccattccacaaacctctgaaaagcagaatttttttcatgaaaacacagtaaacagtaaaacctaactt

SEQ ID NO: 320763 - DNA, 3689 bp, Homo sapiens
agcgggcgggggggcggggcctccccgggctcggccgcgccgccgcctcctccgcctcctcctcctcaccagcgctaaagccgggactggaccgagcggagttgtgcgtgtcgccgaaggggggtgggccgggggaggggaggttcgttccgcggagccgcagccagaaccgggaccaagaatcgccttcagccctgtctggtgcatccttggcagaaagtgaggaggaaaacacccccattgttctttggcatggacacaagttcagtgggaggattagaattgactgatcagactcctgttttattagggagtacggccatggcaactagtctcacgaatgtaggaaactcatttagtggtccagctaatcctttagtgtctagatctaataagtttcagaactcgtcagtggaagatgatgatgatgttgtttttatcgaacctgtacaacctcccccaccttctgtaccagtggtagctgatcaaagaaccataacatttacatcatcaaaaaatgaagaactacaaggaaatgattccaaaattactccttcctcaaaagagttggcatctcagaagggaagtgtaagtgagacaattgtcattgatgatgaagaggacatggaaacaaatcaagggcaagagaaaaattcctccaattttattgaacgaagacctcctgagactaaaaacagaaccaatgatgtggatttctccacttccagtttttcaagaagtaaggtaaatgcaggaatgggtaatagtggtatcaccacagaaccagactctgaaattcagattgctaatgttacaactttagaaacaggtgtaagctctgtgaatgatggccaattagaaaatactgacgggcgagatatgaacttaatgattacacatgtaacatcactgcagaataccaacttgggagatgtctctaacggactgcagtcaagtaattttggtgttaatatacaaacatacaccccatctttaacttcacagaccaagactggagtaggaccttttaatcctggtagaatgaatgtggcaggagacgtttttcagaatggagaatctgcaactcatcataatcctgattcttggatctcccagtcagcttcatttccccgtaatcagaaacaaccaggggtggactctttatcaccagtggcctcacttcctaaacagattttccagccgtctgtccaacagcagcctactaaaccagttaaagtcacttgtgcaaactgcaaaaaacctttacagaagggccagacagcttatcaacgaaaaggatcagctcacctcttttgttctaccacctgcctttcttccttctcccacaagcctgctccaaagaaactctgtgttatgtgtaaaaaagatataactacaatgaaaggaaccattgttgctcaagtggattcaagtgagtccttccaggaattctgtagtacatcttgtttatctctctatgaagacaaacagaatcctactaaaggagctctaaataaatcaagatgtacaatctgtggtaaactaactgagattcgccatgaagtcagctttaaaaatatgactcataagctgtgcagtgaccactgctttaatagatatagaatggccaatggtttaataatgaattgctgtgaacagtgtggagagtacttgcccagtaaaggtgctggaaataatgttctggtgattgatggtcaacagaaaagattttgctgtcaaagttgtgtcagtgaatacaaacaggtaggtagccatccaagcttcctgaaggaggttcgagatcacatgcaggactctttcttaatgcagcctgagaaatatggaaaactgacaacttgtactggttgccgaacacagtgcaggttttttgatatgactcagtgtataggtcctaatggatatatggagccatattgttcaactgcttgtatgaacagtcacaagacaaaatatgcaaaatcacaaagtttgggaattatttgccatttttgtaagcgaaactctttacctcaataccaagccacaatgcctgatggaaaactgtacaacttttgcaattccagttgtgtggctaaatttcaggctctaagtatgcagtcatctccaaatggccagtttgtagcgccaagtgatattcagttgaaatgcaactactgcaaaaattccttttgttcaaaaccagaaatcctggaatgggagaacaaagtgcatcagttctgcagcaaaacttgttcagatgactataagaagttgcattgcatagttacatattgcgaatactgtcaagaggagaagactcttcatgaaacagtaaatttctctggcgttaagagacctttctgtagtgaaggctgcaaattattatacaaacaggattttgccagacgtttaggattgagatgtgttacttgcaactattgttctcagctatgtaagaagggagcaactaaagaactcgatggtgttgtgagagatttctgcagtgaagattgctgtaaaaaatttcaggattggtactacaaggctgcaaggtgtgactgttgtaaatctcaaggaactcttaaagagcgagttcagtggcgtggggaaatgaaacatttctgtgatcaacattgcttactgcgtttctactgtcaacaaaatgagcccaacatgacaactcagaaaggacctgaaaacttacattatgatcagggttgtcagacatctcgaaccaaaatgacaggttcagcaccacccccttctccaacacctaacaaagagatgaagaacaaagcagttctttgcaaacctttaacaatgacaaaagctacttactgtaaacctcacatgcagaccaaatcttgtcagacagatgatacttggaggacagaatatgttccagtgcctatccctgtgcctgtgtatatcccagttcctatgcacatgtacagtcagaatattcctgttcctactacagttcctgttcctgtgccagttcctgtttttctgcctgctccattggacagcagtgagaagattcctgcagcaattgaggagctaaaaagcaaggtttcttcagatgctcttgatacagagttgcttacaatgacggatatgatgagtgaagacgaggggaaaacagagacaaccaacatcaacagtgagctacactaaattataccttgcgaataagtgttaacattggttatttataagtattgttacagtactttccagggcatatcattttgtttcaacttatgtgggggtgaggaaagcattgtaacaaaaatgttttttatattaagagatctacactgtatttagccaggtgccctcagacagatatccgaagcaggaatttggtctttggtctctgttttaagcaggatttgacttgtaaaatcaactcaaaattattcttgttaatggagtagtgctgatgcaaaactataataacttgtagtagactctaatgatgatcaaaactcttattttgtaatagttatccctagttttttgttttgttttgtttttttttttagatgaactcttgctctgttgcccagggtggagtgtagtagcatgatcccggttcactgagatctctgcctcctgggttcaagctatgcttctgcctcagcctcctgagtagctggaattacaggcacgtgccaccacgccca

SEQ ID NO: 320764 - DNA, 1011 bp, Homo sapiens
agcgggcgggggggcggggcctccccgggctcggccgcgccgccgcctcctccgcctcctcctcctcaccagcgctaaagccgggactggaccgagcggagttgtgcgtgtcgccgaaggggggtgggccgggggaggggaggttcgttccgcggagccgcagccagaaccgggaccaagaatcgccttcagccctgtctggtgcatccttggcagaaagtgaggaggaaaacacccccattgttctttggcatggacacaagttcagtgggaggattagaattgactgatcagactcctgttttattagggagtacggccatggcaactagtctcacgaatgtaggaaactcatttagtggtccagctaatcctttagtgtctagatctaataagtttcagaactcgtcagtggaagatgatgatgatgttgtttttatcgaacctgtacaacctcccccaccttctgtaccagtggtagctgatcaaagaaccataacatttacatcatcaaaaaatgaagaactacaaggaaatgattccaaaattactccttcctcaaaagagttggcatctcagaagggaagtgtaagtgagacaattgtcattgatgatgaagaggacatggaaacaaatcaagggcaagagaaaaattcctccaattttattgaacgaagacctcctgagactaaaaacagaaccaatgatgtggatttctccacttccagtttttcaagaagtaaggtaaatgcaggaatgggtaatagtggtatcaccacagaaccagactctgaaattcagattgctaatgttacaactttagaaacaggtgtaagctctgtgaatgatggccaattagaaaatactgacgggcgagatccaagaatcaggattatgatgagttgcagattctccattctgaaaaacgtctcctgccacattcattctaccaggattaaaaggtcctactccagtcttggtctgtgaagttaaagatggggtgtatgttgg

SEQ ID NO: 320765 - DNA, 553 bp, Homo sapiens
tttgaagtcacgtaaagaaggtaatgtttttttaaaagccctctactccatctgtttaaacattatggaaaatttgttatcaaaaacagtcattacactagatcatagatttggaacaccaacaagtggtcataagaataaatgaatgtttgatgatttgtttccaaattaacgtgtgtagttgaagtttatttatgctgttgtagtttttaaactatgtttggagaaggaagtatgggtttatttaccttctttggtaaaggggatcacagggatagggtatgataacctttcattagggactaaaatcaggtcatgttactaactgtaattacgcagatgaatatagaagtaaaaaaaattaggaccaaagacaaaggatagagataaattatattttagcttgtttcatcttttgaggaagttattctaattttccatttttaacagggaaatgggcttgggggtgaagtgattgtcctatgcacacaagaagagagagagccagaattcagtgtgggtcagggaggagtgaaaaaaccccaaaccaaaa

SEQ ID NO: 320766 - DNA, 292 bp, Homo sapiens
acatgacaactcagaaaggacctgaaaacttacattatggtatgtaatgatttaggtgataacttgaaaaccctgtacatcagtctttacgtagttttgaatccaaagcactgataatgaatagttgattttggagatagcttaacagcaacttaaattccgtagattctctgggtcgaagtacccttgtatgttgtttttataaatgtattgcttttagttttattgtctttttgaaatttcatgctaattgagaaaaggcatagttgagagtgaggagaagctaaacagt

SEQ ID NO: 320767 - DNA, 477 bp, Homo sapiens
cagatatgtaccttttctttcctaggtttgggaattatttgccatttttgtaagcgaaactctttacctcaataccaagccacaatgcctgatggaaaactgtacaacttttgcaattccagttgtgtggctaaatttcaggctctaagtatgcagtcatctccaaatggccagtttgtagcgccaagtgatattcagttgaaatgcaactactgcaaaaattccttttgttcaaaaccagaaatcctggaatgggagaacaaagtgcatcagttctgcagcaaaacttgttcagatgactataagaagttgcattgcatagttacatattgcgaatactgtcaagaggagaagactcttcatgaaacagtaaatttctctggcgttaagagacctttctgtagtgaaggcaaaaattattatacaaacaggattttgcagcgtttagaactaaatgagcggggtccactagagtca

SEQ ID NO: 320768 - DNA, 7473 bp, Homo sapiens
agcgggcgggggggcggggcctccccgggctcggccgcgccgccgcctcctccgcctcctcctcctcaccagcgctaaagccgggactggaccgagcggagttgaccaagaatcgccttcagccctgtctggtgcatccttggcagaaagtgaggaggaaaacacccccattgttagatgaggtcttaatcatggaacatttgaagtcacgtaaagaaggttctttggcatggacacaagttcagtgggaggattagaattgactgatcagactcctgttttattagggagtacggccatggcaactagtctcacgaatgtaggaaactcatttagtggtccagctaatcctttagtgtctagatctaataagtttcagaactcgtcagtggaagatgatgatgatgttgtttttatcgaacctgtacaacctcccccaccttctgtaccagtggtagctgatcaaagaaccataacatttacatcatcaaaaaatgaagaactacaaggaaatgattccaaaattactccttcctcaaaagagttggcatctcagaagggaagtgtaagtgagacaattgtcattgatgatgaagaggacatggaaacaaatcaagggcaagagaaaaattcctccaattttattgaacgaagacctcctgagactaaaaacagaaccaatgatgtggatttctccacttccagtttttcaagaagtaaggtaaatgcaggaatgggtaatagtggtatcaccacagaaccagactctgaaattcagattgctaatgttacaactttagaaacaggtgtaagctctgtgaatgatggccaattagaaaatactgacgggcgagatatgaacttaatgattacacatgtaacatcactgcagaataccaacttgggagatgtctctaacggactgcagtcaagtaattttggtgttaatatacaaacatacaccccatctttaacttcacagaccaagactggagtaggaccttttaatcctggtagaatgaatgtggcaggagacgtttttcagaatggagaatctgcaactcatcataatcctgattcttggatctcccagtcagcttcatttccccgtaatcagaaacaaccaggggtggactctttatcaccagtggcctcacttcctaaacagattttccagccgtctgtccaacagcagcctactaaaccagttaaagtcacttgtgcaaactgcaaaaaacctttacagaagggccagacagcttatcaacgaaaaggatcagctcacctcttttgttctaccacctgcctttcttccttctcccacaagcctgctccaaagaaactctgtgttatgtgtaaaaaagatataactacaatgaaaggaaccattgttgctcaagtggattcaagtgagtccttccaggaattctgtagtacatcttgtttatctctctatgaagacaaacagaatcctactaaaggagctctaaataaatcaagatgtacaatctgtggtaaactaactgagattcgccatgaagtcagctttaaaaatatgactcataagctgtgcagtgaccactgctttaatagatatagaatggccaatggtttaataatgaattgctgtgaacagtgtggagagtacttgcccagtaaaggtgctggaaataatgttctggtgattgatggtcaacagaaaagattttgctgtcaaagttgtgtcagtgaatacaaacaggtaggtagccatccaagcttcctgaaggaggttcgagatcacatgcaggactctttcttaatgcagcctgagaaatatggaaaactgacaacttgtactggttgccgaacacagtgcaggttttttgatatgactcagtgtataggtcctaatggatatatggagccatattgttcaactgcttgtatgaacagtcacaagacaaaatatgcaaaatcacaaagtttgggaattatttgccatttttgtaagcgaaactctttacctcaataccaagccacaatgcctgatggaaaactgtacaacttttgcaattccagttgtgtggctaaatttcaggctctaagtatgcagtcatctccaaatggccagtttgtagcgccaagtgatattcagttgaaatgcaactactgcaaaaattccttttgttcaaaaccagaaatcctggaatgggagaacaaagtgcatcagttctgcagcaaaacttgttcagatgactataagaagttgcattgcatagttacatattgcgaatactgtcaagaggagaagactcttcatgaaacagtaaatttctctggcgttaagagacctttctgtagtgaaggctgcaaattattatacaaacaggattttgccagacgtttaggattgagatgtgttacttgcaactattgttctcagctatgtaagaagggagcaactaaagaactcgatggtgttgtgagagatttctgcagtgaagattgctgtaaaaaatttcaggattggtactacaaggctgcaaggtgtgactgttgtaaatctcaaggaactcttaaagagcgagttcagtggcgtggggaaatgaaacatttctgtgatcaacattgcttactgcgtttctactgtcaacaaaatgagcccaacatgacaactcagaaaggacctgaaaacttacattatgatcagggttgtcagacatctcgaaccaaaatgacaggttcagcaccacccccttctccaacacctaacaaagagatgaagaacaaagcagttctttgcaaacctttaacaatgacaaaagctacttactgtaaacctcacatgcagaccaaatcttgtcagacagatgatacttggaggacagaatatgttccagtgcctatccctgtgcctgtgtatatcccagttcctatgcacatgtacagtcagaatattcctgttcctactacagttcctgttcctgtgccagttcctgtttttctgcctgctccattggacagcagtgagaagattcctgcagcaattgaggagctaaaaagcaaggtttcttcagatgctcttgatacagagttgcttacaatgacggatatgatgagtgaagacgaggggaaaacagagacaaccaacatcaacagtgtaattattgaaacagatataattggttcagaccttttgaagaactctgacccagagacacagtccagcatgcctgatgtaccatatgaaccagatttggatatcgaaatagattttcccagagctgctgaggagcttgatatggaaaatgaatttttattaccacctgtttttggcgaagaatatgaggaacagcccagacctcgatctaaaaaaaagggagccaagagaaaggctgtatcaggataccagtctcatgatgatagttctgacaattcagaatgcagctttcctttcaaatatacgtatggcgtaaatgcatggaaacactgggtcaaaactaggcaacttgatgaagatcttctggtattagatgagttaaaatcttctaaatcagtaaagttaaaagaggatctactctctcacaccacagctgagcttaactatgggttagctcattttgtcaatgagatccgacggccaaatggagagaattatgcacctgacagcatctattacctttgccttggaatacaggagtatttgtgtggaagtaatcgaaaagacaacatatttattgatcctggataccaaacatttgagcaagaattgaataaaatactgcgaagctggcaaccaagcatacttccagatgggtcaatattctctcgagttgaagaagactatctctggaggataaaacaactaggatcacactctccagtagctcttctgaatacactgttctactttaacactaagtattttggcctgaaaacagtggaacaacacttaagactttcctttggcactgtgtttaggcattggaaaaaaaatcctttaacgatggaaaacaaagcgtgtcttcgataccaagtgtcttccttgtgtggaacagataatgaagataaaattactactggaaaaagaaaacatgaagatgatgagccagtatttgaacaaattgaaaacacagccaatccttccagatgtcctgtgaaaatgtttgaatgctacttgtctaaaagtccacagaatcttaatcagaggatggatgttttttatttgcaaccagaatgctctagttctacagatagccctgtctggtatacgtctacttcactggaccgaaacaccttggaaaatatgcttgtacgggttcttctagtaaaagatatttatgataaagacaattatgaactggatgaagacacagactaaaaaggaacgttgcagaagcaatcgggataaaacagcattagatagtcatgctgctagatctttattatggaaaacatttcaagtttactccttctgttttgagttttgtagcagtgtacccacgctgggtattaccatgtaaataatctgtgagtgaaagttgccattattctatgtagtggttttaggatacttaacaaatacattcaaattctttttttattattatttatttgattaggtatgtttgtaactttttacattacagaatatgaatgagaatgtgccatgtataatttttttcttgtagtaagaaacatccatattgcacaactctactgttgcaaagcttccttggaagggggctcttttactgggttcttaaccagatggttgtgtatgggtagcactactaaaagtttagaacttgcagtgtctttcggaatttttaaaataaactgtaaactaataggctggggtttttgttttgttttggggttttgttttgtttggttttacattttagttactgaagccttacaaggttatgtagagagataccatcttctgtaccaaaaatagacaagagaatgctgtcaatattggtgtactgtaatgtgaatctatgctggtgaaaacaattttttgttccccttattaaaaccttagtgtccttttctcatttgtggctttctgcatcacccaatcaataaaaaacaaatatatatatgtatatatatgtatgtatgtgtgtgtgtatatatatatatatatatatatatataaatgattgtaagttgaaaacaagatcatcaagacatttcctttgtaaaaatgtctggtgaaagtataaaattctgttttcttctatgccagccataagtatctgaaatcctcttcatttatagaggtttgatttttatttctttttttccctcttaaggatacagatcatgctgcaatgttagctgtgtagtactctaaaacttagcaattttatcagaattcttgtgcctgtttacattggataaaattgtttttagaaattccactcctgaaatagttacagaaagtcaagctatgttaaataagataggatcacattttataatgaagattaccagtgtagtaattctgatattgcaaatgattgaggaacaaacaaagaaactaatagagaaagtcagtctcagaggaaatcccatttaatgttagattgtttggcttttgaaattacttcttatagaagattgcattaaaaaaaaaaacaactttgtgcttctgcatagcaatttatccattcagaccttttcttttagaataaggaaacttaaaatctactttctaaagactgaacaaagtgctagctgcaaattatcttgaaatcatttggctcttttctagcatgtgtgtaatcatgttttcttctgattcctgaatgaccatggtagcattagtgtttagaaattgttcaggggaaaattgagctattttccatagtggctagcaattgctacacatccttagatactcctctctcccataggataaatgttacagcacacaaaagaaattttctcaattctgatttggaaaatttcacaggtgtcattattgtatatctaagcaataattatctgaatgttttggcataaaaaattataatgttctaacttgttttataagttgaatgacttttcagtcccttgattttatattgttgagtgataatcagactgatagtagcaaatctgatcatacattactaaaatagattgctgattgtctatttaacgaagacaagtgggtaacatttaaaatatataatacaaaaattttctctaacttacctttttccagaactacttctttaagcacttttcctattaatgcctattgttgattaaaaggtggttaattctaaccatcttttagtcttcaaagtggtgctatattccatcaagagcaataaagtttttcccaggtgtcacttattgtatatgttaccaaataccatgaatttctgccatagtactactatcaagcaccttgtcttgctatttacagtttcttcatttgtatatttttagcttttctaagtggaaatgtctacataattttgatcttgacatgattgaggatttagagctcttgtctttgtcttgattgcaatccaacgatagattaacttgattctcagggggaaaagaaaaacttattttatgagaattgtttgttctgtgaaactcacttcacctagaacacatttcattgattcttggatcttagtttatgtggtcatagttgactgctgagaaaaggacaatgaaatgatagcaatttccttttgcttctaggtgatctctgattatagatagcatcctgtaaatataactttattgtcttgaaatgtttattgaagatgctatatttttctgttctgttttctgaagattttgccatttaaaatgatccagtgaaaaatatttatccacattgaagaaagtggatttcccatgcaaattgaatcttcattaacacattttaaaaggctttactgtattaggtaacatagatattaaaggatttttctaggcaagaagctcaactttttttttccataaaaataatttttgcttaaatagtaactcatggttttcttttattaaatggggttgttgtcagtatgttaaacattgaagtaggaggaggatgcatattgtactatgcattcaaatttatcactgttttttctgacagactttccctttgtcctttctagttatgacttgggaatggggtaacttctttatgcatagtattaagggttatagtatgaagaaatcataaaattgcaagttttggtttgcattactctaatgtgggttcatttaatctgagatcttaaatatcttgcagccttaaatcactacaaacatttgcatttttattatgccagttatttccaaaatgtattgttatacatgtcacttatgtttttaagctaatattgactgtaggataatctccttgttcccctcaaaatagtcatgaaagtgtacatgaaaatatttttaaagaataaatttctttaaattacaaaatttgga

SEQ ID NO: 320769 - DNA, 6211 bp, Homo sapiens
gttccaagagtgcttggaacaatagcagctcagtgggaaaaggatttaaaatcttcaaattcattcttcaccatactttttattattaaggcttatatttcatagctccatttaattgattttgtcaaatgacaaagaagtatgtcctcattataaacaaaaagcactgtgcctttcctaaatttttcaggttttacttaactctatgtagggattctgttaaactaaatataatagagagaaaaacattctgtttttgaaggcgacttagctgatgatcattgctttgtttggaccttagcagttgttgcatagttaatagtttgtatgtagatgaagactcatgactctaaacctgtttagagattaacaggattgtttgcagaggcaaaaagtgtaatgaaaaattggtaattcttttctagttaagttgtagtcttaaaaattatctttttatgtttcaaattttagaaatatggaaaactgacaacttgtactggttgccgaacacagtgcaggttttttgatatgactcagtgtataggtcctaatggatatatggagccatattgttcaactgcttgtatgaacagtcacaagacaaaatatgcaaaatcacaaagtttgggaattatttgccatttttgtaagcgaaactctttacctcaataccaagccacaatgcctgatggaaaactgtacaacttttgcaattccagttgtgtggctaaatttcagggtattacccaaaggttcaaacccgtgcataaagccatgcttcatgagttaattcatccaacaattctgctttattccaggctctaagtatgcagtcatctccaaatggccagtttgtagcgccaagtgatattcagttgaaatgcaactactgcaaaaattccttttgttcaaaaccagaaatcctggaatgggagaacaaagtgcatcagttctgcagcaaaacttgttcagatgactataagaagttgcattgcatagttacatattgcgaatactgtcaagaggagaagactcttcatgaaacagtaaatttctctggcgttaagagacctttctgtagtgaaggctgcaaattattatacaaacaggattttgccagacgtttaggattgagatgtgttacttgcaactattgttctcagctatgtaagaagggagcaactaaagaactcgatggtgttgtgagagatttctgcagtgaagattgctgtaaaaaatttcaggattggtactacaaggctgcaaggtgtgactgttgtaaatctcaaggaactcttaaagagcgagttcagtggcgtggggaaatgaaacatttctgtgatcaacattgcttactgcgtttctactgtcaacaaaatgagcccaacatgacaactcagaaaggacctgaaaacttacattatgatcagggttgtcagacatctcgaaccaaaatgacaggttcagcaccacccccttctccaacacctaacaaagagatgaagaacaaagcagttctttgcaaacctttaacaatgacaaaagctacttactgtaaacctcacatgcagaccaaatcttgtcagacagatgatacttggaggacagaatatgttccagtgcctatccctgtgcctgtgtatatcccagttcctatgcacatgtacagtcagaatattcctgttcctactacagttcctgttcctgtgccagttcctgtttttctgcctgctccattggacagcagtgagaagattcctgcagcaattgaggagctaaaaagcaaggtttcttcagatgctcttgatacagagttgcttacaatgacggatatgatgagtgaagacgaggggaaaacagagacaaccaacatcaacagtgtaattattgaaacagatataattggttcagaccttttgaagaactctgacccagagacacagtccagcatgcctgatgtaccatatgaaccagatttggatatcgaaatagattttcccagagctgctgaggagcttgatatggaaaatgaatttttattaccacctgtttttggcgaagaatatgaggaacagcccagacctcgatctaaaaaaaagggagccaagagaaaggctgtatcaggataccagtctcatgatgatagttctgacaattcagaatgcagctttcctttcaaatatacgtatggcgtaaatgcatggaaacactgggtcaaaactaggcaacttgatgaagatcttctggtattagatgagttaaaatcttctaaatcagtaaagttaaaagaggatctactctctcacaccacagctgagcttaactatgggttagctcattttgtcaatgagatccgacggccaaatggagagaattatgcacctgacagcatctattacctttgccttggaatacaggagtatttgtgtggaagtaatcgaaaagacaacatatttattgatcctggataccaaacatttgagcaagaattgaataaaatactgcgaagctggcaaccaagcatacttccagatgggtcaatattctctcgagttgaagaagactatctctggaggataaaacaactaggatcacactctccagtagctcttctgaatacactgttctactttaacactaagtattttggcctgaaaacagtggaacaacacttaagactttcctttggcactgtgtttaggcattggaaaaaaaatcctttaacgatggaaaacaaagcgtgtcttcgataccaagtgtcttccttgtgtggaacagataatgaagataaaattactactggaaaaagaaaacatgaagatgatgagccagtatttgaacaaattgaaaacacagccaatccttccagatgtcctgtgaaaatgtttgaatgctacttgtctaaaagtccacagaatcttaatcagaggatggatgttttttatttgcaaccagaatgctctagttctacagatagccctgtctggtatacgtctacttcactggaccgaaacaccttggaaaatatgcttgtacgggttcttctagtaaaagatatttatgataaagacaattatgaactggatgaagacacagactaaaaaggaacgttgcagaagcaatcgggataaaacagcattagatagtcatgctgctagatctttattatggaaaacatttcaagtttactccttctgttttgagttttgtagcagtgtacccacgctgggtattaccatgtaaataatctgtgagtgaaagttgccattattctatgtagtggttttaggatacttaacaaatacattcaaattctttttttattattatttatttgattaggtatgtttgtaactttttacattacagaatatgaatgagaatgtgccatgtataatttttttcttgtagtaagaaacatccatattgcacaactctactgttgcaaagcttccttggaagggggctcttttactgggttcttaaccagatggttgtgtatgggtagcactactaaaagtttagaacttgcagtgtctttcggaatttttaaaataaactgtaaactaataggctggggtttttgttttgttttggggttttgttttgtttggttttacattttagttactgaagccttacaaggttatgtagagagataccatcttctgtaccaaaaatagacaagagaatgctgtcaatattggtgtactgtaatgtgaatctatgctggtgaaaacaattttttgttccccttattaaaaccttagtgtccttttctcatttgtggctttctgcatcacccaatcaataaaaaacaaatatatatatgtatatatatgtatgtatgtgtgtgtgtatatatatatatatatatatatatataaatgattgtaagttgaaaacaagatcatcaagacatttcctttgtaaaaatgtctggtgaaagtataaaattctgttttcttctatgccagccataagtatctgaaatcctcttcatttatagaggtttgatttttatttctttttttccctcttaaggatacagatcatgctgcaatgttagctgtgtagtactctaaaacttagcaattttatcagaattcttgtgcctgtttacattggataaaattgtttttagaaattccactcctgaaatagttacagaaagtcaagctatgttaaataagataggatcacattttataatgaagattaccagtgtagtaattctgatattgcaaatgattgaggaacaaacaaagaaactaatagagaaagtcagtctcagaggaaatcccatttaatgttagattgtttggcttttgaaattacttcttatagaagattgcattaaaaaaaaaaacaactttgtgcttctgcatagcaatttatccattcagaccttttcttttagaataaggaaacttaaaatctactttctaaagactgaacaaagtgctagctgcaaattatcttgaaatcatttggctcttttctagcatgtgtgtaatcatgttttcttctgattcctgaatgaccatggtagcattagtgtttagaaattgttcaggggaaaattgagctattttccatagtggctagcaattgctacacatccttagatactcctctctcccataggataaatgttacagcacacaaaagaaattttctcaattctgatttggaaaatttcacaggtgtcattattgtatatctaagcaataattatctgaatgttttggcataaaaaattataatgttctaacttgttttataagttgaatgacttttcagtcccttgattttatattgttgagtgataatcagactgatagtagcaaatctgatcatacattactaaaatagattgctgattgtctatttaacgaagacaagtgggtaacatttaaaatatataatacaaaaattttctctaacttacctttttccagaactacttctttaagcacttttcctattaatgcctattgttgattaaaaggtggttaattctaaccatcttttagtcttcaaagtggtgctatattccatcaagagcaataaagtttttcccaggtgtcacttattgtatatgttaccaaataccatgaatttctgccatagtactactatcaagcaccttgtcttgctatttacagtttcttcatttgtatatttttagcttttctaagtggaaatgtctacataattttgatcttgacatgattgaggatttagagctcttgtctttgtcttgattgcaatccaacgatagattaacttgattctcagggggaaaagaaaaacttattttatgagaattgtttgttctgtgaaactcacttcacctagaacacatttcattgattcttggatcttagtttatgtggtcatagttgactgctgagaaaaggacaatgaaatgatagcaatttccttttgcttctaggtgatctctgattatagatagcatcctgtaaatataactttattgtcttgaaatgtttattgaagatgctatatttttctgttctgttttctgaagattttgccatttaaaatgatccagtgaaaaatatttatccacattgaagaaagtggatttcccatgcaaattgaatcttcattaacacattttaaaaggctttactgtattaggtaacatagatattaaaggatttttctaggcaagaagctcaactttttttttccataaaaataatttttgcttaaatagtaactcatggttttcttttattaaatggggttgttgtcagtatgttaaacattgaagtaggaggaggatgcatattgtactatgcattcaaatttatcactgttttttctgacagactttccctttgtcctttctagttatgacttgggaatggggtaacttctttatgcatagtattaagggttatagtatgaagaaatcataaaattgcaagttttggtttgcattactctaatgtgggttcatttaatctgagatcttaaatatcttgcagccttaaatcactacaaacatttgcatttttattatgccagttatttccaaaatgtattgttatacatgtcacttatgtttttaagctaatattgactgtaggataatctccttgttcccctcaaaatagtcatgaaagtgtacatgaaaatatttttaaagaataaatttctttaaattacaaaatttgga

SEQ ID NO: 320770 - DNA, 7235 bp, Homo sapiens
agcgggcgggggggcggggcctccccgggctcggccgcgccgccgcctcctccgcctcctcctcctcaccagcgctaaagccgggactggaccgagcggagttgtgcgtgtcgccgaaggggggtgggccgggggaggggaggttcgttccgcggagccgcagccagaaccgggaccaagaatcgccttcagccctgtctggtgcatccttggcagaaagtgaggaggaaaacacccccattgttctttggcatggacacaagttcagtgggaggattagaattgactgatcagactcctgttttattagggagtacggccatggcaactagtctcacgaatgtaggaaactcatttagtggtccagctaatcctttagtgtctagatctaataagtttcagaactcgtcagtggaagatgatgatgatgttgtttttatcgaacctgtacaacctcccccaccttctgtaccagtggtagctgatcaaagaaccataacatttacatcatcaaaaaatgaagaactacaaggaaatgattccaaaattactccttcctcaaaagagttggcatctcagaagggaagtgtaagtgagacaattgtcattgatgatgaagaggacatggaaacaaatcaagggcaagagaaaaattcctccaattttattgaacgaagacctcctgagactaaaaacagaaccaatgatgtggatttctccacttccagtttttcaagaagtaagaccaagactggagtaggaccttttaatcctggtagaatgaatgtggcaggagacgtttttcagaatggagaatctgcaactcatcataatcctgattcttggatctcccagtcagcttcatttccccgtaatcagaaacaaccaggggtggactctttatcaccagtggcctcacttcctaaacagattttccagccgtctgtccaacagcagcctactaaaccagttaaagtcacttgtgcaaactgcaaaaaacctttacagaagggccagacagcttatcaacgaaaaggatcagctcacctcttttgttctaccacctgcctttcttccttctcccacaagcctgctccaaagaaactctgtgttatgtgtaaaaaagatataactacaatgaaaggaaccattgttgctcaagtggattcaagtgagtccttccaggaattctgtagtacatcttgtttatctctctatgaagacaaacagaatcctactaaaggagctctaaataaatcaagatgtacaatctgtggtaaactaactgagattcgccatgaagtcagctttaaaaatatgactcataagctgtgcagtgaccactgctttaatagatatagaatggccaatggtttaataatgaattgctgtgaacagtgtggagagtacttgcccagtaaaggtgctggaaataatgttctggtgattgatggtcaacagaaaagattttgctgtcaaagttgtgtcagtgaatacaaacaggtaggtagccatccaagcttcctgaaggaggttcgagatcacatgcaggactctttcttaatgcagcctgagaaatatggaaaactgacaacttgtactggttgccgaacacagtgcaggttttttgatatgactcagtgtataggtcctaatggatatatggagccatattgttcaactgcttgtatgaacagtcacaagacaaaatatgcaaaatcacaaagtttgggaattatttgccatttttgtaagcgaaactctttacctcaataccaagccacaatgcctgatggaaaactgtacaacttttgcaattccagttgtgtggctaaatttcaggctctaagtatgcagtcatctccaaatggccagtttgtagcgccaagtgatattcagttgaaatgcaactactgcaaaaattccttttgttcaaaaccagaaatcctggaatgggagaacaaagtgcatcagttctgcagcaaaacttgttcagatgactataagaagttgcattgcatagttacatattgcgaatactgtcaagaggagaagactcttcatgaaacagtaaatttctctggcgttaagagacctttctgtagtgaaggctgcaaattattatacaaacaggattttgccagacgtttaggattgagatgtgttacttgcaactattgttctcagctatgtaagaagggagcaactaaagaactcgatggtgttgtgagagatttctgcagtgaagattgctgtaaaaaatttcaggattggtactacaaggctgcaaggtgtgactgttgtaaatctcaaggaactcttaaagagcgagttcagtggcgtggggaaatgaaacatttctgtgatcaacattgcttactgcgtttctactgtcaacaaaatgagcccaacatgacaactcagaaaggacctgaaaacttacattatgatcagggttgtcagacatctcgaaccaaaatgacaggttcagcaccacccccttctccaacacctaacaaagagatgaagaacaaagcagttctttgcaaacctttaacaatgacaaaagctacttactgtaaacctcacatgcagaccaaatcttgtcagacagatgatacttggaggacagaatatgttccagtgcctatccctgtgcctgtgtatatcccagttcctatgcacatgtacagtcagaatattcctgttcctactacagttcctgttcctgtgccagttcctgtttttctgcctgctccattggacagcagtgagaagattcctgcagcaattgaggagctaaaaagcaaggtttcttcagatgctcttgatacagagttgcttacaatgacggatatgatgagtgaagacgaggggaaaacagagacaaccaacatcaacagtgtaattattgaaacagatataattggttcagaccttttgaagaactctgacccagagacacagtccagcatgcctgatgtaccatatgaaccagatttggatatcgaaatagattttcccagagctgctgaggagcttgatatggaaaatgaatttttattaccacctgtttttggcgaagaatatgaggaacagcccagacctcgatctaaaaaaaagggagccaagagaaaggctgtatcaggataccagtctcatgatgatagttctgacaattcagaatgcagctttcctttcaaatatacgtatggcgtaaatgcatggaaacactgggtcaaaactaggcaacttgatgaagatcttctggtattagatgagttaaaatcttctaaatcagtaaagttaaaagaggatctactctctcacaccacagctgagcttaactatgggttagctcattttgtcaatgagatccgacggccaaatggagagaattatgcacctgacagcatctattacctttgccttggaatacaggagtatttgtgtggaagtaatcgaaaagacaacatatttattgatcctggataccaaacatttgagcaagaattgaataaaatactgcgaagctggcaaccaagcatacttccagatgggtcaatattctctcgagttgaagaagactatctctggaggataaaacaactaggatcacactctccagtagctcttctgaatacactgttctactttaacactaagtattttggcctgaaaacagtggaacaacacttaagactttcctttggcactgtgtttaggcattggaaaaaaaatcctttaacgatggaaaacaaagcgtgtcttcgataccaagtgtcttccttgtgtggaacagataatgaagataaaattactactggaaaaagaaaacatgaagatgatgagccagtatttgaacaaattgaaaacacagccaatccttccagatgtcctgtgaaaatgtttgaatgctacttgtctaaaagtccacagaatcttaatcagaggatggatgttttttatttgcaaccagaatgctctagttctacagatagccctgtctggtatacgtctacttcactggaccgaaacaccttggaaaatatgcttgtacgggttcttctagtaaaagatatttatgataaagacaattatgaactggatgaagacacagactaaaaaggaacgttgcagaagcaatcgggataaaacagcattagatagtcatgctgctagatctttattatggaaaacatttcaagtttactccttctgttttgagttttgtagcagtgtacccacgctgggtattaccatgtaaataatctgtgagtgaaagttgccattattctatgtagtggttttaggatacttaacaaatacattcaaattctttttttattattatttatttgattaggtatgtttgtaactttttacattacagaatatgaatgagaatgtgccatgtataatttttttcttgtagtaagaaacatccatattgcacaactctactgttgcaaagcttccttggaagggggctcttttactgggttcttaaccagatggttgtgtatgggtagcactactaaaagtttagaacttgcagtgtctttcggaatttttaaaataaactgtaaactaataggctggggtttttgttttgttttggggttttgttttgtttggttttacattttagttactgaagccttacaaggttatgtagagagataccatcttctgtaccaaaaatagacaagagaatgctgtcaatattggtgtactgtaatgtgaatctatgctggtgaaaacaattttttgttccccttattaaaaccttagtgtccttttctcatttgtggctttctgcatcacccaatcaataaaaaacaaatatatatatgtatatatatgtatgtatgtgtgtgtgtatatatatatatatatatatatatataaatgattgtaagttgaaaacaagatcatcaagacatttcctttgtaaaaatgtctggtgaaagtataaaattctgttttcttctatgccagccataagtatctgaaatcctcttcatttatagaggtttgatttttatttctttttttccctcttaaggatacagatcatgctgcaatgttagctgtgtagtactctaaaacttagcaattttatcagaattcttgtgcctgtttacattggataaaattgtttttagaaattccactcctgaaatagttacagaaagtcaagctatgttaaataagataggatcacattttataatgaagattaccagtgtagtaattctgatattgcaaatgattgaggaacaaacaaagaaactaatagagaaagtcagtctcagaggaaatcccatttaatgttagattgtttggcttttgaaattacttcttatagaagattgcattaaaaaaaaaaacaactttgtgcttctgcatagcaatttatccattcagaccttttcttttagaataaggaaacttaaaatctactttctaaagactgaacaaagtgctagctgcaaattatcttgaaatcatttggctcttttctagcatgtgtgtaatcatgttttcttctgattcctgaatgaccatggtagcattagtgtttagaaattgttcaggggaaaattgagctattttccatagtggctagcaattgctacacatccttagatactcctctctcccataggataaatgttacagcacacaaaagaaattttctcaattctgatttggaaaatttcacaggtgtcattattgtatatctaagcaataattatctgaatgttttggcataaaaaattataatgttctaacttgttttataagttgaatgacttttcagtcccttgattttatattgttgagtgataatcagactgatagtagcaaatctgatcatacattactaaaatagattgctgattgtctatttaacgaagacaagtgggtaacatttaaaatatataatacaaaaattttctctaacttacctttttccagaactacttctttaagcacttttcctattaatgcctattgttgattaaaaggtggttaattctaaccatcttttagtcttcaaagtggtgctatattccatcaagagcaataaagtttttcccaggtgtcacttattgtatatgttaccaaataccatgaatttctgccatagtactactatcaagcaccttgtcttgctatttacagtttcttcatttgtatatttttagcttttctaagtggaaatgtctacataattttgatcttgacatgattgaggatttagagctcttgtctttgtcttgattgcaatccaacgatagattaacttgattctcagggggaaaagaaaaacttattttatgagaattgtttgttctgtgaaactcacttcacctagaacacatttcattgattcttggatcttagtttatgtggtcatagttgactgctgagaaaaggacaatgaaatgatagcaatttccttttgcttctaggtgatctctgattatagatagcatcctgtaaatataactttattgtcttgaaatgtttattgaagatgctatatttttctgttctgttttctgaagattttgccatttaaaatgatccagtgaaaaatatttatccacattgaagaaagtggatttcccatgcaaattgaatcttcattaacacattttaaaaggctttactgtattaggtaacatagatattaaaggatttttctaggcaagaagctcaactttttttttccataaaaataatttttgcttaaatagtaactcatggttttcttttattaaatggggttgttgtcagtatgttaaacattgaagtaggaggaggatgcatattgtactatgcattcaaatttatcactgttttttctgacagactttccctttgtcctttctagttatgacttgggaatggggtaacttctttatgcatagtattaagggttatagtatgaagaaatcataaaattgcaagttttggtttgcattactctaatgtgggttcatttaatctgagatcttaaatatcttgcagccttaaatcactacaaacatttgcatttttattatgccagttatttccaaaatgtattgttatacatgtcacttatgtttttaagctaatattgactgtaggataatctccttgttcccctcaaaatagtcatgaaagtgtacatgaaaatatttttaaagaataaatttctttaaattacaaaatttgga

SEQ ID NO: 320771 - DNA, 5809 bp, Homo sapiens
atttgatttaacttgactatgacagagttctgcaaccactcagaggatcaaaacaacttgcacttgaagaaatatggaaaactgacaacttgtactggttgccgaacacagtgcaggttttttgatatgactcagtgtataggtcctaatggatatatggagccatattgttcaactgcttgtatgaacagtcacaagacaaaatatgcaaaatcacaaagtttgggaattatttgccatttttgtaagcgaaactctttacctcaataccaagccacaatgcctgatggaaaactgtacaacttttgcaattccagttgtgtggctaaatttcagggtattacccaaaggttcaaacccgtgcataaagccatgcttcatgagttaattcatccaacaattctgctttattccaggctctaagtatgcagtcatctccaaatggccagtttgtagcgccaagtgatattcagttgaaatgcaactactgcaaaaattccttttgttcaaaaccagaaatcctggaatgggagaacaaagtgcatcagttctgcagcaaaacttgttcagatgactataagaagttgcattgcatagttacatattgcgaatactgtcaagaggagaagactcttcatgaaacagtaaatttctctggcgttaagagacctttctgtagtgaaggctgcaaattattatacaaacaggattttgccagacgtttaggattgagatgtgttacttgcaactattgttctcagctatgtaagaagggagcaactaaagaactcgatggtgttgtgagagatttctgcagtgaagattgctgtaaaaaatttcaggattggtactacaaggctgcaaggtgtgactgttgtaaatctcaaggaactcttaaagagcgagttcagtggcgtggggaaatgaaacatttctgtgatcaacattgcttactgcgtttctactgtcaacaaaatgagcccaacatgacaactcagaaaggacctgaaaacttacattatgatcagggttgtcagacatctcgaaccaaaatgacaggttcagcaccacccccttctccaacacctaacaaagagatgaagaacaaagcagttctttgcaaacctttaacaatgacaaaagctacttactgtaaacctcacatgcagaccaaatcttgtcagacagatgatacttggaggacagaatatgttccagtgcctatccctgtgcctgtgtatatcccagttcctatgcacatgtacagtcagaatattcctgttcctactacagttcctgttcctgtgccagttcctgtttttctgcctgctccattggacagcagtgagaagattcctgcagcaattgaggagctaaaaagcaaggtttcttcagatgctcttgatacagagttgcttacaatgacggatatgatgagtgaagacgaggggaaaacagagacaaccaacatcaacagtgtaattattgaaacagatataattggttcagaccttttgaagaactctgacccagagacacagtccagcatgcctgatgtaccatatgaaccagatttggatatcgaaatagattttcccagagctgctgaggagcttgatatggaaaatgaatttttattaccacctgtttttggcgaagaatatgaggaacagcccagacctcgatctaaaaaaaagggagccaagagaaaggctgtatcaggataccagtctcatgatgatagttctgacaattcagaatgcagctttcctttcaaatatacgtatggcgtaaatgcatggaaacactgggtcaaaactaggcaacttgatgaagatcttctggtattagatgagttaaaatcttctaaatcagtaaagttaaaagaggatctactctctcacaccacagctgagcttaactatgggttagctcattttgtcaatgagatccgacggccaaatggagagaattatgcacctgacagcatctattacctttgccttggaatacaggagtatttgtgtggaagtaatcgaaaagacaacatatttattgatcctggataccaaacatttgagcaagaattgaataaaatactgcgaagctggcaaccaagcatacttccagatgggtcaatattctctcgagttgaagaagactatctctggaggataaaacaactaggatcacactctccagtagctcttctgaatacactgttctactttaacactaagtattttggcctgaaaacagtggaacaacacttaagactttcctttggcactgtgtttaggcattggaaaaaaaatcctttaacgatggaaaacaaagcgtgtcttcgataccaagtgtcttccttgtgtggaacagataatgaagataaaattactactggaaaaagaaaacatgaagatgatgagccagtatttgaacaaattgaaaacacagccaatccttccagatgtcctgtgaaaatgtttgaatgctacttgtctaaaagtccacagaatcttaatcagaggatggatgttttttatttgcaaccagaatgctctagttctacagatagccctgtctggtatacgtctacttcactggaccgaaacaccttggaaaatatgcttgtacgggttcttctagtaaaagatatttatgataaagacaattatgaactggatgaagacacagactaaaaaggaacgttgcagaagcaatcgggataaaacagcattagatagtcatgctgctagatctttattatggaaaacatttcaagtttactccttctgttttgagttttgtagcagtgtacccacgctgggtattaccatgtaaataatctgtgagtgaaagttgccattattctatgtagtggttttaggatacttaacaaatacattcaaattctttttttattattatttatttgattaggtatgtttgtaactttttacattacagaatatgaatgagaatgtgccatgtataatttttttcttgtagtaagaaacatccatattgcacaactctactgttgcaaagcttccttggaagggggctcttttactgggttcttaaccagatggttgtgtatgggtagcactactaaaagtttagaacttgcagtgtctttcggaatttttaaaataaactgtaaactaataggctggggtttttgttttgttttggggttttgttttgtttggttttacattttagttactgaagccttacaaggttatgtagagagataccatcttctgtaccaaaaatagacaagagaatgctgtcaatattggtgtactgtaatgtgaatctatgctggtgaaaacaattttttgttccccttattaaaaccttagtgtccttttctcatttgtggctttctgcatcacccaatcaataaaaaacaaatatatatatgtatatatatgtatgtatgtgtgtgtgtatatatatatatatatatatatatataaatgattgtaagttgaaaacaagatcatcaagacatttcctttgtaaaaatgtctggtgaaagtataaaattctgttttcttctatgccagccataagtatctgaaatcctcttcatttatagaggtttgatttttatttctttttttccctcttaaggatacagatcatgctgcaatgttagctgtgtagtactctaaaacttagcaattttatcagaattcttgtgcctgtttacattggataaaattgtttttagaaattccactcctgaaatagttacagaaagtcaagctatgttaaataagataggatcacattttataatgaagattaccagtgtagtaattctgatattgcaaatgattgaggaacaaacaaagaaactaatagagaaagtcagtctcagaggaaatcccatttaatgttagattgtttggcttttgaaattacttcttatagaagattgcattaaaaaaaaaaacaactttgtgcttctgcatagcaatttatccattcagaccttttcttttagaataaggaaacttaaaatctactttctaaagactgaacaaagtgctagctgcaaattatcttgaaatcatttggctcttttctagcatgtgtgtaatcatgttttcttctgattcctgaatgaccatggtagcattagtgtttagaaattgttcaggggaaaattgagctattttccatagtggctagcaattgctacacatccttagatactcctctctcccataggataaatgttacagcacacaaaagaaattttctcaattctgatttggaaaatttcacaggtgtcattattgtatatctaagcaataattatctgaatgttttggcataaaaaattataatgttctaacttgttttataagttgaatgacttttcagtcccttgattttatattgttgagtgataatcagactgatagtagcaaatctgatcatacattactaaaatagattgctgattgtctatttaacgaagacaagtgggtaacatttaaaatatataatacaaaaattttctctaacttacctttttccagaactacttctttaagcacttttcctattaatgcctattgttgattaaaaggtggttaattctaaccatcttttagtcttcaaagtggtgctatattccatcaagagcaataaagtttttcccaggtgtcacttattgtatatgttaccaaataccatgaatttctgccatagtactactatcaagcaccttgtcttgctatttacagtttcttcatttgtatatttttagcttttctaagtggaaatgtctacataattttgatcttgacatgattgaggatttagagctcttgtctttgtcttgattgcaatccaacgatagattaacttgattctcagggggaaaagaaaaacttattttatgagaattgtttgttctgtgaaactcacttcacctagaacacatttcattgattcttggatcttagtttatgtggtcatagttgactgctgagaaaaggacaatgaaatgatagcaatttccttttgcttctaggtgatctctgattatagatagcatcctgtaaatataactttattgtcttgaaatgtttattgaagatgctatatttttctgttctgttttctgaagattttgccatttaaaatgatccagtgaaaaatatttatccacattgaagaaagtggatttcccatgcaaattgaatcttcattaacacattttaaaaggctttactgtattaggtaacatagatattaaaggatttttctaggcaagaagctcaactttttttttccataaaaataatttttgcttaaatagtaactcatggttttcttttattaaatggggttgttgtcagtatgttaaacattgaagtaggaggaggatgcatattgtactatgcattcaaatttatcactgttttttctgacagactttccctttgtcctttctagttatgacttgggaatggggtaacttctttatgcatagtattaagggttatagtatgaagaaatcataaaattgcaagttttggtttgcattactctaatgtgggttcatttaatctgagatcttaaatatcttgcagccttaaatcactacaaacatttgcatttttattatgccagttatttccaaaatgtattgttatacatgtcacttatgtttttaagctaatattgactgtaggataatctccttgttcccctcaaaatagtcatgaaagtgtacatgaaaatatttttaaagaataaatttctttaaattacaaaatttgga

SEQ ID NO: 320772 - DNA, 5192 bp, Homo sapiens
ttgtctctagatgtatcccccgcaacgtgtgatttactcggcgttaagagaccgttctgtagtgaaggctgcaaattattatacaaacaggattttgccagacgtttaggattgagatgtgttacttgcaactattgttctcagctatgtaagaagggagcaactaaagaactcgatggtgttgtgagagatttctgcagtgaagattgctgtaaaaaatttcaggattggtactacaaggctgcaaggtgtgactgttgtaaatctcaaggaactcttaaagagcgagttcagtggcgtggggaaatgaaacatttctgtgatcaacattgcttactgcgtttctactgtcaacaaaatgagcccaacatgacaactcagaaaggacctgaaaacttacattatgatcagggttgtcagacatctcgaaccaaaatgacaggttcagcaccacccccttctccaacacctaacaaagagatgaagaacaaagcagttctttgcaaacctttaacaatgacaaaagctacttactgtaaacctcacatgcagaccaaatcttgtcagacagatgatacttggaggacagaatatgttccagtgcctatccctgtgcctgtgtatatcccagttcctatgcacatgtacagtcagaatattcctgttcctactacagttcctgttcctgtgccagttcctgtttttctgcctgctccattggacagcagtgagaagattcctgcagcaattgaggagctaaaaagcaaggtttcttcagatgctcttgatacagagttgcttacaatgacggatatgatgagtgaagacgaggggaaaacagagacaaccaacatcaacagtgtaattattgaaacagatataattggttcagaccttttgaagaactctgacccagagacacagtccagcatgcctgatgtaccatatgaaccagatttggatatcgaaatagattttcccagagctgctgaggagcttgatatggaaaatgaatttttattaccacctgtttttggcgaagaatatgaggaacagcccagacctcgatctaaaaaaaagggagccaagagaaaggctgtatcaggataccagtctcatgatgatagttctgacaattcagaatgcagctttcctttcaaatatacgtatggcgtaaatgcatggaaacactgggtcaaaactaggcaacttgatgaagatcttctggtattagatgagttaaaatcttctaaatcagtaaagttaaaagaggatctactctctcacaccacagctgagcttaactatgggttagctcattttgtcaatgagatccgacggccaaatggagagaattatgcacctgacagcatctattacctttgccttggaatacaggagtatttgtgtggaagtaatcgaaaagacaacatatttattgatcctggataccaaacatttgagcaagaattgaataaaatactgcgaagctggcaaccaagcatacttccagatgggtcaatattctctcgagttgaagaagactatctctggaggataaaacaactaggatcacactctccagtagctcttctgaatacactgttctactttaacactaagtattttggcctgaaaacagtggaacaacacttaagactttcctttggcactgtgtttaggcattggaaaaaaaatcctttaacgatggaaaacaaagcgtgtcttcgataccaagtgtcttccttgtgtggaacagataatgaagataaaattactactggaaaaagaaaacatgaagatgatgagccagtatttgaacaaattgaaaacacagccaatccttccagatgtcctgtgaaaatgtttgaatgctacttgtctaaaagtccacagaatcttaatcagaggatggatgttttttatttgcaaccagaatgctctagttctacagatagccctgtctggtatacgtctacttcactggaccgaaacaccttggaaaatatgcttgtacgggttcttctagtaaaagatatttatgataaagacaattatgaactggatgaagacacagactaaaaaggaacgttgcagaagcaatcgggataaaacagcattagatagtcatgctgctagatctttattatggaaaacatttcaagtttactccttctgttttgagttttgtagcagtgtacccacgctgggtattaccatgtaaataatctgtgagtgaaagttgccattattctatgtagtggttttaggatacttaacaaatacattcaaattctttttttattattatttatttgattaggtatgtttgtaactttttacattacagaatatgaatgagaatgtgccatgtataatttttttcttgtagtaagaaacatccatattgcacaactctactgttgcaaagcttccttggaagggggctcttttactgggttcttaaccagatggttgtgtatgggtagcactactaaaagtttagaacttgcagtgtctttcggaatttttaaaataaactgtaaactaataggctggggtttttgttttgttttggggttttgttttgtttggttttacattttagttactgaagccttacaaggttatgtagagagataccatcttctgtaccaaaaatagacaagagaatgctgtcaatattggtgtactgtaatgtgaatctatgctggtgaaaacaattttttgttccccttattaaaaccttagtgtccttttctcatttgtggctttctgcatcacccaatcaataaaaaacaaatatatatatgtatatatatgtatgtatgtgtgtgtgtatatatatatatatatatatatatataaatgattgtaagttgaaaacaagatcatcaagacatttcctttgtaaaaatgtctggtgaaagtataaaattctgttttcttctatgccagccataagtatctgaaatcctcttcatttatagaggtttgatttttatttctttttttccctcttaaggatacagatcatgctgcaatgttagctgtgtagtactctaaaacttagcaattttatcagaattcttgtgcctgtttacattggataaaattgtttttagaaattccactcctgaaatagttacagaaagtcaagctatgttaaataagataggatcacattttataatgaagattaccagtgtagtaattctgatattgcaaatgattgaggaacaaacaaagaaactaatagagaaagtcagtctcagaggaaatcccatttaatgttagattgtttggcttttgaaattacttcttatagaagattgcattaaaaaaaaaaacaactttgtgcttctgcatagcaatttatccattcagaccttttcttttagaataaggaaacttaaaatctactttctaaagactgaacaaagtgctagctgcaaattatcttgaaatcatttggctcttttctagcatgtgtgtaatcatgttttcttctgattcctgaatgaccatggtagcattagtgtttagaaattgttcaggggaaaattgagctattttccatagtggctagcaattgctacacatccttagatactcctctctcccataggataaatgttacagcacacaaaagaaattttctcaattctgatttggaaaatttcacaggtgtcattattgtatatctaagcaataattatctgaatgttttggcataaaaaattataatgttctaacttgttttataagttgaatgacttttcagtcccttgattttatattgttgagtgataatcagactgatagtagcaaatctgatcatacattactaaaatagattgctgattgtctatttaacgaagacaagtgggtaacatttaaaatatataatacaaaaattttctctaacttacctttttccagaactacttctttaagcacttttcctattaatgcctattgttgattaaaaggtggttaattctaaccatcttttagtcttcaaagtggtgctatattccatcaagagcaataaagtttttcccaggtgtcacttattgtatatgttaccaaataccatgaatttctgccatagtactactatcaagcaccttgtcttgctatttacagtttcttcatttgtatatttttagcttttctaagtggaaatgtctacataattttgatcttgacatgattgaggatttagagctcttgtctttgtcttgattgcaatccaacgatagattaacttgattctcagggggaaaagaaaaacttattttatgagaattgtttgttctgtgaaactcacttcacctagaacacatttcattgattcttggatcttagtttatgtggtcatagttgactgctgagaaaaggacaatgaaatgatagcaatttccttttgcttctaggtgatctctgattatagatagcatcctgtaaatataactttattgtcttgaaatgtttattgaagatgctatatttttctgttctgttttctgaagattttgccatttaaaatgatccagtgaaaaatatttatccacattgaagaaagtggatttcccatgcaaattgaatcttcattaacacattttaaaaggctttactgtattaggtaacatagatattaaaggatttttctaggcaagaagctcaactttttttttccataaaaataatttttgcttaaatagtaactcatggttttcttttattaaatggggttgttgtcagtatgttaaacattgaagtaggaggaggatgcatattgtactatgcattcaaatttatcactgttttttctgacagactttccctttgtcctttctagttatgacttgggaatggggtaacttctttatgcatagtattaagggttatagtatgaagaaatcataaaattgcaagttttggtttgcattactctaatgtgggttcatttaatctgagatcttaaatatcttgcagccttaaatcactacaaacatttgcatttttattatgccagttatttccaaaatgtattgttatacatgtcacttatgtttttaagctaatattgactgtaggataatctccttgttcccctcaaaatagtcatgaaagtgtacatgaaaatatttttaaagaataaatttctttaaattacaaaatttgga

SEQ ID NO: 320773 - DNA, 4540 bp, Homo sapiens
  misc_feature (4534)..(4534): n is a, c, g, or t
agcgggcgggggggcggggcctccccgggctcggccgcgccgccgcctcctccgcctcctcctcctcaccagcgctaaagccgggactggaccgagcggagttgtgcgtgtcgccgaaggggggtgggccgggggaggggaggttcgttccgcggagccgcagccagaaccgggaccaagaatcgccttcagccctgtctggtgcatccttggcagaaagtgaggaggaaaacacccccattgttctttggcatggacacaagttcagtgggaggattagaattgactgatcagactcctgttttattagggagtacggccatggcaactagtctcacgaatgtaggaaactcatttagtggtccagctaatcctttagtgtctagatctaataagtttcagaactcgtcagtggaagatgatgatgatgttgtttttatcgaacctgtacaacctcccccaccttctgtaccagtggtagctgatcaaagaaccataacatttacatcatcaaaaaatgaagaactacaaggaaatgattccaaaattactccttcctcaaaagagttggcatctcagaagggaagtgtaagtgagacaattgtcattgatgatgaagaggacatggaaacaaatcaagggcaagagaaaaattcctccaattttattgaacgaagacctcctgagactaaaaacagaaccaatgatgtggatttctccacttccagtttttcaagaagtaaggtaaatgcaggaatgggtaatagtggtatcaccacagaaccagactctgaaattcagattgctaatgttacaactttagaaacaggtgtaagctctgtgaatgatggccaattagaaaatactgacgggcgagatatgaacttaatgattacacatgtaacatcactgcagaataccaacttgggagatgtctctaacggactgcagtcaagtaattttggtgttaatatacaaacatacaccccatctttaacttcacagaccaagactggagtaggaccttttaatcctggtagaatgaatgtggcaggagacgtttttcagaatggagaatctgcaactcatcataatcctgattcttggatctcccagtcagcttcatttccccgtaatcagaaacaaccaggggtggactctttatcaccagtggcctcacttcctaaacagattttccagccgtctgtccaacagcagcctactaaaccagttaaagtcacttgtgcaaactgcaaaaaacctttacagaagggccagacagcttatcaacgaaaaggatcagctcacctcttttgttctaccacctgcctttcttccttctcccacaagcctgctccaaagaaactctgtgttatgtgtaaaaaagatataactacaatgaaaggaaccattgttgctcaagtggattcaagtgagtccttccaggaattctgtagtacatcttgtttatctctctatgaagacaaacagaatcctactaaaggagctctaaataaatcaagatgtacaatctgtggtaaactaactgagattcgccatgaagtcagctttaaaaatatgactcataagctgtgcagtgaccactgctttaatagatatagaatggccaatggtttaataatgaattgctgtgaacagtgtggagagtacttgcccagtaaaggtgctggaaataatgttctggtgattgatggtcaacagaaaagattttgctgtcaaagttgtgtcagtgaatacaaacaggtaggtagccatccaagcttcctgaaggaggttcgagatcacatgcaggactctttcttaatgcagcctgagaaatatggaaaactgacaacttgtactggttgccgaacacagtgcaggttttttgatatgactcagtgtataggtcctaatggatatatggagccatattgttcaactgcttgtatgaacagtcacaagacaaaatatgcaaaatcacaaagtttgggaattatttgccatttttgtaagcgaaactctttacctcaataccaagccacaatgcctgatggaaaactgtacaacttttgcaattccagttgtgtggctaaatttcaggctctaagtatgcagtcatctccaaatggccagtttgtagcgccaagtgatattcagttgaaatgcaactactgcaaaaattccttttgttcaaaaccagaaatcctggaatgggagaacaaagtgcatcagttctgcagcaaaacttgttcagatgactataagaagttgcattgcatagttacatattgcgaatactgtcaagaggagaagactcttcatgaaacagtaaatttctctggcgttaagagacctttctgtagtgaaggctgcaaattattatacaaacaggattttgccagacgtttaggattgagatgtgttacttgcaactattgttctcagctatgtaagaagggagcaactaaagaactcgatggtgttgtgagagatttctgcagtgaagattgctgtaaaaaatttcaggattggtactacaaggctgcaaggtgtgactgttgtaaatctcaaggaactcttaaagagcgagttcagtggcgtggggaaatgaaacatttctgtgatcaacattgcttactgcgtttctactgtcaacaaaatgagcccaacatgacaactcagaaaggacctgaaaacttacattatgatcagggttgtcagacatctcgaaccaaaatgacaggttcagcaccacccccttctccaacacctaacaaagagatgaagaacaaagcagttctttgcaaacctttaacaatgacaaaagctacttactgtaaacctcacatgcagaccaaatcttgtcagacagatgatacttggaggacagaatatgttccagtgcctatccctgtgcctgtgtatatcccagttcctatgcacatgtacagtcagaatattcctgttcctactacagttcctgttcctgtgccagttcctgtttttctgcctgctccattggacagcagtgagaagattcctgcagcaattgaggagctaaaaagcaaggtttcttcagatgctcttgatacagagttgcttacaatgacggatatgatgagtgaagacgaggggaaaacagagacaaccaacatcaacagtgtaattattgaaacagatataattggttcagaccttttgaagaactctgacccagagacacagtccagcatgcctgatgtaccatatgaaccagatttggatatcgaaatagattttcccagagctgctgaggagcttgatatggaaaatgaatttttattaccacctgtttttggcgaagaatatgaggaacagcccagacctcgatctaaaaaaaagggagccaagagaaaggctgtatcaggataccagtctcatgatgatagttctgacaattcagaatgcagctttcctttcaaatatacgtatggcgtaaatgcatggaaacactgggtcaaaactaggcaacttgatgaagatcttctggtattagatgagttaaaatcttctaaatcagtaaagttaaaagaggatctactctctcacaccacagctgagcttaactatgggttagctcattttgtcaatgagatccgacggccaaatggagagaattatgcacctgacagcatctattacctttgccttggaatacaggagtatttgtgtggaagtaatcgaaaagacaacatatttattgatcctggataccaaacatttgagcaagaattgaataaaatactgcgaagctggcaaccaagcatacttccagatgggtcaatattctctcgagttgaagaagactatctctggaggataaaacaactaggatcacactctccagtagctcttctgaatacactgttctactttaacactaagtattttggcctgaaaacagtggaacaacacttaagactttcctttggcactgtgtttaggcattggaaaaaaaatcctttaacgatggaaaacaaagcgtgtcttcgataccaagtgtcttccttgtgtggaacagataatgaagataaaattactactggaaaaagaaaacatgaagatgatgagccagtatttgaacaaattgaaaacacagccaatccttccagatgtcctgtgaaaatgtttgaatgctacttgtctaaaagtccacagaatcttaatcagaggatggatgttttttatttgcaaccagaatgctctagttctacagatagccctgtctggtatacgtctacttcactggaccgaaacaccttggaaaatatgcttgtacgggttcttctagtaaaagatatttatgataaagacaattatgaactggatgaagacacagactaaaaaggaacgttgcagaagcaatcgggataaaacagcattagatagtcatgctgctagatctttattatggaaaacatttcaagtttactccttctgttttccataataaagatctagcagcatgactatctaatgggtcgacgcggcncgaact

SEQ ID NO: 320774 - DNA, 4064 bp, Homo sapiens
agcgggcgggggggcggggcctccccgggctcggccgcgccgccgcctcctccgcctcctcctcctcaccagcgctaaagccgggactggaccgagcggagttgtgcgtgtcgccgaaggggggtgggccgggggaggggaggttcgttccgcggagccgcagccagaaccgggaccaagaatcgccttcagccctgtctggtgcatccttggcagaaagtgaggaggaaaacacccccattgttctttggcatggacacaagttcagtgggaggattagaattgactgatcagactcctgttttattagggagtacggccatggcaactagtctcacgaatgtaggaaactcatttagtggtccagctaatcctttagtgtctagatctaataagtttcagaactcgtcagtggaagatgatgatgatgttgtttttatcgaacctgtacaacctcccccaccttctgtaccagtggtagctgatcaaagaaccataacatttacatcatcaaaaaatgaagaactacaaggaaatgattccaaaattactccttcctcaaaagagttggcatctcagaagggaagtgtaagtgagacaattgtcattgatgatgaagaggacatggaaacaaatcaagggcaagagaaaaattcctccaattttattgaacgaagacctcctgagactaaaaacagaaccaatgatgtggatttctccacttccagtttttcaagaagtaaggtaaatgcaggaatgggtaatagtggtatcaccacagaaccagactctgaaattcagattgctaatgttacaactttagaaacaggtgtaagctctgtgaatgatggccaattagaaaatactgacgggcgagatatgaacttaatgattacacatgtaacatcactgcagaataccaacttgggagatgtctctaacggactgcagtcaagtaattttggtgttaatatacaaacatacaccccatctttaacttcacagaccaagactggagtaggaccttttaatcctggtagaatgaatgtggcaggagacgtttttcagaatggagaatctgcaactcatcataatcctgattcttggatctcccagtcagcttcatttccccgtaatcagaaacaaccaggggtggactctttatcaccagtggcctcacttcctaaacagattttccagccgtctgtccaacagcagcctactaaaccagttaaagtcacttgtgcaaactgcaaaaaacctttacagaagggccagacagcttatcaacgaaaaggatcagctcacctcttttgttctaccacctgcctttcttccttctcccacaagcctgctccaaagaaactctgtgttatgtgtaaaaaagatataactacaatgaaaggaaccattgttgctcaagtggattcaagtgagtccttccaggaattctgtagtacatcttgtttatctctctatgaagacaaacagaatcctactaaaggagctctaaataaatcaagatgtacaatctgtggtaaactaactgagattcgccatgaagtcagctttaaaaatatgactcataagctgtgcagtgaccactgctttaatagatatagaatggccaatggtttaataatgaattgctgtgaacagtgtggagagtacttgcccagtaaaggtgctggaaataatgttctggtgattgatggtcaacagaaaagattttgctgtcaaagttgtgtcagtgaatacaaacaggtaggtagccatccaagcttcctgaaggaggttcgagatcacatgcaggactctttcttaatgcagcctgagaaatatggaaaactgacaacttgtactggttgccgaacacagtgcaggttttttgatatgactcagtgtataggtcctaatggatatatggagccatattgttcaactgcttgtatgaacagtcacaagacaaaatatgcaaaatcacaaagtttgggaattatttgccatttttgtaagcgaaactctttacctcaataccaagccacaatgcctgatggaaaactgtacaacttttgcaattccagttgtgtggctaaatttcaggctctaagtatgcagtcatctccaaatggccagtttgtagcgccaagtgatattcagttgaaatgcaactactgcaaaaattccttttgttcaaaaccagaaatcctggaatgggagaacaaagtgcatcagttctgcagcaaaacttgttcagatgactataagaagttgcattgcatagttacatattgcgaatactgtcaagaggagaagactcttcatgaaacagtaaatttctctggcgttaagagacctttctgtagtgaaggctgcaaattattatacaaacaggattttgccagacgtttaggattgagatgtgttacttgcaactattgttctcagctatgtaagaagggagcaactaaagaactcgatggtgttgtgagagatttctgcagtgaagattgctgtaaaaaatttcaggattggtactacaaggctgcaaggtgtgactgttgtaaatctcaaggaactcttaaagagcgagttcagtggcgtggggaaatgaaacatttctgtgatcaacattgcttactgcgtttctactgtcaacaaaatgagcccaacatgacaactcagaaaggacctgaaaacttacattatgatcagggttgtcagacatctcgaaccaaaatgacaggttcagcaccacccccttctccaacacctaacaaagagatgaagaacaaagcagttctttgcaaacctttaacaatgacaaaagctacttactgtaaacctcacatgcagaccaaatcttgtcagacagatgatacttggaggacagaatatgttccagtgcctatccctgtgcctgtgtatatcccagttcctatgcacatgtacagtcagaatattcctgttcctactacagttcctgttcctgtgccagttcctgtttttctgcctgctccattggacagcagtgagaagattcctgcagcaattgaggagctaaaaagcaaggtttcttcagatgctcttgatacagagttgcttacaatgacggatatgatgagtgaagacgaggggaaaacagagacaaccaacatcaacagtgtaattattgaaacagatataattggttcagaccttttgaagaactctgacccagagacacagtccagcatgcctgatgtaccatatgaaccagatttggatatcgaaatagattttcccagagctgctgaggagcttgatatggaaaatgaatttttattaccacctgtttttggcgaagaatatgaggaacagcccagacctcgatctaaaaaaaaggtacattcacttaatagcctatataacaatatttctctataggcaaacaaggatacagtgttcttttagtgtgcctgagaatatgggaacatattttgttttctaggttggaaaataatttattttctatttatatagaatatagtaataatatattactgctatttattactactatttattactatttctatttgtatagaaatagtaattattactatttctagtaataatagtagtaataatttatttctagtaataatttattactgtttctaagtaataaaaatatctcagatttagttgatacctcaactaaacttgtattgatacaaggtcaaaatagaaaacagttgctaaagtagtaagttcaattatttgacaaaaatttagactgttttctagggagctgttttttccacgattatttctgatgagatgatcagtggggttgaagtacacagtttattatttctggtctcttttaggcataccaacacacatagaaagacatgctggacagtttgatcattcaggtagaccaaatctacatgcattaacaagtgtaattgttataatattctgtcaactttctgtgtttctgacttccaacataaagcaggttttaaaaataccttaagaaagatagctttcacaaattgtccccaaaagaaagaaaa

SEQ ID NO: 320775 - DNA, 2703 bp, Homo sapiens
agcgggcgggggggcggggcctccccgggctcggccgcgccgccgcctcctccgcctcctcctcctcaccagcgctaaagccgggactggaccgagcggagttgtgcgtgtcgccgaaggggggtgggccgggggaggggaggttcgttccgcggagccgcagccagaaccgggaccaagaatcgccttcagccctgtctggtgcatccttggcagaaagtgaggaggaaaacacccccattgttctttggcatggacacaagttcagtgggaggattagaattgactgatcagactcctgttttattagggagtacggccatggcaactagtctcacgaatgtaggaaactcatttagtggtccagctaatcctttagtgtctagatctaataagtttcagaactcgtcagtggaagatgatgatgatgttgtttttatcgaacctgtacaacctcccccaccttctgtaccagtggtagctgatcaaagaaccataacatttacatcatcaaaaaatgaagaactacaaggaaatgattccaaaattactccttcctcaaaagagttggcatctcagaagggaagtgtaagtgagacaattgtcattgatgatgaagaggacatggaaacaaatcaagggcaagagaaaaattcctccaattttattgaacgaagacctcctgagactaaaaacagaaccaatgatgtggatttctccacttccagtttttcaagaagtaaggtaaatgcaggaatgggtaatagtggtatcaccacagaaccagactctgaaattcagattgctaatgttacaactttagaaacaggtgtaagctctgtgaatgatggccaattagaaaatactgacgggcgagatatgaacttaatgattacacatgtaacatcactgcagaataccaacttgggagatgtctctaacggactgcagtcaagtaattttggtgttaatatacaaacatacaccccatctttaacttcacagaccaagactggagtaggaccttttaatcctggtagaatgaatgtggcaggagacgtttttcagaatggagaatctgcaactcatcataatcctgattcttggatctcccagtcagcttcatttccccgtaatcagaaacaaccaggggtggactctttatcaccagtggcctcacttcctaaacagattttccagccgtctgtccaacagcagcctactaaaccagttaaagtcacttgtgcaaactgcaaaaaacctttacagaagggccagacagcttatcaacgaaaaggatcagctcacctcttttgttctaccacctgcctttcttccttctcccacaagcctgctccaaagaaactctgtgttatgtgtaaaaaagatataactacaatgaaaggaaccattgttgctcaagtggattcaagtgagtccttccaggaattctgtagtacatcttgtttatctctctatgaagacaaacagaatcctactaaaggagctctaaataaatcaagatgtacaatctgtggtaaactaactgagattcgccatgaagtcagctttaaaaatatgactcataagctgtgcagtgaccactgctttaatagatatagaatggccaatggtttaataatgaattgctgtgaacagtgtggagagtacttgcccagtaaaggtgctggaaataatgttctggtgattgatggtcaacagaaaagattttgctgtcaaagttgtgtcagtgaatacaaacaggtaggtagccatccaagcttcctgaaggaggttcgagatcacatgcaggactctttcttaatgcagcctgagaaatatggaaaactgacaacttgtactggttgccgaacacagtgcaggttttttgatatgactcagtgtataggtcctaatggatatatggagccatattgttcaactgcttgtatgaacagtcacaagacaaaatatgcaaaatcacaaagtttgggaattatttgccatttttgtaagcgaaactctttacctcaataccaagccacaatgcctgatggaaaactgtacaacttttgcaattccagttgtgtggctaaatttcaggctctaagtatgcagtcatctccaaatggccagtttgtagcgccaagtgatattcagttgaaatgcaactactgcaaaaattccttttgttcaaaaccagaaatcctggaatgggagaacaaagtgcatcagttctgcagcaaaacttgttcagatgactataagaagttgcattgcatagttacatattgcgaatactgtcaagaggagaagactcttcatgaaacagtaaatttctctggcgttaagagacctttctgtagtgaaggctgcaaattattatacaaacaggattttgccagacgtttaggattgagatgtgttacttgcaactattgttctcagctatgtaagaagggagcaactaaagaactcgatggtgttgtgagagatttctgcagtgaagattgctgtaaaaaatttcaggattggtactacaaggcgagtaactcctttattacagcagctactttaaccagtcttaaaaaacgttgtagctgttaccattacaaatctggcaactcatttattttaaaaatgtacacacttaaggcccagccctgataatactattcattaaaattgtcttgtcatttcagc

SEQ ID NO: 320776 - DNA, 802 bp, Homo sapiens
ccagtaaaactccagcctgtggctgggcagggctttccctttggtcctttctctcataatatggtccctagagctcatgaagaatgtggactcccaggccctaccctggacctcttcattccaagtccgcccagcaacaaggtttccaggtgatttccatgcccttgaggtctgagctgaactgatttaaagcagccactctcagcgttgagctgcctcagtcagaggggcctggaggaccatactgctgattaggaggtctgggtggggcccaggaatcacatttcttacaagttcccaagcgatattgatgccgctgctgcaggggccaaactttgagaaccactggtctagaggccgcagccagcactctccaggcacactggcccctagaggcacgtgagtttgacatgcaaccccttgctgtcaaggtgtctttccagatgctgaccagggtctttccagaaccaacctgctctgtctcaatcagcctcgtgcccctggctttgaccttccaaatccttggctcccacaaaacctctgaacaggctgttggattcctactccaacttcttggttttgtaaccagggttcttggtcttctaggccagccacctgcagttcccaggggctgtctacggcacagatggatgccctgtgtcggtcgagaagattgtgaacatcttcaatgggaccagctgccccagcctgggagggaagcccaagctctttttcatccaggcctgtggtgggggtaagcagctcctcagcctccctctgggtgggtctggtggggagggag

SEQ ID NO: 320777 - DNA, 2261 bp, Homo sapiens
gacgcagtggtggattctggagcggggcggtgacgtggggcgggttctggggcggggcggtgacgcggagcgtgttctggggcggcgcggtgatgggaggcttggccctgggggcggggcgaggcgcagaggtgcgtcctgagggcggggcggtgacgcaagagcgactcctgggggcggggcgaggccttggagatgcgtccggaggcggtggggagcgaagactgacccggggccgtgacgcgggggcaggccctggggcgggggcgggtcctggggactggggcgggcggccgaggcccggaagcggactgaggcggcctggagtcttagttggctactcgccatggacgaagcggatcggcggctcctgcggcggtgccggctgcggctggtggaagagctgcaggtggaccagctctgggacgccctgctgagccgcgagctgttcaggccccatatgatcgaggacatccagcgggcaggctctggatctcggcgggatcaggccaggcagctgatcatagatctggagactcgagggagtcaggctcttcctttgttcatctcctgcttagaggacacaggccaggacatgctggcttcgtttctgcgaactaacaggcaagcagcaaagttgtcgaagccaaccctagaaaaccttaccccagtggtgctcagaccagagattcgcaaaccagaggttctcagaccggaaacacccagaccagtggacattggttctggaggatttggtgatgtcggtgctcttgagagtttgaggggaaatgcagatttggcttacatcctgagcatggagccctgtggccactgcctcattatcaacaatgtgaacttctgccgtgagtccgggctccgcacccgcactggctccaacatcgactgtgagaagttgcggcgtcgcttctcctcgctgcatttcatggtggaggtgaagggcgacctgactgccaagaaaatggtgctggctttgctggagctggcgcagcaggaccacggtgctctggactgctgcgtggtggtcattctctctcacggctgtcaggccagccacctgcagttcccaggggctgtctacggcacagatggatgccctgtgtcggtcgagaagattgtgaacatcttcaatgggaccagctgccccagcctgggagggaagcccaagctctttttcatccaggcctgtggtggggagcagaaagaccatgggtttgaggtggcctccacttcccctgaagacgagtcccctggcagtaaccccgagccagatgccaccccgttccaggaaggtttgaggaccttcgaccagctggacgccatatctagtttgcccacacccagtgacatctttgtgtcctactctactttcccaggttttgtttcctggagggaccccaagagtggctcctggtacgttgagaccctggacgacatctttgagcagtgggctcactctgaagacctgcagtccctcctgcttagggtcgctaatgctgtttcggtgaaagggatttataaacagatgcctggttgctttaatttcctccggaaaaaacttttctttaaaacatcataaggccagggcccctcaccctgccttatcttgcaccccaaagctttcctgccccaggcctgaaagaggctgaggcctggactttcctgcaactcaaggactttgcagccggcacagggtctgctctttctctgccagtgacagacaggctcttagcagcttccagattgacgacaagtgctgaacagtggaggaagagggacagatgaatgccgtggattgcacgtggcctcttgagcagtggctggtccagggctagtgacttgtgtcccatgatccctgtgttgtctctagagcagggattaacctctgcactactgacatgtggggccaggtcaccctttgctgtgaggctgtcctgtacattgtgggatgttcagcactgtcccttgcctcaatgccagtaacgcgtcttcctgagtggtgccaaacaaaaaggttctcaggtgttgccaaatatgtcctggggtataaaactttcctcgcctgacaaccactggtctgtagggatttttggctacacacaaaccagtatcgctcatagatcagcaaaccggggcctactagagtctgaacagctgtaatctatgaattctaagtgaaattttaaaaattgttaatttttcctatattgcattaattttaaaaaataaatctgaggcaaata

SEQ ID NO: 320778 - DNA, 2217 bp, Homo sapiens
gacgcagtggtggattctggagcggggcggtgacgtggggcgggttctggggcggggcggtgacgcggagcgtgttctggggcggcgcggtgatgggaggcttggccctgggggcggggcgaggcgcagaggtgcgtcctgagggcggggcggtgacgcaagagcgactcctgggggcggggcgaggccttggagatgcgtccggaggcggtggggagcgaagactgacccggggccgtgacgcgggggcaggccctggggcgggggcgggtcctggggactggggcgggcggccgaggcccggaagcggactgaggcggcctggagtcttagttggctactcgccatggacgaagcggatcggcggctcctgcggcggtgccggctgcggctggtggaagagctgcaggtggaccagctctgggacgccctgctgagccgcgagctgttcaggccccatatgatcgaggacatccagcgggcaggctctggatctcggcgggatcaggccaggcagctgatcatagatctggagactcgagggagtcaggctcttcctttgttcatctcctgcttagaggacacaggccaggacatgctggcttcgtttctgcgaactaacaggcaagcagcaaagttgtcgaagccaaccctagaaaaccttaccccagtggtgctcagaccagagattcgcaaaccagaggttctcagaccggaaacacccagaccagtggacattggttctggaggatttggtgatgtcgagcagaaagaccatgggtttgaggtggcctccacttcccctgaagacgagtcccctggcagtaaccccgagccagatgccaccccgttccaggaaggtttgaggaccttcgaccagctggacgccatatctagtttgcccacacccagtgacatctttgtgtcctactctactttcccaggttttgtttcctggagggaccccaagagtggctcctggtacgttgagaccctggacgacatctttgagcagtgggctcactctgaagacctgcagtccctcctgcttagggtcgctaatgctgtttcggtgaaagggatttataaacagatgcctggttgctttaatttcctccggaaaaaacttttctttaaaacatcataaggccagggcccctcaccctgccttatcttgcaccccaaagctttcctgccccaggcctgaaagaggctgaggcctggactttcctgcaactcaaggactttgcagccggcacagggtctgctctttctctgccagtgacagacaggctcttagcagcttccagattgacgacaagtgctgaacagtggaggaagagggacagatgaatgccgtggattgcacgtggcctcttgagcagtggctggtccagggctagtgacttgtgtcccatgatccctgtgttgtctctagagcagggattaacctctgcactactgacatgtggggccaggtcaccctttgctgtgaggctgtcctgtacattgtgggatgttcagcactgtcccttgcctcaatgccagtaacgcgtcttcctgagtggtgccaaacaaaaaggttctcaggtgttgccaaatatgtcctggggtataaaactttcctcgcctgacaaccactggtctgtagggatttttggctacacacaaaccagtatcgctcatagatcagcaaaccggggcctactagagtctgaacagctgtaatctatgaattctaagtgaaattttaaaaattgttaatttttcctatattgcattaattttaaaaaataaatctgaggcaaataaaaaaaaaaaaagaaaaaaaaaaaaaaaaagaaaaaagggggggggcgcgaaaagagaccccccgcggagggggccccaaggaagtacacgacggaaccccgaggaatttcgtgggacaacaagaggcgtccgcccacaaagaggagagcgctcggataagaaaaaaacgagctgaaccgacccagtggccggaaggttaaaaccagacacggccctggtgacacgtggggaacaaaccggtggacatgcactgggggagaaccccctggtgaaagagacggggaacccacattcacaactgcggggggggggagcgagccacacattttgtggggcaaccactgcaacccgtaacacaagaaagtattcaaagggctccgaggagggggacgaccatacaggcgt

SEQ ID NO: 320779 - DNA, 2171 bp, Homo sapiens
gacgcagtggtggattctggagcggggcggtgacgtggggcgggttctggggcggggcggtgacgcggagcgtgttctggggcggcgcggtgatgggaggcttggccctgggggcggggcgaggcgcagaggtgcgtcctgagggcggggcggtgacgcaagagcgactcctgggggcggggcgaggccttggagatgcgtccggaggcggtggggagcgaagactgacccggggccgtgacgcgggggcaggccctggggcgggggcgggtcctggggactggggcgggcggccgaggcccggaagcggactgaggcggcctggagtcttagttggctactcgccatggacgaagcggatcggcggctcctgcggcggtgccggctgcggctggtggaagagctgcaggtggaccagctctgggacgccctgctgagccgcgagctgttcaggccccatatgatcgaggacatccagcgggcaggctctggatctcggcgggatcaggccaggcagctgatcatagatctggagactcgagggagtcaggctcttcctttgttcatctcctgcttagaggacacaggccaggacatgctggcttcgtttctgcgaactaacaggcaagcagcaaagttgtcgaagccaaccctagaaaaccttaccccagtggtgctcagaccagagattcgcaaaccagaggttctcagaccggaaacacccagaccagtggacattggttctggaggatttggtgatgtcggtgctcttgagagtttgaggggaaatgcagatttggcttacatcctgagcatggagccctgtggccactgcctcattatcaacaatgtgaacttctgccgtgagtccgggctccgcacccgcactggctccaacatcgactgtgagaagttgcggcgtcgcttctcctcgctgcatttcatggtggaggtgaagggcgacctgactgccaaggccagccacctgcagttcccaggggctgtctacggcacagatggatgccctgtgtcggtcgagaagattgtgaacatcttcaatgggaccagctgccccagcctgggagggaagcccaagctctttttcatccaggcctgtggtggggagcagaaagaccatgggtttgaggtggcctccacttcccctgaagacgagtcccctggcagtaaccccgagccagatgccaccccgttccaggaaggtttgaggaccttcgaccagctggacgccatatctagtttgcccacacccagtgacatctttgtgtcctactctactttcccaggttttgtttcctggagggaccccaagagtggctcctggtacgttgagaccctggacgacatctttgagcagtgggctcactctgaagacctgcagtccctcctgcttagggtcgctaatgctgtttcggtgaaagggatttataaacagatgcctggttgctttaatttcctccggaaaaaacttttctttaaaacatcataaggccagggcccctcaccctgccttatcttgcaccccaaagctttcctgccccaggcctgaaagaggctgaggcctggactttcctgcaactcaaggactttgcagccggcacagggtctgctctttctctgccagtgacagacaggctcttagcagcttccagattgacgacaagtgctgaacagtggaggaagagggacagatgaatgccgtggattgcacgtggcctcttgagcagtggctggtccagggctagtgacttgtgtcccatgatccctgtgttgtctctagagcagggattaacctctgcactactgacatgtggggccaggtcaccctttgctgtgaggctgtcctgtacattgtgggatgttcagcactgtcccttgcctcaatgccagtaacgcgtcttcctgagtggtgccaaacaaaaaggttctcaggtgttgccaaatatgtcctggggtataaaactttcctcgcctgacaaccactggtctgtagggatttttggctacacacaaaccagtatcgctcatagatcagcaaaccggggcctactagagtctgaacagctgtaatctatgaattctaagtgaaattttaaaaattgttaatttttcctatattgcattaattttaaaaaataaatctgaggcaaata

SEQ ID NO: 320780 - DNA, 1101 bp, Homo sapiens
aaaagagcttgggcttccctcccaggctctttttcatccaggcctgtggtggggagcagaaagaccatgggtttgaggtggcctccacttcccctgaagacgagtcccctggcagtaaccccgagccagatgccaccccgttccaggaaggtttgaggaccttcgaccagctggacgccatatctagtttgcccacacccagtgacatctttgtgtcctactctactttcccaggttttgtttcctggagggaccccaagagtggctcctggtacgttgagaccctggacgacatctttgagcagtgggctcactctgaagacctgcagtccctcctgcttagggtcgctaatgctgtttcggtgaaagggatttataaacagatgcctggttgctttaatttcctccggaaaaaacttttctttaaaacatcataaggccagggcccctcaccctgccttatcttgcaccccaaagctttcctgccccaggcctgaaagaggctgaggcctggactttcctgcaactcaaggactttgcagccggcacagggtctgctctttctctgccagtgacagacaggctcttagcagcttccagattgacgacaagtgctgaacagtggaggaagagggacagatgaatgccgtggattgcacgtggcctcttgagcagtggctggtccagggctagtgacttgtgtcccatgatccctgtgttgtctctagagcagggattaacctctgcactactgacatgtggggccaggtcaccctttgctgtgaggctgtcctgtacattgtgggatgttcagcactgtcccttgcctcaatgccagtaacgcgtcttcctgagtggtgccaaacaaaaaggttctcaggtgttgccaaatatgtcctggggtataaaactttcctcgcctgacaaccactggtctgtagggatttttggctacacacaaaccagtatcgctcatagatcagcaaaccggggcctactagagtctgaacagctgtaatctatgaattctaagtgaaattttaaaaattgttaatttttcctatattgcattaattttaaaaaataaatctgaggcaaata

SEQ ID NO: 320781 - DNA, 1345 bp, Homo sapiens
gacgcagtggtggattctggagcggggcggtgacgtggggcgggttctggggcggggcggtgacgcggagcgtgttctggggcggcgcggtgatgggaggcttggccctgggggcggggcgaggcgcagaggtgcgtcctgagggcggggcggtgacgcaagagcgactcctgggggcggggcgaggccttggagatgcgtccggaggcggtggggagcgaagactgacccggggccgtgacgcgggggcaggccctggggcgggggcgggtcctggggactggggcgggcggccgaggcccggaagcggactgaggcggcctggagtcttagttggctactcgccatggacgaagcggatcggcggctcctgcggcggtgccggctgcggctggtggaagagctgcaggtggaccagctctgggacgccctgctgagccgcgagctgttcaggccccatatgatcgaggacatccagcgggcaggctctggatctcggcgggatcaggccaggcagctgatcatagatctggagactcgagggagtcaggctcttcctttgttcatctcctgcttagaggacacaggccaggacatgctggcttcgtttctgcgaactaacaggcaagcagcaaagttgtcgaagccaaccctagaaaaccttaccccagtggtgctcagaccagagattcgcaaaccagaggttctcagaccggaaacacccagaccagtggacattggttctggaggatttggtgatgtcggtgctcttgagagtttgaggggaaatgcagatttggcttacatcctgagcatggagccctgtggccactgcctcattatcaacaatgtgaacttctgccgtgagtccgggctccgcacccgcactggctccaacatcgactgtgagaagttgcggcgtcgcttctcctcgctgcatttcatggtggaggtgaagggcgacctgactgccaagaaaatggtgctggctttgctggagctggcgcagcaggaccacggtgctctggactgctgcgtggtggtcattctctctcacggctgtcagccaagcaccttgcaggtccccaggggcttgcctacggccacagagtaggaattccccttgtgggtcggcgcgaagacagactcgtggaacaatcttcaaatggagaaccagcttgtcccaggccttgggacggcaagcccaaggactattatcaatccatacgagcataattggtgtagcgaaaaaagaacaagcacaggtattataactgatggacaaacatcaccgtaacagaagaaggatacctgtgaagaaaccgcagtagcagcataatcacac

SEQ ID NO: 320782 - DNA, 274 bp, Homo sapiens
tcccttcccttaataccaagatgggggggtcaccttctagtgctagtcttccctgcagttgcttctcttttgccctggaatgccgggtggagaccctgctactccttgtgcgagagggcagaccccgttttcttcccgcctctccagactgtcctctagggagcgtggggagagcccgggtttacgtgggtccctgtgctggcaggcttacatcctgagcatggagccctgtggccactgcctcattatcaacaatgtgaacttctgccgtgag

SEQ ID NO: 320783 - DNA, 361 bp, Homo sapiens
cctctgcactactgacatgtggggccaggtcaccctttgctgtgaggctgtcctgtacattgtgggatgttcagcactgtcccttgcctcaatgccagtaacgcgtcttcctgagtggtgccaaacaaaaaggttctcaggtgttgccaaatatgtcctggggtataaaactttcctcgcctgacaaccactggtctgtagggatttttggctacacacaaaccagtatcgctcatagatcagcaaaccggggcctactagagtctgaacagctgtaatctatgaattctaagtgaaattttaaaaattgttaatttttcctatattgcattaattttaaaaaataaatctgaggcaaata

SEQ ID NO: 320784 - DNA, 1811 bp, Homo sapiens
gacgcagtggtggattctggagcggggcggtgacgtggggcgggttctggggcggggcggtgacgcggagcgtgttctggggcggcgcggtgatgggaggcttggccctgggggcggggcgaggcgcagaggtgcgtcctgagggcggggcggtgacgcaagagcgactcctgggggcggggcgaggccttggagatgcgtccggaggcggtggggagcgaagactgacccggggccgtgacgcgggggcaggccctggggcgggggcgggtcctggggactggggcgggcggccgaggcccggaagcggactgaggcggcctggagtcttagttggctactcgccatggacgaagcggatcggcggctcctgcggcggtgccggctgcggctggtggaagagctgcaggtggaccagctctgggacgccctgctgagccgcgagctgttcaggccccatatgatcgaggacatccagcgggcaggctctggatctcggcgggatcaggccaggcagctgatcatagatctggagactcgagggagtcaggctcttcctttgttcatctcctgcttagaggacacaggccaggacatgctggcttcgtttctgcgaactaacaggcaagcagcaaagttgtcgaagccaaccctagaaaaccttaccccagtggtgctcagaccagagattcgcaaaccagaggttctcagaccggaaacacccagaccagtggacattggttctggaggatttggtgatgtcgagcagaaagaccatgggtttgaggtggcctccacttcccctgaagacgagtcccctggcagtaaccccgagccagatgccaccccgttccaggaaggtttgaggaccttcgaccagctggacgccatatctagtttgcccacacccagtgacatctttgtgtcctactctactttcccaggttttgtttcctggagggaccccaagagtggctcctggtacgttgagaccctggacgacatctttgagcagtgggctcactctgaagacctgcagtccctcctgcttagggtcgctaatgctgtttcggtgaaagggatttataaacagatgcctggttgctttaatttcctccggaaaaaacttttctttaaaacatcataaggccagggcccctcaccctgccttatcttgcaccccaaagctttcctgccccaggcctgaaagaggctgaggcctggactttcctgcaactcaaggactttgcagccggcacagggtctgctctttctctgccagtgacagacaggctcttagcagcttccagattgacgacaagtgctgaacagtggaggaagagggacagatgaatgccgtggattgcacgtggcctcttgagcagtggctggtccagggctagtgacttgtgtcccatgatccctgtgttgtctctagagcagggattaacctctgcactactgacatgtggggccaggtcaccctttgctgtgaggctgtcctgtacattgtgggatgttcagcactgtcccttgcctcaatgccagtaacgcgtcttcctgagtggtgccaaacaaaaaggttctcaggtgttgccaaatatgtcctggggtataaaactttcctcgcctgacaaccactggtctgtagggatttttggctacacacaaaccagtatcgctcatagatcagcaaaccggggcctactagagtctgaacagctgtaatctatgaattctaagtgaaattttaaaaattgttaatttttcctatattgcattaattttaaaaaataaatctgaggcaaata

SEQ ID NO: 320785 - DNA, 1827 bp, Homo sapiens
gacgcagtggtggattctggagcggggcggtgacgtggggcgggttctggggcggggcggtgacgcggagcgtgttctggggcggcgcggtgatgggaggcttggccctgggggcggggcgaggcgcagaggtgcgtcctgagggcggggcggtgacgcaagagcgactcctgggggcggggcgaggccttggagatgcgtccggaggcggtggggagcgaagactgacccggggccgtgacgcgggggcaggccctggggcgggggcgggtcctggggactggggcgggcggccgaggcccggaagcggactgaggcggcctggagtcttagttggctactcgccatggacgaagcggatcggcggctcctgcggcggtgccggctgcggctggtggaagagctgcaggtggaccagctctgggacgccctgctgagccgcgagctgttcaggccccatatgatcgaggacatccagcgggcaggctctggatctcggcgggatcaggccaggcagctgatcatagatctggagactcgagggagtcaggctcttcctttgttcatctcctgcttagaggacacaggccaggacatgctggcttcgtttctgcgaactaacaggcaagcagcaaagttgtcgaagccaaccctagaaaaccttaccccagtggtgctcagaccagagattcgcaaaccagaggttctcagaccggaaacacccagaccagtggacattggttctggaggatttggtgatgtcgagcagaaagaccatgggtttgaggtggcctccacttcccctgaagacgagtcccctggcagtaaccccgagccagatgccaccccgttccaggaaggtttgaggaccttcgaccagctggacgccatatctagtttgcccacacccagtgacatctttgtgtcctactctactttcccaggttttgtttcctggagggaccccaagagtggctcctggtacgttgagaccctggacgacatctttgagcagtgggctcactctgaagacctgcagtccctcctgcttagggtcgctaatgctgtttcggtgaaagggatttataaacagatgcctggttgctttaatttcctccggaaaaaacttttctttaaaacatcataaggccagggcccctcaccctgccttatcttgcaccccaaagctttcctgccccaggcctgaaagaggctgaggcctggactttcctgcaactcaaggactttgcagccggcacagggtctgctctttctctgccagtgacagacaggctcttagcagcttccagattgacgacaagtgctgaacagtggaggaagagggacagatgaatgccgtggattgcacgtggcctcttgagcagtggctggtccagggctagtgacttgtgtcccatgatccctgtgttgtctctagagcagggattaacctctgcactactgacatgtggggccaggtcaccctttgctgtgaggctgtcctgtacattgtgggatgttcagcactgtcccttgcctcaatgccagtaacgcgtcttcctgagtggtgccaaacaaaaaggttctcaggtgttgccaaatatgtcctggggtataaaactttcctcgcctgacaaccactggtctgtagggatttttggctacacacaaaccagtatcgctcatagatcagcaaaccggggcctactagagtctgaacagctgtaatctatgaattctaagtgaaattttaaaaattgttaatttttcctatatgaataacctctctatatctgagcatatgccgtgcctgttgggtgatgtggt

SEQ ID NO: 320786 - DNA, 2081 bp, Homo sapiens
gacgcagtggtggattctggagcggggcggtgacgtggggcgggttctggggcggggcggtgacgcggagcgtgttctggggcggcgcggtgatgggaggcttggccctgggggcggggcgaggcgcagaggtgcgtcctgagggcggggcggtgacgcaagagcgactcctgggggcggggcgaggccttggagatgcgtccggaggcggtggggagcgaagactgacccggggccgtgacgcgggggcaggccctggggcgggggcgggtcctggggactggggcgggcggccgaggcccggaagcggactgaggcggcctggagtcttagttggctactcgccatggacgaagcggatcggcggctcctgcggcggtgccggctgcggctggtggaagagctgcaggtggaccagctctgggacgccctgctgagccgcgagctgttcaggccccatatgatcgaggacatccagcgggcaggctctggatctcggcgggatcaggccaggcagctgatcatagatctggagactcgagggagtcaggctcttcctttgttcatctcctgcttagaggacacaggccaggacatgctggcttcgtttctgcgaactaacaggcaagcagcaaagttgtcgaagccaaccctagaaaaccttaccccagtggtgctcagaccagagattcgcaaaccagaggttctcagaccggaaacacccagaccagtggacattggttctggaggatttggtgatgtcggtgctcttgagagtttgaggggaaatgcagatttggcttacatcctgagcatggagccctgtggccactgcctcattatcaacaatgtgaacttctgccgtgagtccgggctccgcacccgcactggctccaacatcgactgtgagaagttgcggcgtcgcttctcctcgctgcatttcatggtggaggtgaagggcgacctgactgccaagaaaatggtgctggctttgctggagctggcgcagcaggaccacggtgctctggactgctgcgtggtggtcattctctctcacggctgtcaggccagccacctgcagttcccaggggctgtctacggcacagatggatgccctgtgtcggtcgagaagattgtgaacatcttcaatgggaccagctgccccagcctgggagggaagcccaagctctttttcatccaggcctgtggtgggggttttgtttcctggagggaccccaagagtggctcctggtacgttgagaccctggacgacatctttgagcagtgggctcactctgaagacctgcagtccctcctgcttagggtcgctaatgctgtttcggtgaaagggatttataaacagatgcctggttgctttaatttcctccggaaaaaacttttctttaaaacatcataaggccagggcccctcaccctgccttatcttgcaccccaaagctttcctgccccaggcctgaaagaggctgaggcctggactttcctgcaactcaaggactttgcagccggcacagggtctgctctttctctgccagtgacagacaggctcttagcagcttccagattgacgacaagtgctgaacagtggaggaagagggacagatgaatgccgtggattgcacgtggcctcttgagcagtggctggtccagggctagtgacttgtgtcccatgatccctgtgttgtctctagagcagggattaacctctgcactactgacatgtggggccaggtcaccctttgctgtgaggctgtcctgtacattgtgggatgttcagcactgtcccttgcctcaatgccagtaacgcgtcttcctgagtggtgccaaacaaaaaggttctcaggtgttgccaaatatgtcctggggtataaaactttcctcgcctgacaaccactggtctgtagggatttttggctacacacaaaccagtatcgctcatagatcagcaaaccggggcctactagagtctgaacagctgtaatctatgaattctaagtgaaattttaaaaattgttaatttttcctatattgcattaattttaaaaaataaatctgaggcaaata

SEQ ID NO: 320787 - DNA, 1122 bp, Homo sapiens
gacgcagtggtggattctggagcggggcggtgacgtggggcgggttctggggcggggcggtgacgcggagcgtgttctggggcggcgcggtgatgggaggcttggccctgggggcggggcgaggcgcagaggtgcgtcctgagggcggggcggtgacgcaagagcgactcctgggggcggggcgaggccttggagatgcgtccggaggcggtggggagcgaagactgacccggggccgtgacgcgggggcaggccctggggcgggggcgggtcctggggactggggcgggcggccgaggcccggaagcggactgaggcggcctggagtcttagttggctactcgccatggacgaagcggatcggcggctcctgcggcggtgccggctgcggctggtggaagagctgcaggtggaccagctctgggacgccctgctgagccgcgagctgttcaggccccatatgatcgaggacatccagcgggcaggctctggatctcggcgggatcaggccaggcagctgatcatagatctggagactcgagggagtcaggctcttcctttgttcatctcctgcttagaggacacaggccaggacatgctggcttcgtttctgcgaactaacaggcaagcagcaaagttgtcgaagccaaccctagaaaaccttaccccagtggtgctcagaccagagattcgcaaaccagaggttctcagaccggaaacacccagaccagtggacattggttctggaggatttggtgatgtcggtgctcttgagagtttgaggggaaatgcagatttggcttacatcctgagcatggagccctgtggccactgcctcattatcaacaatgtgaacttctgccgtgagtccgggctccgcacccgcactggctccaacatcgactgtgagaagttgcggcgtcgcttctcctcgctgcatttcatggtggaggtgaagggcgacctgactgccaagaggggctggcttttggattgttgaggtgtatatctgggagcagagatcatgaatagctcagggcagtgaatggcgcaccacgagcagggctgtgtgtgggagctgcagccaggattgcctcagctccgtcccccttgtccagactt

SEQ ID NO: 320788 - DNA, 689 bp, Homo sapiens
gccaaagagagagagagagggagtttgagaatccaggcagaaatgtcacgcaatatttaaactcacgtatctaagcaatcacgactataaacacctctactttgaatcggacgctgctaccgtcaatgaaattgtgctcaaggttaactacatcctggaatcgcgagctagcactgcccgggctgactactttgctcaaaaacaaagaaaactgaacagacgtacgagcttcagcttccagaaggagaagaaatccgggcagcagtgacactggcctccagcctcaatctgttccgtagctcagagcctgcctgccagggccaagtgccctagagcccacccggtgtcctgaagtcctcggggggaggccagcccctggctcactggcacagggcaggtgggctctcggggaaggtgtcgggggccccctaggagggagcgctggggacattgccatgggacggaagtctgcttggcagtggctttgataagcgatgcttgggggtcagaccaccccctagaggagccacgtgccgcccagccaccttcaatgcctgccaccctgcccgaggatgtacagagccgtgcccacacatttccttgcaacttgatcaaatttcttaaagcaaacaacaaaaatgtacatttctgtttttccttttaataaacaggtgtactctttatcatgg

SEQ ID NO: 320789 - DNA, 2212 bp, Homo sapiens
ggaacgccggggtgtggttccgggtcgtgtgcggctcggggtaatagggctgctgctcggccggccggcggcggcgagcagcaggggcatgagggctaacccgggaagcggcagctgagcgggccgggaggagcgccggtccccgtggatcccgagagtgcagagctcggggcaggggccgggaggcgtgggggagccgggccctcccctcaggaacgtgtcccggggccgacccggcccgtagtgtggaagcagcttcaggtaggtgagctcgtgaaacaatatgaagaggagaaaatagccttttaaggaaattggcccacagaaaggatggccttcttggacaatccaactatcattctagctcatattcgacagtcacatgtgaccagtgatgacacgggaatgtgtgagatggttctcattgatcatgatgttgacctagagaagattcatcctccttcaatgcctggagacagtgggtcagaaattcagggaagcaatggtgagactcagggctatgtatatgcccagtcagtcgatattacctcaagttgggactttggtattagaagacgctcaaacacagctcaaagattagaacgactccgaaaagagagacaaaaccagatcaaatgcaaaaatattcagtggaaagaaagaaattctaagcaatcagcccaggagttaaagtcactgtttgaaaaaaaatctctcaaagagaagcctccaatttctgggaagcagtcgatattatctgtacgcctagaacagtgccctctgcagctgaataacccttttaacgagtattccaaatttgatggcaagggtcatgtaggtacaacagcaaccaagaagatcgatgtctacctccctctgcactcgagccaggacagactgctgccaatgaccgtggtgacaatggccagcgccagggtgcaggacctgatcgggctcatctgctggcagtatacaagcgaaggacgggagccgaagctcaatgacaatgtcagtgcctactgcctgcatattgctgaggatgatggggaggtggacaccgatttccccccgctggattccaatgagcccattcataagtttggcttcagtactttggccctggttgaaaagtactcatctcctggtctgacatccaaagagtcactctttgttcgaataaatgctgctcatggattctcccttattcaggtggacaacacaaaggttaccatgaaggaaatcttactgaaggcagtgaagcgaagaaaaggatcccagaaagtttcaggttcaagggcagacggggtttttgaggaggattcgcaaattgacatagccacagtacaggatatgcttagcagccaccattacaagtcattcaaagtcagcatgatccacagactgcgattcacaaccgacgtacagctaggtatctctggagacaaagtagagatagaccctgttacgaatcagaaagccagcactaagttttggattaagcagaaacccatctcaatcgattccgacctgctctgtgcctgtgaccttgctgaagagaaaagccccagtcacgcaatatttaaactcacgtatctaagcaatcacgactataaacacctctactttgaatcggacgctgctaccgtcaatgaaattgtgctcaaggttaactacatcctggaatcgcgagctagcactgcccgggctgactactttgctcaaaaacaaagaaaactgaacagacgtacgagcttcagcttccagaaggagaagaaatccgggcagcagtgacactggcctccagcctcaatctgttccgtagctcagagcctgcctgccagggccaagtgccctagagcccacccggtgtcctgaagtcctcggggggaggccagcccctggctcactggcacagggcaggtgggctctcggggaaggtgtcgggggccccctaggagggagcgctggggacattgccatgggacggaagtctgcttggcagtggctttgataagcgatgcttgggggtcagaccaccccctagaggagccacgtgccgcccagccaccttcaatgcctgccaccctgcccgaggatgtacagagccgtgcccacacatttccttgcaacttgatcaaatttcttaaagcaaacaacaaaaatgtacatttctgtttttccttttaataaacaggtgtactctttatcatgg

SEQ ID NO: 320790 - DNA, 580 bp, Homo sapiens
ggtactttgcgggcaacctggcctccggcggtgcggcggcgcgactccctctgcttcgtgtacccgctggatttcgccagaacccgcctggcagcggacgtgggaaagtcaggcacagagcgcgagttccgaggcctgggagactgcctggtgcagtgacactggcctccagcctcaatctgttccgtagctcagagcctgcctgccagggccaagtgccctagagcccacccggtgtcctgaagtcctcggggggaggccagcccctggctcactggcacagggcaggtgggctctcggggaaggtgtcgggggccccctaggagggagcgctggggacattgccatgggacggaagtctgcttggcagtggctttgataagcgatgcttgggggtcagaccaccccctagaggagccacgtgccgcccagccaccttcaatgcctgccaccctgcccgaggatgtacagagccgtgcccacacatttccttgcaacttgatcaaatttcttaaagcaaacaacaaaaatgtacatttctgtttttccttttaataaacaggtgtactctttatcatgg

SEQ ID NO: 320791 - DNA, 482 bp, Homo sapiens
gtacggctgtaaatagcctctctgtgttggatccatgttatatctaagaaggcttgtttcttaataccctctcatatagtttgggggggttccccaccctcaactcacccacccaggaaaccagactatgcaacttgtgtgtgccatttggagtgtccttatgtttgtctcaggaagcccgtggcattccccaaagccctaagaaagagctcacgttcatgcaatttcagatttataaaacaggtcaaatgatttccctgaaatcacttacaccttctacttcttgtgttttcttttgtgtcctcaccttgggcttacaggtatctctggagacaaagtagagatagaccctgttacgaatcagaaagccagcactaagttttggattaagcagaaacccatctcaatcgattccgacctgctctgtgcctgtgaccttgctgaagagaaaagccccagtgagtagtcccttttatttatgt

SEQ ID NO: 320792 - DNA, 281 bp, Homo sapiens
gactttaacactttactaaggctttatcagcttttcaccagtatgtggtgttttttaaatgttaaattcgctgtttcagacttcctcccctcctcctgcccctttgatcttccaggccctcagtaccgcctggagaagcagagcgagcccaatgtcgccgttgacctggacagcactttggagagccagagcgcatgggagttctgcctggtccgcgagaacagtacgttgcccctcgctccatgcccgcttgtcctatatactaggcgggtccaggctca

SEQ ID NO: 320793 - DNA, 3389 bp, Homo sapiens
ggaacgccggggtgtggttccgggtcgtgtgcggctcggggtaatagggctgctgctcggccggccggcggcggcgagcagcaggggcatgagggctaacccgggaagcggcagctgagcgggccgggaggagcgccggtccccgtggatcccgagagtgcagagctcggggcaggggccgggaggcgtgggggagccgggccctcccctcaggaacgtgtcccggggccgacccggcccgtagtgtggaagcagcttcaggtaggtgagctcgtgaaacaatatgaagaggagaaaatagccttttaaggaaattggcccacagaaaggatggccttcttggacaatccaactatcattctagctcatattcgacagtcacatgtgaccagtgatgacacgggaatgtgtgagatggttctcattgatcatgatgttgacctagagaagattcatcctccttcaatgcctggagacagtgggtcagaaattcagggaagcaatggtgagactcagggctatgtatatgcccagtcagtcgatattacctcaagttgggactttggtattagaagacgctcaaacacagctcaaagattagaacgactccgaaaagagagacaaaaccagatcaaatgcaaaaatattcagtggaaagaaagaaattctaagcaatcagcccaggagttaaagtcactgtttgaaaaaaaatctctcaaagagaagcctccaatttctgggaagcagtcgatattatctgtacgcctagaacagtgccctctgcagctgaataacccttttaacgagtattccaaatttgatggcaagggtcatgtaggtacaacagcaaccaagaagatcgatgtctacctccctctgcactcgagccaggacagactgctgccaatgaccgtggtgacaatggccagcgccagggtgcaggacctgatcgggctcatctgctggcagtatacaagcgaaggacgggagccgaagctcaatgacaatgtcagtgcctactgcctgcatattgctgaggatgatggggaggtggacaccgatttccccccgctggattccaatgagcccattcataagtttggcttcagtactttggccctggttgaaaagtactcatctcctggtctgacatccaaagagtcactctttgttcgaataaatgctgctcatggattctcccttattcaggtggacaacacaaaggttaccatgaaggaaatcttactgaaggcagtgaagcgaagaaaaggatcccagaaagtttcaggccctcagtaccgcctggagaagcagagcgagcccaatgtcgccgttgacctggacagcactttggagagccagagcgcatgggagttctgcctggtccgcgagaacagttcaagggcagacggggtttttgaggaggattcgcaaattgacatagccacagtacaggatatgcttagcagccaccattacaagtcattcaaagtcagcatgatccacagactgcgattcacaaccgacgtacagctaggtatctctggagacaaagtagagatagaccctgttacgaatcagaaagccagcactaagttttggattaagcagaaacccatctcaatcgattccgacctgctctgtgcctgtgaccttgctgaagagaaaagccccagtcacgcaatatttaaactcacgtatctaagcaatcacgactataaacacctctactttgaatcggacgctgctaccgtcaatgaaattgtgctcaaggttaactacatcctggaatcgcgagctagcactgcccgggctgactactttgctcaaaaacaaagaaaactgaacagacgtacgagcttcagcttccagaaggagaagaaatccgggcagcagtgacactggcctccagcctcaatctgttccgtagctcagagcctgcctgccagggccaagtgccctagagcccacccggtgtcctgaagtcctcggggggaggccagcccctggctcactggcacagggcaggtgggctctcggggaaggtgtcgggggccccctaggagggagcgctggggacattgccatgggacggaagtctgcttggcagtggctttgataagcgatgcttgggggtcagaccaccccctagaggagccacgtgccgcccagccaccttcaatgcctgccaccctgcccgaggatgtacagagccgtgcccacacatttccttgcaacttgatcaaatttcttaaagcaaacaacaaaaatgtacatttctgtttttccttttaataaacaggtgtactctttatcatggttggtatgatggaccattctttggggcggaggattgattatgttactctctttaaaatctgttcccatattgaacaggcagattggaaaagctatggttcgatttctcagaagaaatgtttaggtcttagtcaatagttttaactatgccatttgtttaaatgagtgcatttgcttcgagggtagtgtcttactaaaagttaggaacagagacctagtggtgtgtccaaggccgtgtcactttccccttcagcacaccccagcttctgacctcagagcccaggagctgcgtggacagtgtggggtgccaggaggaggggcggtggctggtcctcaggcacgctgcactcccagccagacatggtctttccgtttcttaagtagcaagtgtaggtttcagctggcagttccacctgcatgttctctgcttcgctgccttggaagggcccacattccccattcctcttctccttacagcgcctgcctcctttttcaagcaggcggaaagctgctgtttctcacgtttcagggagaggggtgagcggagggagacctgtgtccgtgccgtccggctccctgggtgggaacaggcaagggatcagatgcccctgacaccacgcctctggccacaccagatgcctctgcagtcctcgacagcctcttcagtgtccctcctgcggtgatgtccttactgtccccagccagggccggggaccggtgtttcactgaggacctgcattagaaacattttttaaattgttgtacaggaagagatgtgtctaaaacagcatcttaaagctgagtgtatttctttgcacaaggggtcatgctgatgaattcttctttcattctgatctttgttcagccaacaggagcgtccttttctaatgtcttccattcctaccccccacccaaaaacaaaagaaatatttgtagcttgctatctgtatttgaatttttagcaattttatatttagatactttgaaaaatgtaaatgactaatttggtcattaaatcttgtgacatattcgatattaaaatgatattaaaataaaagtcatataaatac

SEQ ID NO: 320794 - DNA, 3722 bp, Homo sapiens
ggaacgccggggtgtggttccgggtcgtgtgcggctcggggtaatagggctgctgctcggccggccggcggcggcgagcagcaggggcatgagggctaacccgggaagcggcagctgagcgggccgggaggagcgccggtccccgtggatcccgagagtgcagagctcggggcaggggccgggaggcgtgggggagccgggccctcccctcaggaacgtgtcccggggccgacccggcccgtagtgtggaagcagcttcaggtaggtgagctcgtgaaacaatatgaagaggagaaaatagccttttaaggaaattggcccacagaaaggatggccttcttggacaatccaactatcattctagctcatattcgacagtcacatgtgaccagtgatgacacgggaatgtgtgagatggttctcattgatcatgatgttgacctagagaagattcatcctccttcaatgcctggagacagtgggtcagaaattcagggaagcaatggtgagactcagggctatgtatatgcccagtcagtcgatattacctcaagttgggactttggtattagaagacgctcaaacacagctcaaagattagaacgactccgaaaagagagacaaaaccagatcaaatgcaaaaatattcagtggaaagaaagaaattctaagcaatcagcccaggagttaaagtcactgtttgaaaaaaaatctctcaaagagaagcctccaatttctgggaagcagtcgatattatctgtacgcctagaacagtgccctctgcagctgaataacccttttaacgagtattccaaatttgatggcaagggtcatgtaggtacaacagcaaccaagaagatcgatgtctacctccctctgcactcgagccaggacagactgctgccaatgaccgtggtgacaatggccagcgccagggtgcaggacctgatcgggctcatctgctggcagtatacaagcgaaggacgggagccgaagctcaatgacaatgtcagtgcctactgcctgcatattgctgaggatgatggggaggtggacaccgatttccccccgctggattccaatgagcccattcataagtttggcttcagtactttggccctggttgaaaagtactcatctcctggtctgacatccaaagagtcactctttgttcgaataaatgctgctcatggattctcccttattcaggtggacaacacaaaggttaccatgaaggaaatcttactgaaggcagtgaagcgaagaaaaggatcccagaaagtttcaggccctcagtaccgcctggagaagcagagcgagcccaatgtcgccgttgacctggacagcactttggagagccagagcgcatgggagttctgcctggtccgcgagaacagttcaagggcagacggggtttttgaggaggattcgcaaattgacatagccacagtacaggatatgcttagcagccaccattacaagtcattcaaagtcagcatgatccacagactgcgattcacaaccgacgtacagctaggtatctctggagacaaagtagagatagaccctgttacgaatcagaaagccagcactaagttttggattaagcagaaacccatctcaatcgattccgacctgctctgtgcctgtgaccttgctgaagagaaaagccccagtcacgcaatatttaaactcacgtatctaagcaatcacgactataaacacctctactttgaatcggacgctgctaccgtcaatgaaattgtgctcaaggttaactacatcctggaatcgcgagctagcactgcccgggctgactactttgctcaaaaacaaagaaaactgaacagacgtacgagcttcagcttccagaaggagaagaaatccgggcagcagtgacactggcctccagcctcaatctgttccgtagctcagagcctgcctgccagggccaagtgccctagagcccacccggtgtcctgaagtcctcggggggaggccagcccctggctcactggcacagggcaggtgggctctcggggaaggtgtcgggggccccctaggagggagcgctggggacattgccatgggacggaagtctgcttggcagtggctttgataagcgatgcttgggggtcagaccaccccctagaggagccacgtgccgcccagccaccttcaatgcctgccaccctgcccgaggatgtacagagccgtgcccacacatttccttgcaacttgatcaaatttcttaaagcaaacaacaaaaatgtacatttctgtttttccttttaataaacaggtgtactctttatcatggttggtatgatggaccattctttggggcggaggattgattatgttactctctttaaaatctgttcccatattgaacaggcagattggaaaagctatggttcgatttctcagaagaaatgtttaggtcttagtcaatagttttaactatgccatttgtttaaatgagtgcatttgcttcgagggtagtgtcttactaaaagttaggaacagagacctagtggtgtgtccaaggccgtgtcactttccccttcagcacaccccagcttctgacctcagagcccaggagctgcgtggacagtgtggggtgccaggaggaggggcggtggctggtcctcaggcacgctgcactcccagccagacatggtctttccgtttcttaagtagcaagtgtaggtttcagctggcagttccacctgcatgttctctgcttcgctgccttggaagggcccacattccccattcctcttctccttacagcgcctgcctcctttttcaagcaggcggaaagctgctgtttctcacgtttcagggagaggggtgagcggagggagacctgtgtccgtgccgtccggctccctgggtgggaacaggcaagggatcagatgcccctgacaccacgcctctggccacaccagatgcctctgcagtcctcgacagcctcttcagtgtccctcctgcggtgatgtccttactgtccccagccagggccggggaccggtgtttcactgaggacctgcattagaaacattttttaaattgttgtacaggaagagatgtgtctaaaacagcatcttaaagctgagtgtatttctttgcacaaggggtcatgctgatgaattcttctttcattctgatctttgttcagccaacaggagcgtccttttctaatgtcttccattcctaccccccacccaaaaacaaaagaaatatttgtagcttgctatctgtatttgaatttttagcaattttatatttagatactttgaaaaatgtaaatgactaatttggtcattaaatcttgtgacatattcgatattaaaatgatattaaaataaaagtcatataaataccaaaaaaaaaaaaaaaaaaaaaaacccttttgcggcgcgcgcctgggccccggaaaaagctcttccagaaacccatccgttgggcggcagcgagcgcccattagcggtaagtgtgagacactgtgcgccatagcgctggttccccaaggagaaaacccggggccaggagacatagggcgcctggggattttctcccccatttaaaaaagacgccgcggggggaacacgcaagggtttctgaacccaatttcccaatatgggagtcccgggaggtcactacagcggtttctaatcaacggggagttcccagggcaagctgaatttccatagccc

SEQ ID NO: 320795 - DNA, 3362 bp, Homo sapiens
ggaacgccggggtgtggttccgggtcgtgtgcggctcggggtaatagggctgctgctcggccggccggcggcggcgagcagcaggggcatgagggctaacccgggaagcggcagctgagcgggccgggaggagcgccggtccccgtggatcccgagagtgcagagctcggggcaggggccgggaggcgtgggggagccgggccctcccctcaggaacgtgtcccggggccgacccggcccgtagtgtggaagcagcttcaggtaggtgagctcgtgaaacaatatgaagaggagaaaatagccttttaaggaaattggcccacagaaaggatggccttcttggacaatccaactatcattctagctcatattcgacagtcacatgtgaccagtgatgacacgggaatgtgtgagatggttctcattgatcatgatgttgacctagagaagattcatcctccttcaatgcctggagacagtgggtcagaaattcagggaagcaatggtgagactcagggctatgtatatgcccagtcagtcgatattacctcaagttgggactttggtattagaagacgctcaaacacagctcaaagattagaacgactccgaaaagagagacaaaaccagatcaaatgcaaaaatattcagtggaaagaaagaaattctaagcaatcagcccaggagttaaagtcactgtttgaaaaaaaatctctcaaagagaagcctccaatttctgggaagcagtcgatattatctgtacgcctagaacagtgccctctgcagctgaataacccttttaacgagtattccaaatttgatggcaagggtcatgtaggtacaacagcaaccaagaagatcgatgtctacctccctctgcactcgagccaggacagactgctgccaatgaccgtggtgacaatggccagcgccagggtgcaggacctgatcgggctcatctgctggcagtatacaagcgaaggacgggagccgaagctcaatgacaatgtcagtgcctactgcctgcatattgctgaggatgatggggaggtggacaccgatttccccccgctggattccaatgagcccattcataagtttggcttcagtactttggccctggttgaaaagtactcatctcctggtctgacatccaaagagtcactctttgttcgaataaatgctgctcatggattctcccttattcaggtggacaacacaaaggttaccatgaaggaaatcttactgaaggcagtgaagcgaagaaaaggatcccagaaagtttcaggccctcagtaccgcctggagaagcagagcgagcccaatgtcgccgttgacctggacagcactttggagagccagagcgcatgggagttctgcctggtccgcgagaacagttcaagggcagacggggtttttgaggaggattcgcaaattgacatagccacagtacaggatatgcttagcagccaccattacaagtcattcaaagtcagcatgatccacagactgcgattcacaaccgacgtacagctaggtatctctggagacaaagtagagatagaccctgttacgaatcagaaagccagcactaagttttggattaagcagaaacccatctcaatcgattccgacctgctctgtgcctgtgaccttgctgaagagaaaagccccagtcacgcaatatttaaactcacgtatctaagcaatcacgactataaacacctctactttgaatcggacgctgctaccgtcaatgaaattgtgctcaaggttaactacatcctggaatcgcgagctagcactgcccgggctgactactttgctcaaaaacaaagaaaactgaacagacgtacgagcttcagcttccagaaggagaagaaatccgggcagcagtgacactggcctccagcctcaatctgttccgtagctcagagcctgcctgccagggccaagtgccctagagcccacccggtgtcctgaagtcctcggggggaggccagcccctggctcactggcacagggcaggtgggctctcggggaaggtgtcgggggccccctaggagggagcgctggggacattgccatgggacggaagtctgcttggcagtggctttgataagcgatgcttgggggtcagaccaccccctagaggagccacgtgccgcccagccaccttcaatgcctgccaccctgcccgaggatgtacagagccgtgcccacacatttccttgcaacttgatcaaatttcttaaagcaaacaacaaaaatgtacatttctgtttttccttttaataaacaggtgtactctttatcatggttggtatgatggaccattctttggggcggaggattgattatgttactctctttaaaatctgttcccatattgaacaggcagattggaaaagctatggttcgatttctcagaagaaatgtttaggtcttagtcaatagttttaactatgccatttgtttaaatgagtgcatttgcttcgagggtagtgtcttactaaaagttaggaacagagacctagtggtgtgtccaaggccgtgtcactttccccttcagcacaccccagcttctgacctcagagcccaggagctgcgtggacagtgtggggtgccaggaggaggggcggtggctggtcctcaggcacgctgcactcccagccagacatggtctttccgtttcttaagtagcaagtgtaggtttcagctggcagttccacctgcatgttctctgcttcgctgccttggaagggcccacattccccattcctcttctccttacagcgcctgcctcctttttcaagcaggcggaaagctgctgtttctcacgtttcagggagaggggtgagcggagggagacctgtgtccgtgccgtccggctccctgggtgggaacaggcaagggatcagatgcccctgacaccacgcctctggccacaccagatgcctctgcagtcctcgacagcctcttcagtgtccctcctgcggtgatgtccttactgtccccagccagggccggggaccggtgtttcactgaggacctgcattagaaacattttttaaattgttgtacaggaagagatgtgtctaaaacagcataaggggtcatgctgatgaattcttctttcattctgatctttgttcagccaacaggagcgtccttttctaatgtcttccattcctaccccccacccaaaaacaaaagaaatatttgtagcttgctatctgtatttgaatttttagcaattttatatttagatactttgaaaaatgtaaatgactaatttggtcattaaatcttgtgacatattcgatattaaaatgatattaaaataaaagtcatataaatac

SEQ ID NO: 320796 - DNA, 3061 bp, Homo sapiens
ggaacgccggggtgtggttccgggtcgtgtgcggctcggggtaatagggctgctgctcggccggccggcggcggcgagcagcaggggcatgagggctaacccgggaagcggcagctgagcgggccgggaggagcgccggtccccgtggatcccgagagtgcagagctcggggcaggggccgggaggcgtgggggagccgggccctcccctcaggaacgtgtcccggggccgacccggcccgtagtgtggaagcagcttcagctcaaagattagaacgactccgaaaagagagacaaaaccagatcaaatgcaaaaatattcagtggaaagaaagaaattctaagcaatcagcccaggagttaaagtcactgtttgaaaaaaaatctctcaaagagaagcctccaatttctgggaagcagtcgatattatctgtacgcctagaacagtgccctctgcagctgaataacccttttaacgagtattccaaatttgatggcaagggtcatgtaggtacaacagcaaccaagaagatcgatgtctacctccctctgcactcgagccaggacagactgctgccaatgaccgtggtgacaatggccagcgccagggtgcaggacctgatcgggctcatctgctggcagtatacaagcgaaggacgggagccgaagctcaatgacaatgtcagtgcctactgcctgcatattgctgaggatgatggggaggtggacaccgatttccccccgctggattccaatgagcccattcataagtttggcttcagtactttggccctggttgaaaagtactcatctcctggtctgacatccaaagagtcactctttgttcgaataaatgctgctcatggattctcccttattcaggtggacaacacaaaggttaccatgaaggaaatcttactgaaggcagtgaagcgaagaaaaggatcccagaaagtttcaggccctcagtaccgcctggagaagcagagcgagcccaatgtcgccgttgacctggacagcactttggagagccagagcgcatgggagttctgcctggtccgcgagaacagttcaagggcagacggggtttttgaggaggattcgcaaattgacatagccacagtacaggatatgcttagcagccaccattacaagtcattcaaagtcagcatgatccacagactgcgattcacaaccgacgtacagctaggtatctctggagacaaagtagagatagaccctgttacgaatcagaaagccagcactaagttttggattaagcagaaacccatctcaatcgattccgacctgctctgtgcctgtgaccttgctgaagagaaaagccccagtcacgcaatatttaaactcacgtatctaagcaatcacgactataaacacctctactttgaatcggacgctgctaccgtcaatgaaattgtgctcaaggttaactacatcctggaatcgcgagctagcactgcccgggctgactactttgctcaaaaacaaagaaaactgaacagacgtacgagcttcagcttccagaaggagaagaaatccgggcagcagtgacactggcctccagcctcaatctgttccgtagctcagagcctgcctgccagggccaagtgccctagagcccacccggtgtcctgaagtcctcggggggaggccagcccctggctcactggcacagggcaggtgggctctcggggaaggtgtcgggggccccctaggagggagcgctggggacattgccatgggacggaagtctgcttggcagtggctttgataagcgatgcttgggggtcagaccaccccctagaggagccacgtgccgcccagccaccttcaatgcctgccaccctgcccgaggatgtacagagccgtgcccacacatttccttgcaacttgatcaaatttcttaaagcaaacaacaaaaatgtacatttctgtttttccttttaataaacaggtgtactctttatcatggttggtatgatggaccattctttggggcggaggattgattatgttactctctttaaaatctgttcccatattgaacaggcagattggaaaagctatggttcgatttctcagaagaaatgtttaggtcttagtcaatagttttaactatgccatttgtttaaatgagtgcatttgcttcgagggtagtgtcttactaaaagttaggaacagagacctagtggtgtgtccaaggccgtgtcactttccccttcagcacaccccagcttctgacctcagagcccaggagctgcgtggacagtgtggggtgccaggaggaggggcggtggctggtcctcaggcacgctgcactcccagccagacatggtctttccgtttcttaagtagcaagtgtaggtttcagctggcagttccacctgcatgttctctgcttcgctgccttggaagggcccacattccccattcctcttctccttacagcgcctgcctcctttttcaagcaggcggaaagctgctgtttctcacgtttcagggagaggggtgagcggagggagacctgtgtccgtgccgtccggctccctgggtgggaacaggcaagggatcagatgcccctgacaccacgcctctggccacaccagatgcctctgcagtcctcgacagcctcttcagtgtccctcctgcggtgatgtccttactgtccccagccagggccggggaccggtgtttcactgaggacctgcattagaaacattttttaaattgttgtacaggaagagatgtgtctaaaacagcatcttaaagctgagtgtatttctttgcacaaggggtcatgctgatgaattcttctttcattctgatctttgttcagccaacaggagcgtccttttctaatgtcttccattcctaccccccacccaaaaacaaaagaaatatttgtagcttgctatctgtatttgaatttttagcaattttatatttagatactttgaaaaatgtaaatgactaatttggtcattaaatcttgtgacatattcgatattaaaatgatattaaaataaaagtcatataaatac

SEQ ID NO: 320797 - DNA, 3577 bp, Homo sapiens
ggaacgccggggtgtggttccgggtcgtgtgcggctcggggtaatagggctgctgctcggccggccggcggcggcgagcagcaggggcatgagggctaacccgggaagcggcagctgagcgggccgggaggagcgccggtccccgtggatcccgagagtgcagagctcggggcaggggccgggaggcgtgggggagccgggccctcccctcaggaacgtgtcccggggccgacccggcccgtagtgtggaagcagcttcagggttcttgctctattgaccaggctggagtgcagtggcacgatcacggctcactgcagcctcaacttcctggactcaagcgatcctcccacctcttcctccccagcagctgggactacaggcatgcactaccacggcctcccaaattgttgggattgtaagcatgaaccactgcatctggccaggcctggtaggtgagctcgtgaaacaatatgaagaggagaaaatagccttttaaggaaattggcccacagaaaggatggccttcttggacaatccaactatcattctagctcatattcgacagtcacatgtgaccagtgatgacacgggaatgtgtgagatggttctcattgatcatgatgttgacctagagaagattcatcctccttcaatgcctggagacagtgggtcagaaattcagggaagcaatggtgagactcagggctatgtatatgcccagtcagtcgatattacctcaagttgggactttggtattagaagacgctcaaacacagctcaaagattagaacgactccgaaaagagagacaaaaccagatcaaatgcaaaaatattcagtggaaagaaagaaattctaagcaatcagcccaggagttaaagtcactgtttgaaaaaaaatctctcaaagagaagcctccaatttctgggaagcagtcgatattatctgtacgcctagaacagtgccctctgcagctgaataacccttttaacgagtattccaaatttgatggcaagggtcatgtaggtacaacagcaaccaagaagatcgatgtctacctccctctgcactcgagccaggacagactgctgccaatgaccgtggtgacaatggccagcgccagggtgcaggacctgatcgggctcatctgctggcagtatacaagcgaaggacgggagccgaagctcaatgacaatgtcagtgcctactgcctgcatattgctgaggatgatggggaggtggacaccgatttccccccgctggattccaatgagcccattcataagtttggcttcagtactttggccctggttgaaaagtactcatctcctggtctgacatccaaagagtcactctttgttcgaataaatgctgctcatggattctcccttattcaggtggacaacacaaaggttaccatgaaggaaatcttactgaaggcagtgaagcgaagaaaaggatcccagaaagtttcaggccctcagtaccgcctggagaagcagagcgagcccaatgtcgccgttgacctggacagcactttggagagccagagcgcatgggagttctgcctggtccgcgagaacagttcaagggcagacggggtttttgaggaggattcgcaaattgacatagccacagtacaggatatgcttagcagccaccattacaagtcattcaaagtcagcatgatccacagactgcgattcacaaccgacgtacagctaggtatctctggagacaaagtagagatagaccctgttacgaatcagaaagccagcactaagttttggattaagcagaaacccatctcaatcgattccgacctgctctgtgcctgtgaccttgctgaagagaaaagccccagtcacgcaatatttaaactcacgtatctaagcaatcacgactataaacacctctactttgaatcggacgctgctaccgtcaatgaaattgtgctcaaggttaactacatcctggaatcgcgagctagcactgcccgggctgactactttgctcaaaaacaaagaaaactgaacagacgtacgagcttcagcttccagaaggagaagaaatccgggcagcagtgacactggcctccagcctcaatctgttccgtagctcagagcctgcctgccagggccaagtgccctagagcccacccggtgtcctgaagtcctcggggggaggccagcccctggctcactggcacagggcaggtgggctctcggggaaggtgtcgggggccccctaggagggagcgctggggacattgccatgggacggaagtctgcttggcagtggctttgataagcgatgcttgggggtcagaccaccccctagaggagccacgtgccgcccagccaccttcaatgcctgccaccctgcccgaggatgtacagagccgtgcccacacatttccttgcaacttgatcaaatttcttaaagcaaacaacaaaaatgtacatttctgtttttccttttaataaacaggtgtactctttatcatggttggtatgatggaccattctttggggcggaggattgattatgttactctctttaaaatctgttcccatattgaacaggcagattggaaaagctatggttcgatttctcagaagaaatgtttaggtcttagtcaatagttttaactatgccatttgtttaaatgagtgcatttgcttcgagggtagtgtcttactaaaagttaggaacagagacctagtggtgtgtccaaggccgtgtcactttccccttcagcacaccccagcttctgacctcagagcccaggagctgcgtggacagtgtggggtgccaggaggaggggcggtggctggtcctcaggcacgctgcactcccagccagacatggtctttccgtttcttaagtagcaagtgtaggtttcagctggcagttccacctgcatgttctctgcttcgctgccttggaagggcccacattccccattcctcttctccttacagcgcctgcctcctttttcaagcaggcggaaagctgctgtttctcacgtttcagggagaggggtgagcggagggagacctgtgtccgtgccgtccggctccctgggtgggaacaggcaagggatcagatgcccctgacaccacgcctctggccacaccagatgcctctgcagtcctcgacagcctcttcagtgtccctcctgcggtgatgtccttactgtccccagccagggccggggaccggtgtttcactgaggacctgcattagaaacattttttaaattgttgtacaggaagagatgtgtctaaaacagcatcttaaagctgagtgtatttctttgcacaaggggtcatgctgatgaattcttctttcattctgatctttgttcagccaacaggagcgtccttttctaatgtcttccattcctaccccccacccaaaaacaaaagaaatatttgtagcttgctatctgtatttgaatttttagcaattttatatttagatactttgaaaaatgtaaatgactaatttggtcattaaatcttgtgacatattcgatattaaaatgatattaaaataaaagtcatataaatac

SEQ ID NO: 320798 - DNA, 3218 bp, Homo sapiens
aattccggaaggtgctgcacagctgtggcggcgggtactgcgttagtgattagagtttcttccctgccggaggtgggatacacggtagcatcatggtcgaggaggtacagaaacattctgtacacacccttgtgttcaggtcgttgaagaggacccatgacatgtttgtagctgataatggaaaacctgtgcctttagatgaagagagtcacaaacgaaaaatggcaatcaagcttcgtaatgagtatggtcctgtgttgcatatgcctacttcaaaagaaaatcttaaagagaagggtcctcagaatgcaacggattcatatgttcataaacagtaccctgccaatcaaggacaagaagttgaatactttgtggcaggtacacatccatacccaccaggacctggggttgctttgacagcagatactaagatccagagaatgccaagtgaatcagctgcacagtccttagcggtggcattacctttgcagaccaaggctgatgcaaacccaggagttaaagtcactgtttgaaaaaaaatctctcaaagagaagcctccaatttctgggaagcagtcgatattatctgtacgcctagaacagtgccctctgcagctgaataacccttttaacgagtattccaaatttgatggcaagggtcatgtaggtacaacagcaaccaagaagatcgatgtctacctccctctgcactcgagccaggacagactgctgccaatgaccgtggtgacaatggccagcgccagggtgcaggacctgatcgggctcatctgctggcagtatacaagcgaaggacgggagccgaagctcaatgacaatgtcagtgcctactgcctgcatattgctgaggatgatggggaggtggacaccgatttccccccgctggattccaatgagcccattcataagtttggcttcagtactttggccctggttgaaaagtactcatctcctggtctgacatccaaagagtcactctttgttcgaataaatgctgctcatggattctcccttattcaggtggacaacacaaaggttaccatgaaggaaatcttactgaaggcagtgaagcgaagaaaaggatcccagaaagtttcaggccctcagtaccgcctggagaagcagagcgagcccaatgtcgccgttgacctggacagcactttggagagccagagcgcatgggagttctgcctggtccgcgagaacagttcaagggcagacggggtttttgaggaggattcgcaaattgacatagccacagtacaggatatgcttagcagccaccattacaagtcattcaaagtcagcatgatccacagactgcgattcacaaccgacgtacagctaggtatctctggagacaaagtagagatagaccctgttacgaatcagaaagccagcactaagttttggattaagcagaaacccatctcaatcgattccgacctgctctgtgcctgtgaccttgctgaagagaaaagccccagtcacgcaatatttaaactcacgtatctaagcaatcacgactataaacacctctactttgaatcggacgctgctaccgtcaatgaaattgtgctcaaggttaactacatcctggaatcgcgagctagcactgcccgggctgactactttgctcaaaaacaaagaaaactgaacagacgtacgagcttcagcttccagaaggagaagaaatccgggcagcagtgacactggcctccagcctcaatctgttccgtagctcagagcctgcctgccagggccaagtgccctagagcccacccggtgtcctgaagtcctcggggggaggccagcccctggctcactggcacagggcaggtgggctctcggggaaggtgtcgggggccccctaggagggagcgctggggacattgccatgggacggaagtctgcttggcagtggctttgataagcgatgcttgggggtcagaccaccccctagaggagccacgtgccgcccagccaccttcaatgcctgccaccctgcccgaggatgtacagagccgtgcccacacatttccttgcaacttgatcaaatttcttaaagcaaacaacaaaaatgtacatttctgtttttccttttaataaacaggtgtactctttatcatggttggtatgatggaccattctttggggcggaggattgattatgttactctctttaaaatctgttcccatattgaacaggcagattggaaaagctatggttcgatttctcagaagaaatgtttaggtcttagtcaatagttttaactatgccatttgtttaaatgagtgcatttgcttcgagggtagtgtcttactaaaagttaggaacagagacctagtggtgtgtccaaggccgtgtcactttccccttcagcacaccccagcttctgacctcagagcccaggagctgcgtggacagtgtggggtgccaggaggaggggcggtggctggtcctcaggcacgctgcactcccagccagacatggtctttccgtttcttaagtagcaagtgtaggtttcagctggcagttccacctgcatgttctctgcttcgctgccttggaagggcccacattccccattcctcttctccttacagcgcctgcctcctttttcaagcaggcggaaagctgctgtttctcacgtttcagggagaggggtgagcggagggagacctgtgtccgtgccgtccggctccctgggtgggaacaggcaagggatcagatgcccctgacaccacgcctctggccacaccagatgcctctgcagtcctcgacagcctcttcagtgtccctcctgcggtgatgtccttactgtccccagccagggccggggaccggtgtttcactgaggacctgcattagaaacattttttaaattgttgtacaggaagagatgtgtctaaaacagcatcttaaagctgagtgtatttctttgcacaaggggtcatgctgatgaattcttctttcattctgatctttgttcagccaacaggagcgtccttttctaatgtcttccattcctaccccccacccaaaaacaaaagaaatatttgtagcttgctatctgtatttgaatttttagcaattttatatttagatactttgaaaaatgtaaatgactaatttggtcattaaatcttgtgacatattcgatattaaaatgatattaaaataaaagtcatataaatac

SEQ ID NO: 320799 - DNA, 2614 bp, Homo sapiens
gctaggtacgaggctcggtgttattttacgagtattccaaatttgatggcaagggtcatgtaggtacaacagcaaccaagaagatcgatgtctacctccctctgcactcgagccaggacagactgctgccaatgaccgtggtgacaatggccagcgccagggtgcaggacctgatcgggctcatctgctggcagtatacaagcgaaggacgggagccgaagctcaatgacaatgtcagtgcctactgcctgcatattgctgaggatgatggggaggtggacaccgatttccccccgctggattccaatgagcccattcataagtttggcttcagtactttggccctggttgaaaagtactcatctcctggtctgacatccaaagagtcactctttgttcgaataaatgctgctcatggattctcccttattcaggtggacaacacaaaggttaccatgaaggaaatcttactgaaggcagtgaagcgaagaaaaggatcccagaaagtttcaggccctcagtaccgcctggagaagcagagcgagcccaatgtcgccgttgacctggacagcactttggagagccagagcgcatgggagttctgcctggtccgcgagaacagttcaagggcagacggggtttttgaggaggattcgcaaattgacatagccacagtacaggatatgcttagcagccaccattacaagtcattcaaagtcagcatgatccacagactgcgattcacaaccgacgtacagctaggtatctctggagacaaagtagagatagaccctgttacgaatcagaaagccagcactaagttttggattaagcagaaacccatctcaatcgattccgacctgctctgtgcctgtgaccttgctgaagagaaaagccccagtcacgcaatatttaaactcacgtatctaagcaatcacgactataaacacctctactttgaatcggacgctgctaccgtcaatgaaattgtgctcaaggttaactacatcctggaatcgcgagctagcactgcccgggctgactactttgctcaaaaacaaagaaaactgaacagacgtacgagcttcagcttccagaaggagaagaaatccgggcagcagtgacactggcctccagcctcaatctgttccgtagctcagagcctgcctgccagggccaagtgccctagagcccacccggtgtcctgaagtcctcggggggaggccagcccctggctcactggcacagggcaggtgggctctcggggaaggtgtcgggggccccctaggagggagcgctggggacattgccatgggacggaagtctgcttggcagtggctttgataagcgatgcttgggggtcagaccaccccctagaggagccacgtgccgcccagccaccttcaatgcctgccaccctgcccgaggatgtacagagccgtgcccacacatttccttgcaacttgatcaaatttcttaaagcaaacaacaaaaatgtacatttctgtttttccttttaataaacaggtgtactctttatcatggttggtatgatggaccattctttggggcggaggattgattatgttactctctttaaaatctgttcccatattgaacaggcagattggaaaagctatggttcgatttctcagaagaaatgtttaggtcttagtcaatagttttaactatgccatttgtttaaatgagtgcatttgcttcgagggtagtgtcttactaaaagttaggaacagagacctagtggtgtgtccaaggccgtgtcactttccccttcagcacaccccagcttctgacctcagagcccaggagctgcgtggacagtgtggggtgccaggaggaggggcggtggctggtcctcaggcacgctgcactcccagccagacatggtctttccgtttcttaagtagcaagtgtaggtttcagctggcagttccacctgcatgttctctgcttcgctgccttggaagggcccacattccccattcctcttctccttacagcgcctgcctcctttttcaagcaggcggaaagctgctgtttctcacgtttcagggagaggggtgagcggagggagacctgtgtccgtgccgtccggctccctgggtgggaacaggcaagggatcagatgcccctgacaccacgcctctggccacaccagatgcctctgcagtcctcgacagcctcttcagtgtccctcctgcggtgatgtccttactgtccccagccagggccggggaccggtgtttcactgaggacctgcattagaaacattttttaaattgttgtacaggaagagatgtgtctaaaacagcatcttaaagctgagtgtatttctttgcacaaggggtcatgctgatgaattcttctttcattctgatctttgttcagccaacaggagcgtccttttctaatgtcttccattcctaccccccacccaaaaacaaaagaaatatttgtagcttgctatctgtatttgaatttttagcaattttatatttagatactttgaaaaatgtaaatgactaatttggtcattaaatcttgtgacatattcgatattaaaatgatattaaaataaaagtcatataaatac

SEQ ID NO: 320800 - DNA, 2319 bp, Homo sapiens
  misc_feature (38)..(38): n is a, c, g, or t
  misc_feature (46)..(47): n is a, c, g, or t
  misc_feature (55)..(55): n is a, c, g, or t
agggggagggggcgaagggcggagggggcgggaaacgntacggagnngtgcggtncaccttaccaatgagcccattcataagtttggcttcagtactttggccctggttgaaaagtactcatctcctggtctgacatccaaagagtcactctttgttcgaataaatgctgctcatggattctcccttattcaggtggacaacacaaaggttaccatgaaggaaatcttactgaaggcagtgaagcgaagacccaatgtcgccgttgacctggacagcactttggagagccagagcgcatgggagttctgcctggtccgcgagaacagttcaagggcagacggggtttttgaggaggattcgcaaattgacatagccacagtacaggatatgcttagcagccaccattacaagtcattcaaagtcagcatgatccacagactgcgattcacaaccgacgtacagctaggtatctctggagacaaagtagagatagaccctgttacgaatcagaaagccagcactaagttttggattaagcagaaacccatctcaatcgattccgacctgctctgtgcctgtgaccttgctgaagagaaaagccccagtcacgcaatatttaaactcacgtatctaagcaatcacgactataaacacctctactttgaatcggacgctgctaccgtcaatgaaattgtgctcaaggttaactacatcctggaatcgcgagctagcactgcccgggctgactactttgctcaaaaacaaagaaaactgaacagacgtacgagcttcagcttccagaaggagaagaaatccgggcagcagtgacactggcctccagcctcaatctgttccgtagctcagagcctgcctgccagggccaagtgccctagagcccacccggtgtcctgaagtcctcggggggaggccagcccctggctcactggcacagggcaggtgggctctcggggaaggtgtcgggggccccctaggagggagcgctggggacattgccatgggacggaagtctgcttggcagtggctttgataagcgatgcttgggggtcagaccaccccctagaggagccacgtgccgcccagccaccttcaatgcctgccaccctgcccgaggatgtacagagccgtgcccacacatttccttgcaacttgatcaaatttcttaaagcaaacaacaaaaatgtacatttctgtttttccttttaataaacaggtgtactctttatcatggttggtatgatggaccattctttggggcggaggattgattatgttactctctttaaaatctgttcccatattgaacaggcagattggaaaagctatggttcgatttctcagaagaaatgtttaggtcttagtcaatagttttaactatgccatttgtttaaatgagtgcatttgcttcgagggtagtgtcttactaaaagttaggaacagagacctagtggtgtgtccaaggccgtgtcactttccccttcagcacaccccagcttctgacctcagagcccaggagctgcgtggacagtgtggggtgccaggaggaggggcggtggctggtcctcaggcacgctgcactcccagccagacatggtctttccgtttcttaagtagcaagtgtaggtttcagctggcagttccacctgcatgttctctgcttcgctgccttggaagggcccacattccccattcctcttctccttacagcgcctgcctcctttttcaagcaggcggaaagctgctgtttctcacgtttcagggagaggggtgagcggagggagacctgtgtccgtgccgtccggctccctgggtgggaacaggcaagggatcagatgcccctgacaccacgcctctggccacaccagatgcctctgcagtcctcgacagcctcttcagtgtccctcctgcggtgatgtccttactgtccccagccagggccggggaccggtgtttcactgaggacctgcattagaaacattttttaaattgttgtacaggaagagatgtgtctaaaacagcatcttaaagctgagtgtatttctttgcacaaggggtcatgctgatgaattcttctttcattctgatctttgttcagccaacaggagcgtccttttctaatgtcttccattcctaccccccacccaaaaacaaaagaaatatttgtagcttgctatctgtatttgaatttttagcaattttatatttagatactttgaaaaatgtaaatgactaatttggtcattaaatcttgtgacatattcgatattaaaatgatattaaaataaaagtcatataaatac

SEQ ID NO: 320801 - DNA, 2051 bp, Homo sapiens
gacaccatttgccaagcctcatgtatctttatgtgttaaactgccttttcctccccaggttcaagggcagacggggtttttgaggaggattcgcaaattgacatagccacagtacaggatatgcttagcagccaccattacaagtcattcaaagtcagcatgatccacagactgcgattcacaaccgacgtacagctaggtatctctggagacaaagtagagatagaccctgttacgaatcagaaagccagcactaagttttggattaagcagaaacccatctcaatcgattccgacctgctctgtgcctgtgaccttgctgaagagaaaagccccagtcacgcaatatttaaactcacgtatctaagcaatcacgactataaacacctctactttgaatcggacgctgctaccgtcaatgaaattgtgctcaaggttaactacatcctggaatcgcgagctagcactgcccgggctgactactttgctcaaaaacaaagaaaactgaacagacgtacgagcttcagcttccagaaggagaagaaatccgggcagcagtgacactggcctccagcctcaatctgttccgtagctcagagcctgcctgccagggccaagtgccctagagcccacccggtgtcctgaagtcctcggggggaggccagcccctggctcactggcacagggcaggtgggctctcggggaaggtgtcgggggccccctaggagggagcgctggggacattgccatgggacggaagtctgcttggcagtggctttgataagcgatgcttgggggtcagaccaccccctagaggagccacgtgccgcccagccaccttcaatgcctgccaccctgcccgaggatgtacagagccgtgcccacacatttccttgcaacttgatcaaatttcttaaagcaaacaacaaaaatgtacatttctgtttttccttttaataaacaggtgtactctttatcatggttggtatgatggaccattctttggggcggaggattgattatgttactctctttaaaatctgttcccatattgaacaggcagattggaaaagctatggttcgatttctcagaagaaatgtttaggtcttagtcaatagttttaactatgccatttgtttaaatgagtgcatttgcttcgagggtagtgtcttactaaaagttaggaacagagacctagtggtgtgtccaaggccgtgtcactttccccttcagcacaccccagcttctgacctcagagcccaggagctgcgtggacagtgtggggtgccaggaggaggggcggtggctggtcctcaggcacgctgcactcccagccagacatggtctttccgtttcttaagtagcaagtgtaggtttcagctggcagttccacctgcatgttctctgcttcgctgccttggaagggcccacattccccattcctcttctccttacagcgcctgcctcctttttcaagcaggcggaaagctgctgtttctcacgtttcagggagaggggtgagcggagggagacctgtgtccgtgccgtccggctccctgggtgggaacaggcaagggatcagatgcccctgacaccacgcctctggccacaccagatgcctctgcagtcctcgacagcctcttcagtgtccctcctgcggtgatgtccttactgtccccagccagggccggggaccggtgtttcactgaggacctgcattagaaacattttttaaattgttgtacaggaagagatgtgtctaaaacagcatcttaaagctgagtgtatttctttgcacaaggggtcatgctgatgaattcttctttcattctgatctttgttcagccaacaggagcgtccttttctaatgtcttccattcctaccccccacccaaaaacaaaagaaatatttgtagcttgctatctgtatttgaatttttagcaattttatatttagatactttgaaaaatgtaaatgactaatttggtcattaaatcttgtgacatattcgatattaaaatgatattaaaataaaagtcatataaatac

SEQ ID NO: 320802 - DNA, 2172 bp, Homo sapiens
gtacggctgtaaatagcctctctgtgttggatccatgttatatctaagaaggcttgtttcttaataccctctcatatagtttgggggggttccccaccctcaactcacccacccaggaaaccagactatgcaacttgtgtgtgccatttggagtgtccttatgtttgtctcaggaagcccgtggcattccccaaagccctaagaaagagctcacgttcatgcaatttcagatttataaaacaggtcaaatgatttccctgaaatcacttacaccttctacttcttgtgttttcttttgtgtcctcaccttgggcttacaggtatctctggagacaaagtagagatagaccctgttacgaatcagaaagccagcactaagttttggattaagcagaaacccatctcaatcgattccgacctgctctgtgcctgtgaccttgctgaagagaaaagccccagtcacgcaatatttaaactcacgtatctaagcaatcacgactataaacacctctactttgaatcggacgctgctaccgtcaatgaaattgtgctcaaggttaactacatcctggaatcgcgagctagcactgcccgggctgactactttgctcaaaaacaaagaaaactgaacagacgtacgagcttcagcttccagaaggagaagaaatccgggcagcagtgacactggcctccagcctcaatctgttccgtagctcagagcctgcctgccagggccaagtgccctagagcccacccggtgtcctgaagtcctcggggggaggccagcccctggctcactggcacagggcaggtgggctctcggggaaggtgtcgggggccccctaggagggagcgctggggacattgccatgggacggaagtctgcttggcagtggctttgataagcgatgcttgggggtcagaccaccccctagaggagccacgtgccgcccagccaccttcaatgcctgccaccctgcccgaggatgtacagagccgtgcccacacatttccttgcaacttgatcaaatttcttaaagcaaacaacaaaaatgtacatttctgtttttccttttaataaacaggtgtactctttatcatggttggtatgatggaccattctttggggcggaggattgattatgttactctctttaaaatctgttcccatattgaacaggcagattggaaaagctatggttcgatttctcagaagaaatgtttaggtcttagtcaatagttttaactatgccatttgtttaaatgagtgcatttgcttcgagggtagtgtcttactaaaagttaggaacagagacctagtggtgtgtccaaggccgtgtcactttccccttcagcacaccccagcttctgacctcagagcccaggagctgcgtggacagtgtggggtgccaggaggaggggcggtggctggtcctcaggcacgctgcactcccagccagacatggtctttccgtttcttaagtagcaagtgtaggtttcagctggcagttccacctgcatgttctctgcttcgctgccttggaagggcccacattccccattcctcttctccttacagcgcctgcctcctttttcaagcaggcggaaagctgctgtttctcacgtttcagggagaggggtgagcggagggagacctgtgtccgtgccgtccggctccctgggtgggaacaggcaagggatcagatgcccctgacaccacgcctctggccacaccagatgcctctgcagtcctcgacagcctcttcagtgtccctcctgcggtgatgtccttactgtccccagccagggccggggaccggtgtttcactgaggacctgcattagaaacattttttaaattgttgtacaggaagagatgtgtctaaaacagcatcttaaagctgagtgtatttctttgcacaaggggtcatgctgatgaattcttctttcattctgatctttgttcagccaacaggagcgtccttttctaatgtcttccattcctaccccccacccaaaaacaaaagaaatatttgtagcttgctatctgtatttgaatttttagcaattttatatttagatactttgaaaaatgtaaatgactaatttggtcattaaatcttgtgacatattcgatattaaaatgatattaaaataaaagtcatataaatac

SEQ ID NO: 320803 - DNA, 1758 bp, Homo sapiens
gccaaagagagagagagagggagtttgagaatccaggcagaaatgtcacgcaatatttaaactcacgtatctaagcaatcacgactataaacacctctactttgaatcggacgctgctaccgtcaatgaaattgtgctcaaggttaactacatcctggaatcgcgagctagcactgcccgggctgactactttgctcaaaaacaaagaaaactgaacagacgtacgagcttcagcttccagaaggagaagaaatccgggcagcagtgacactggcctccagcctcaatctgttccgtagctcagagcctgcctgccagggccaagtgccctagagcccacccggtgtcctgaagtcctcggggggaggccagcccctggctcactggcacagggcaggtgggctctcggggaaggtgtcgggggccccctaggagggagcgctggggacattgccatgggacggaagtctgcttggcagtggctttgataagcgatgcttgggggtcagaccaccccctagaggagccacgtgccgcccagccaccttcaatgcctgccaccctgcccgaggatgtacagagccgtgcccacacatttccttgcaacttgatcaaatttcttaaagcaaacaacaaaaatgtacatttctgtttttccttttaataaacaggtgtactctttatcatggttggtatgatggaccattctttggggcggaggattgattatgttactctctttaaaatctgttcccatattgaacaggcagattggaaaagctatggttcgatttctcagaagaaatgtttaggtcttagtcaatagttttaactatgccatttgtttaaatgagtgcatttgcttcgagggtagtgtcttactaaaagttaggaacagagacctagtggtgtgtccaaggccgtgtcactttccccttcagcacaccccagcttctgacctcagagcccaggagctgcgtggacagtgtggggtgccaggaggaggggcggtggctggtcctcaggcacgctgcactcccagccagacatggtctttccgtttcttaagtagcaagtgtaggtttcagctggcagttccacctgcatgttctctgcttcgctgccttggaagggcccacattccccattcctcttctccttacagcgcctgcctcctttttcaagcaggcggaaagctgctgtttctcacgtttcagggagaggggtgagcggagggagacctgtgtccgtgccgtccggctccctgggtgggaacaggcaagggatcagatgcccctgacaccacgcctctggccacaccagatgcctctgcagtcctcgacagcctcttcagtgtccctcctgcggtgatgtccttactgtccccagccagggccggggaccggtgtttcactgaggacctgcattagaaacattttttaaattgttgtacaggaagagatgtgtctaaaacagcatcttaaagctgagtgtatttctttgcacaaggggtcatgctgatgaattcttctttcattctgatctttgttcagccaacaggagcgtccttttctaatgtcttccattcctaccccccacccaaaaacaaaagaaatatttgtagcttgctatctgtatttgaatttttagcaattttatatttagatactttgaaaaatgtaaatgactaatttggtcattaaatcttgtgacatattcgatattaaaatgatattaaaataaaagtcatataaatac

SEQ ID NO: 320804 - DNA, 575 bp, Homo sapiens
  misc_feature (137)..(137): n is a, c, g, or t
  misc_feature (208)..(208): n is a, c, g, or t
  misc_feature (214)..(214): n is a, c, g, or t
  misc_feature (221)..(221): n is a, c, g, or t
ggggggggggggggggggggggggggggggggggggggggggggggggggggggggggggggggggggggggggggggggggggggggggggggggggggggggggggggggggggggggggggggggggggggggnggggggggggggggggggggggggggggggggggggggggggggggggggggggggggggggggggggggnggattnggttttnggtgtttcactgaggacctgcattagaaacattttttaaattgttgtacaggaagagatgtgtctaaaacagcatcttaaagctgagtgtatttctttgcacaaggggtcatgctgatgaattcttctttcattctgatctttgttcagccaacaggagcgtccttttctaatgtcttccattcctaccccccacccaaaaacaaaagaaatatttgtagcttgctatctgtatttgaatttttagcaattttatatttagatactttgaaaaatgtaaatgactaatttggtcattaaatcttgtgacatattcgatattaaaatgatattaaaataaaagtcatataaatac

SEQ ID NO: 320805 - DNA, 908 bp, Homo sapiens
ggaacgccggggtgtggttccgggtcgtgtgcggctcggggtaatagggctgctgctcggccggccggcggcggcgagcagcaggggcatgagggctaacccgggaagcggcagctgagcgggccgggaggagcgccggtccccgtggatcccgagagtgcagagctcggggcaggggccgggaggcgtgggggagccgggccctcccctcaggaacgtgtcccggggccgacccggcccgtagtgtggaagcagcttcagattaggaagacccataataaattacacagctggtaggagacagagccaggattcaaacccaggtaggtgagctcgtgaaacaatatgaagaggagaaaatagccttttaaggaaattggcccacagaaaggatggccttcttggacaatccaactatcattctagctcatattcgacagtcacatgtgaccagtgatgacacgggaatgtgtgagatggttctcattgatcatgatgttgacctagagaagattcatcctccttcaatgcctggagacagtgggtcagaaattcagggaagcaatggtgagactcagggctatgtatatgcccagtcagtcgatattacctcaagttgggactttggtattagaagacgctcaaacacagctcaaagattagaacgactccgaaaagagagacaaaaccagatcaaatgcaaaaatattcagtggaaagaaagaaattctaagcaatcagcccaggagttaaagtcactgtttgaaaaaaaatctctcaaagagaagcctccaatttctgggaagcagtcgatattatctgtacgcctagaacagtgccctctgcagctgaataacccttttaacgagtattccaaatttgatggcaaggtaagtaaaaatgagact

SEQ ID NO: 320806 - DNA, 492 bp, Homo sapiens
  misc_feature (232)..(232): n is a, c, g, or t
  misc_feature (261)..(261): n is a, c, g, or t
  misc_feature (321)..(321): n is a, c, g, or t
  misc_feature (325)..(325): n is a, c, g, or t
  misc_feature (332)..(332): n is a, c, g, or t
  misc_feature (360)..(360): n is a, c, g, or t
  misc_feature (487)..(487): n is a, c, g, or t
ggaacgccggggtgtggttccgggtcgtgtgcggctcggggtaatagggctgctgctcggccggccggcggcggcgagcagcaggggcatgagggctaacccgggaagcggcagctgagcgggccgggaggagcgccggtccccgtggatcccgagagtgcagagctcggggcaggggccgggaggcgtgggggagccgggccctcccctcaggaacgtgtccccccccccnccccccccccccccctccccccccccccntccccccccccttccccccccccccccccccccccccccccccccccccccccccccccncccnccccccntccccccccccccccccccccccccccnccccccccccccccccccccccccccccccccccccccccccccccccccccccccccccccccccccccccccccccccccccccccccttccccttccccccccccccccccccccccccccccncccaa

SEQ ID NO: 320807 - DNA, 3209 bp, Homo sapiens
ggaacgccggggtgtggttccgggtcgtgtgcggctcggggtaatagggctgctgctcggccggccggcggcggcgagcagcaggggcatgagggctaacccgggaagcggcagctgagcgggccgggaggagcgccggtccccgtggatcccgagagtgcagagctcggggcaggggccgggaggcgtgggggagccgggccctcccctcaggaacgtgtcccggggccgacccggcccgtagtgtggaagcagcttcaggtaggtgagctcgtgaaacaatatgaagaggagaaaatagccttttaaggaaattggcccacagaaaggatggccttcttggacaatccaactatcattctagctcatattcgacagtcacatgtgaccagtgatgacacgggaatgtgtgagatggttctcattgatcatgatgttgacctagagaagattcatcctccttcaatgcctggagacagtgggtcagaaattcagggaagcaatggtgagactcagggctatgtatatgcccagtcagtcgatattacctcaagttgggactttggtattagaagacgctcaaacacagctcaaagattagaacgactccgaaaagagagacaaaaccagatcaaatgcaaaaatattcagtggaaagaaagaaattctaagcaatcagcccaggagttaaagtcactgtttgaaaaaaaatctctcaaagagaagcctccaatttctgggaagcagtcgatattatctgtacgcctagaacagtgccctctgcagctgaataacccttttaacgagtattccaaatttgatggcaagggtcatgtaggtacaacagcaaccaagaagatcgatgtctacctccctctgcactcgagccaggacagactgctgccaatgaccgtggtgacaatggccagcgccagggtgcaggacctgatcgggctcatctgctggcagtatacaagcgaaggacgggagccgaagctcaatgacaatgtcagtgcctactgcctgcatattgctgaggatgatggggaggtggacaccgatttccccccgctggattccaatgagcccattcataagtttggcttcagtactttggccctggttgaaaagtactcatctcctggtctgacatccaaagagtcactctttgttcgaataaatgctgctcatggattctcccttattcaggtggacaacacaaaggttaccatgaaggaaatcttactgaaggcagtgaagcgaagaaaaggatcccagaaagtttcaggccctcagtaccgcctggagaagcagagcgagcccaatgtcgccgttgacctggacagcactttggagagccagagcgcatgggagttctgcctggtccgcgagaacagttcaagggcagacggggtttttgaggaggattcgcaaattgacatagccacagtacaggatatgcttagcagccaccattacaagtcattcaaagtcagcatgatccacagactgcgattcacaaccgacgtacagctaggtatctctggagacaaagtagagatagaccctgttacgaatcagaaagccagcactaagttttggattaagcagaaacccatctcaatcgattccgacctgctctgtgcctgtgaccttgctgaagagaaaagccccagtcacgcaatatttaaactcacgtatctaagcaatcacgactataaacacctctactttgaatcggacgctgctaccgtcaatgaaattgtgctcaaggttaactacatcctggaatcgcgagctagcactgcccgggctgactactttgctcaaaaacaaagaaaactgaacagacgtacgagcttcagcttccagaaggagaagaaatccgggcagcagtgacactggcctccagcctcaatctgttccgtagctcagagcctgcctgccagggccaagtgccctagagcccacccggtgtcctgaagtcctcggggggaggccagcccctggctcactggcacagggcaggtgggctctcggggaaggtgtcgggggccccctaggagggagcgctggggacattgccatgggacggaagtctgcttggcagtggctttgataagcgatgcttgggggtcagaccaccccctagaggagccacgtgccgcccagccaccttcaatgcctgccaccctgcccgaggatgtacagagccgtgcccacacatttccttgcaacttgatcaaatttcttaaagcaaacaacaaaaatgtacatttctgtttttccttttaataaacaggtgtactctttatcatggttggtatgatggaccattctttggggcggaggattgattatgttactctctttaaaatctgttcccatattgaacaggcagattggaaaagctatggttcgatttctcagaagaaatgtttaggtcttagtcaatagttttaactatgccatttgtttaaatgagtgcatttgcttcgagggtagtgtcttactaaaagttaggaacagagacctagtggtgtgtccaaggccgtgtcactttccccttcagcacaccccagcttctgacctcagagcccaggagctgcgtggacagtgtggggtgccaggaggaggggcggtggctggtcctcaggcacgctgcactcccagccagacatggtctttccgtttcttaagtagcaagtgtaggtttcagctggcagttccacctgcatgttctctgcttcgctgccttggaagggcccacattccccattcctcttctccttacagcgcctgcctcctttttcaagcaggcggaaagctgctgtttctcacgtttcagggagaggggtgtttcactgaggacctgcattagaaacattttttaaattgttgtacaggaagagatgtgtctaaaacagcatcttaaagctgagtgtatttctttgcacaaggggtcatgctgatgaattcttctttcattctgatctttgttcagccaacaggagcgtccttttctaatgtcttccattcctaccccccacccaaaaacaaaagaaatatttgtagcttgctatctgtatttgaatttttagcaattttatatttagatactttgaaaaatgtaaatgactaatttggtcattaaatcttgtgacatattcgatattaaaatgatattaaaataaaagtcatataaatac

SEQ ID NO: 320808 - DNA, 3305 bp, Homo sapiens
ggaacgccggggtgtggttccgggtcgtgtgcggctcggggtaatagggctgctgctcggccggccggcggcggcgagcagcaggggcatgagggctaacccgggaagcggcagctgagcgggccgggaggagcgccggtccccgtggatcccgagagtgcagagctcggggcaggggccgggaggcgtgggggagccgggccctcccctcaggaacgtgtcccggggccgacccggcccgtagtgtggaagcagcttcaggtaggtgagctcgtgaaacaatatgaagaggagaaaatagccttttaaggaaattggcccacagaaaggatggccttcttggacaatccaactatcattctagctcatattcgacagtcacatgtgaccagtgatgacacgggaatgtgtgagatggttctcattgatcatgatgttgacctagagaagattcatcctccttcaatgcctggagacagtgggtcagaaattcagggaagcaatgctcaaagattagaacgactccgaaaagagagacaaaaccagatcaaatgcaaaaatattcagtggaaagaaagaaattctaagcaatcagcccaggagttaaagtcactgtttgaaaaaaaatctctcaaagagaagcctccaatttctgggaagcagtcgatattatctgtacgcctagaacagtgccctctgcagctgaataacccttttaacgagtattccaaatttgatggcaagggtcatgtaggtacaacagcaaccaagaagatcgatgtctacctccctctgcactcgagccaggacagactgctgccaatgaccgtggtgacaatggccagcgccagggtgcaggacctgatcgggctcatctgctggcagtatacaagcgaaggacgggagccgaagctcaatgacaatgtcagtgcctactgcctgcatattgctgaggatgatggggaggtggacaccgatttccccccgctggattccaatgagcccattcataagtttggcttcagtactttggccctggttgaaaagtactcatctcctggtctgacatccaaagagtcactctttgttcgaataaatgctgctcatggattctcccttattcaggtggacaacacaaaggttaccatgaaggaaatcttactgaaggcagtgaagcgaagaaaaggatcccagaaagtttcaggccctcagtaccgcctggagaagcagagcgagcccaatgtcgccgttgacctggacagcactttggagagccagagcgcatgggagttctgcctggtccgcgagaacagttcaagggcagacggggtttttgaggaggattcgcaaattgacatagccacagtacaggatatgcttagcagccaccattacaagtcattcaaagtcagcatgatccacagactgcgattcacaaccgacgtacagctaggtatctctggagacaaagtagagatagaccctgttacgaatcagaaagccagcactaagttttggattaagcagaaacccatctcaatcgattccgacctgctctgtgcctgtgaccttgctgaagagaaaagccccagtcacgcaatatttaaactcacgtatctaagcaatcacgactataaacacctctactttgaatcggacgctgctaccgtcaatgaaattgtgctcaaggttaactacatcctggaatcgcgagctagcactgcccgggctgactactttgctcaaaaacaaagaaaactgaacagacgtacgagcttcagcttccagaaggagaagaaatccgggcagcagtgacactggcctccagcctcaatctgttccgtagctcagagcctgcctgccagggccaagtgccctagagcccacccggtgtcctgaagtcctcggggggaggccagcccctggctcactggcacagggcaggtgggctctcggggaaggtgtcgggggccccctaggagggagcgctggggacattgccatgggacggaagtctgcttggcagtggctttgataagcgatgcttgggggtcagaccaccccctagaggagccacgtgccgcccagccaccttcaatgcctgccaccctgcccgaggatgtacagagccgtgcccacacatttccttgcaacttgatcaaatttcttaaagcaaacaacaaaaatgtacatttctgtttttccttttaataaacaggtgtactctttatcatggttggtatgatggaccattctttggggcggaggattgattatgttactctctttaaaatctgttcccatattgaacaggcagattggaaaagctatggttcgatttctcagaagaaatgtttaggtcttagtcaatagttttaactatgccatttgtttaaatgagtgcatttgcttcgagggtagtgtcttactaaaagttaggaacagagacctagtggtgtgtccaaggccgtgtcactttccccttcagcacaccccagcttctgacctcagagcccaggagctgcgtggacagtgtggggtgccaggaggaggggcggtggctggtcctcaggcacgctgcactcccagccagacatggtctttccgtttcttaagtagcaagtgtaggtttcagctggcagttccacctgcatgttctctgcttcgctgccttggaagggcccacattccccattcctcttctccttacagcgcctgcctcctttttcaagcaggcggaaagctgctgtttctcacgtttcagggagaggggtgagcggagggagacctgtgtccgtgccgtccggctccctgggtgggaacaggcaagggatcagatgcccctgacaccacgcctctggccacaccagatgcctctgcagtcctcgacagcctcttcagtgtccctcctgcggtgatgtccttactgtccccagccagggccggggaccggtgtttcactgaggacctgcattagaaacattttttaaattgttgtacaggaagagatgtgtctaaaacagcatcttaaagctgagtgtatttctttgcacaaggggtcatgctgatgaattcttctttcattctgatctttgttcagccaacaggagcgtccttttctaatgtcttccattcctaccccccacccaaaaacaaaagaaatatttgtagcttgctatctgtatttgaatttttagcaattttatatttagatactttgaaaaatgtaaatgactaatttggtcattaaatcttgtgacatattcgatattaaaatgatattaaaataaaagtcatataaatac

SEQ ID NO: 320809 - DNA, 2971 bp, Homo sapiens
ggaacgccggggtgtggttccgggtcgtgtgcggctcggggtaatagggctgctgctcggccggccggcggcggcgagcagcaggggcatgagggctaacccgggaagcggcagctgagcgggccgggaggagcgccggtccccgtggatcccgagagtgcagagctcggggcaggggccgggaggcgtgggggagccgggccctcccctcaggaacgtgtcccggggccgacccggcccgtagtgtggaagcagcttcagcccaggagttaaagtcactgtttgaaaaaaaatctctcaaagagaagcctccaatttctgggaagcagtcgatattatctgtacgcctagaacagtgccctctgcagctgaataacccttttaacgagtattccaaatttgatggcaagggtcatgtaggtacaacagcaaccaagaagatcgatgtctacctccctctgcactcgagccaggacagactgctgccaatgaccgtggtgacaatggccagcgccagggtgcaggacctgatcgggctcatctgctggcagtatacaagcgaaggacgggagccgaagctcaatgacaatgtcagtgcctactgcctgcatattgctgaggatgatggggaggtggacaccgatttccccccgctggattccaatgagcccattcataagtttggcttcagtactttggccctggttgaaaagtactcatctcctggtctgacatccaaagagtcactctttgttcgaataaatgctgctcatggattctcccttattcaggtggacaacacaaaggttaccatgaaggaaatcttactgaaggcagtgaagcgaagaaaaggatcccagaaagtttcaggccctcagtaccgcctggagaagcagagcgagcccaatgtcgccgttgacctggacagcactttggagagccagagcgcatgggagttctgcctggtccgcgagaacagttcaagggcagacggggtttttgaggaggattcgcaaattgacatagccacagtacaggatatgcttagcagccaccattacaagtcattcaaagtcagcatgatccacagactgcgattcacaaccgacgtacagctaggtatctctggagacaaagtagagatagaccctgttacgaatcagaaagccagcactaagttttggattaagcagaaacccatctcaatcgattccgacctgctctgtgcctgtgaccttgctgaagagaaaagccccagtcacgcaatatttaaactcacgtatctaagcaatcacgactataaacacctctactttgaatcggacgctgctaccgtcaatgaaattgtgctcaaggttaactacatcctggaatcgcgagctagcactgcccgggctgactactttgctcaaaaacaaagaaaactgaacagacgtacgagcttcagcttccagaaggagaagaaatccgggcagcagtgacactggcctccagcctcaatctgttccgtagctcagagcctgcctgccagggccaagtgccctagagcccacccggtgtcctgaagtcctcggggggaggccagcccctggctcactggcacagggcaggtgggctctcggggaaggtgtcgggggccccctaggagggagcgctggggacattgccatgggacggaagtctgcttggcagtggctttgataagcgatgcttgggggtcagaccaccccctagaggagccacgtgccgcccagccaccttcaatgcctgccaccctgcccgaggatgtacagagccgtgcccacacatttccttgcaacttgatcaaatttcttaaagcaaacaacaaaaatgtacatttctgtttttccttttaataaacaggtgtactctttatcatggttggtatgatggaccattctttggggcggaggattgattatgttactctctttaaaatctgttcccatattgaacaggcagattggaaaagctatggttcgatttctcagaagaaatgtttaggtcttagtcaatagttttaactatgccatttgtttaaatgagtgcatttgcttcgagggtagtgtcttactaaaagttaggaacagagacctagtggtgtgtccaaggccgtgtcactttccccttcagcacaccccagcttctgacctcagagcccaggagctgcgtggacagtgtggggtgccaggaggaggggcggtggctggtcctcaggcacgctgcactcccagccagacatggtctttccgtttcttaagtagcaagtgtaggtttcagctggcagttccacctgcatgttctctgcttcgctgccttggaagggcccacattccccattcctcttctccttacagcgcctgcctcctttttcaagcaggcggaaagctgctgtttctcacgtttcagggagaggggtgagcggagggagacctgtgtccgtgccgtccggctccctgggtgggaacaggcaagggatcagatgcccctgacaccacgcctctggccacaccagatgcctctgcagtcctcgacagcctcttcagtgtccctcctgcggtgatgtccttactgtccccagccagggccggggaccggtgtttcactgaggacctgcattagaaacattttttaaattgttgtacaggaagagatgtgtctaaaacagcatcttaaagctgagtgtatttctttgcacaaggggtcatgctgatgaattcttctttcattctgatctttgttcagccaacaggagcgtccttttctaatgtcttccattcctaccccccacccaaaaacaaaagaaatatttgtagcttgctatctgtatttgaatttttagcaattttatatttagatactttgaaaaatgtaaatgactaatttggtcattaaatcttgtgacatattcgatattaaaatgatattaaaataaaagtcatataaatac

SEQ ID NO: 320810 - DNA, 2900 bp, Homo sapiens
ggaacgccggggtgtggttccgggtcgtgtgcggctcggggtaatagggctgctgctcggccggccggcggcggcgagcagcaggggcatgagggctaacccgggaagcggcagctgagcgggccgggaggagcgccggtccccgtggatcccgagagtgcagagctcggggcaggggccgggaggcgtgggggagccgggccctcccctcaggaacgtgtcccggggccgacccggcccgtagtgtggaagcagcttcaggtaggtgagctcgtgaaacaatatgaagaggagaaaatagccttttaaggaaattggcccacagaaaggatggccttcttggacaatccaactatcattctagctcatattcgacagtcacatgtgaccagtgatgacacgggaatgtgtgagatggttctcattgatcatgatgttgacctagagaagattcatcctccttcaatgcctggagacagtgggtcagaaattcagggaagcaatggtgagactcagggctatgtatatgcccagtcagtcgatattacctcaagttgggactttggtattagaagacgctcaaacacagccaatgagcccattcataagtttggcttcagtactttggccctggttgaaaagtactcatctcctggtctgacatccaaagagtcactctttgttcgaataaatgctgctcatggattctcccttattcaggtggacaacacaaaggttaccatgaaggaaatcttactgaaggcagtgaagcgaagaaaaggatcccagaaagtttcaggccctcagtaccgcctggagaagcagagcgagcccaatgtcgccgttgacctggacagcactttggagagccagagcgcatgggagttctgcctggtccgcgagaacagttcaagggcagacggggtttttgaggaggattcgcaaattgacatagccacagtacaggatatgcttagcagccaccattacaagtcattcaaagtcagcatgatccacagactgcgattcacaaccgacgtacagctaggtatctctggagacaaagtagagatagaccctgttacgaatcagaaagccagcactaagttttggattaagcagaaacccatctcaatcgattccgacctgctctgtgcctgtgaccttgctgaagagaaaagccccagtcacgcaatatttaaactcacgtatctaagcaatcacgactataaacacctctactttgaatcggacgctgctaccgtcaatgaaattgtgctcaaggttaactacatcctggaatcgcgagctagcactgcccgggctgactactttgctcaaaaacaaagaaaactgaacagacgtacgagcttcagcttccagaaggagaagaaatccgggcagcagtgacactggcctccagcctcaatctgttccgtagctcagagcctgcctgccagggccaagtgccctagagcccacccggtgtcctgaagtcctcggggggaggccagcccctggctcactggcacagggcaggtgggctctcggggaaggtgtcgggggccccctaggagggagcgctggggacattgccatgggacggaagtctgcttggcagtggctttgataagcgatgcttgggggtcagaccaccccctagaggagccacgtgccgcccagccaccttcaatgcctgccaccctgcccgaggatgtacagagccgtgcccacacatttccttgcaacttgatcaaatttcttaaagcaaacaacaaaaatgtacatttctgtttttccttttaataaacaggtgtactctttatcatggttggtatgatggaccattctttggggcggaggattgattatgttactctctttaaaatctgttcccatattgaacaggcagattggaaaagctatggttcgatttctcagaagaaatgtttaggtcttagtcaatagttttaactatgccatttgtttaaatgagtgcatttgcttcgagggtagtgtcttactaaaagttaggaacagagacctagtggtgtgtccaaggccgtgtcactttccccttcagcacaccccagcttctgacctcagagcccaggagctgcgtggacagtgtggggtgccaggaggaggggcggtggctggtcctcaggcacgctgcactcccagccagacatggtctttccgtttcttaagtagcaagtgtaggtttcagctggcagttccacctgcatgttctctgcttcgctgccttggaagggcccacattccccattcctcttctccttacagcgcctgcctcctttttcaagcaggcggaaagctgctgtttctcacgtttcagggagaggggtgagcggagggagacctgtgtccgtgccgtccggctccctgggtgggaacaggcaagggatcagatgcccctgacaccacgcctctggccacaccagatgcctctgcagtcctcgacagcctcttcagtgtccctcctgcggtgatgtccttactgtccccagccagggccggggaccggtgtttcactgaggacctgcattagaaacattttttaaattgttgtacaggaagagatgtgtctaaaacagcatcttaaagctgagtgtatttctttgcacaaggggtcatgctgatgaattcttctttcattctgatctttgttcagccaacaggagcgtccttttctaatgtcttccattcctaccccccacccaaaaacaaaagaaatatttgtagcttgctatctgtatttgaatttttagcaattttatatttagatactttgaaaaatgtaaatgactaatttggtcattaaatcttgtgacatattcgatattaaaatgatattaaaataaaagtcatataaatac

SEQ ID NO: 320811 - DNA, 1591 bp, Homo sapiens
ggaacgccggggtgtggttccgggtcgtgtgcggctcggggtaatagggctgctgctcggccggccggcggcggcgagcagcaggggcatgagggctaacccgggaagcggcagctgagcgggccgggaggagcgccggtccccgtggatcccgagagtgcagagctcggggcaggggccgggaggcgtgggggagccgggccctcccctcaggaacgtgtcccggggccgacccggcccgtagtgtggaagcagcttcaggtaggtgagctcgtgaaacaatatgaagaggagaaaatagccttttaaggaaattggcccacagaaaggatggccttcttggacaatccaactatcattctagctcatattcgacagtcacatgtgaccagtgatgacacgggaatgtgtgagatggttctcattgatcatgatgttgacctagagaagattcatcctccttcaatgcctggagacagtgggtcagaaattcagggaagcaatggtgagactcagggctatgtatatgcccagtcagtcgatattacctcaagttgggactttggtattagaagacgctcaaacacagctcaaagattagaacgactccgaaaagagagacaaaaccagatcaaatgcaaaaatattcagtggaaagaaagaaattctaagcaatcagcccaggagttaaagtcactgtttgaaaaaaaatctctcaaagagaagcctccaatttctgggaagcagtcgatattatctgtacgcctagaacagtgccctctgcagctgaataacccttttaacgagtattccaaatttgatggcaagggtcatgtaggtacaacagcaaccaagaagatcgatgtctacctccctctgcactcgagccaggacagactgctgccaatgaccgtggtgacaatggccagcgccagggtgcaggacctgatcgggctcatctgctggcagtatacaagcgaaggacgggagccgaagctcaatgacaatgtcagtgcctactgcctgcatattgctgaggatgatggggaggtggacaccgatttccccccgctggattccaatgagcccattcataagtttggcttcagtactttggccctggttgaaaagtactcatctcctggtctgacatccaaagagtcactctttgttcgaataaatgctgctcatggattctcccttattcaggtggacaacacaaaggttaccatgaaggaaatcttactgaaggcagtgaagcgaagaaaaggatcccagaaagtttcaggtgcttgtgactaaattcactaatttcactggctgtcaaggctgtgttaaggaaaatgggtttgaactgctgtgggttttgagtactggactggatgtcagaaacctttgccatcacgggaaattctgtcactctggatttactgtctgttccccacagctaaattcctctgcagtgtgatttagcaccctggatccccatcaaccagttttggcatttatttgaatgcattaccccactggtttccataaactattttacaattgtttaaaataaatgactgtttatttccacaaaaccatc

SEQ ID NO: 320812 - DNA, 648 bp, Homo sapiens
ggaacgccggggtgtggttccgggtcgtgtgcggctcggggtaatagggctgctgctcggccggccggcggcggcgagcagcaggggcatgagggctaacccgggaagcggcagctgagcgggccgggaggagcgccggtccccgtggatcccgagagtgcagagctcggggcaggggccgggaggcgtgggggagccgggccctcccctcaggaacgtgtcccggggccgacccggcccgtagtgtggaagcagcttcaggtaggtgagctcgtgaaacaatatgaagaggagaaaatagccttttaaggaaattggcccacagaaaggatggccttcttggacaatccaactatcattctagctcatattcgacagtcacatgtgaccagtgatgacacgggaatgtgtgagatggttctcattgatcatgatgttgacctagagaagattcatcctccttcaatgcctggagacagtgggtcagaaattcagggaagcaatggtgagactcagggctatgtatatgcccagtcagtcgatattacctcaagttgggactttggtattagaagacgctcaaacacagctcaaagattagaacgactccgaaaagagagacaatccagcagcccaggagtcgacgcg

SEQ ID NO: 320813 - DNA, 119 bp, Homo sapiens
aaaataaggtgctccctaccagacatgaaaatatatatcattagtctagaataaaataaatggtgtagcactggaacaagaatattcaaatgaggaaatcagaatccaaagcccagacc

SEQ ID NO: 320814 - DNA, 2433 bp, Homo sapiens
  misc_feature (2433)..(2433): n is a, c, g, or t
ctccatgggcagcccggcgctagacccaacggggatccaagcagccccggggagagggaggctgcgtctgtatccgggcccaaggtcaccgcgcgaccggcagatgcgtgctgcaggccccggccacatgagcagcgctacggacgcgactgccccggccttggatatgccagatcgagtgtccacccgtccgtgggactggtcgcctgactcggcctgccccagcctctgcttcaccccactggtggccaaatagccgatgtctaatcccccacacaagctcatccccggcctctggcgattgttgggaattctctccctaattcacgcctgaggctcatggagagttgctagacctgggactgccctgggaggcgcacacaaccaggccgggtggcagccaggacctctcccatgtccctgcttttcttgggacagccatggctccaaagccgaagccctgggtacagactgagggccctgagaagaagaagggccggcaggcaggaagggaggaggaccccttccgctccaccgctgaggccctcaaggccatacccgcagagaagcgcataatccgcgtggatccaacatgtccactcagcagcaaccccgggacccaggtgtatgaggactacaactgcaccctgaaccagaccaacatcgagaacaacaacaacaagttctacatcatccagctgctccaagacagcaaccgcttcttcacctgctggaaccgctggggccgtgtgggagaggtcggccagtcaaagatcaaccacttcacaaggctagaagatgcaaagaaggactttgagaagaaatttcgggaaaagaccaagaacaactgggcagagcgggaccactttgtgtctcacccgggcaagtacacacttatcgaagtacaggcagaggatgaggcccaggaagctgtggtgaaggtggacagaggcccagtgaggactgtgactaagcgggtgcagccctgctccctggacccagccacgcagaagctcatcactaacatcttcagcaaggagatgttcaagaacaccatggccctcatggacctggatgtgaagaagatgcccctgggaaagctgagcaagcaacagattgcacggggtttcgaggccttggaggcgctggaggaggccctgaaaggccccacggatggtggccaaagcctggaggagctgtcctcacacttttacaccgtcatcccgcacaacttcggccacagccagcccccgcccatcaattcccctgagcttctgcaggccaagaaggacatgctgctggtgctggcggacatcgagctggcccaggccctgcaggcagtctctgagcaggagaagacggtggaggaggtgccacaccccctggaccgagactaccagcttctcaagtgccagctgcagctgctagactctggagcacctgagtacaaggtgatacagacctacttagaacagactggcagcaaccacaggtgccctacacttcaacacatctggaaagtaaaccaagaaggggaggaagacagattccaggcccactccaaactgggtaatcggaagctgctgtggcatggcaccaacatggccgtggtggccgccatcctcactagtgggctccgcatcatgccacattctggtgggcgtgttggcaagggcatctactttgcctcagagaacagcaagtcagctggatatgttattggcatgaagtgtggggcccaccatgtcggctacatgttcctgggtgaggtggccctgggcagagagcaccatatcaacacggacaaccccagcttgaagagcccacctcctggcttcgacagtgtcattgcccgaggccacaccgagcctgatccgacccaggacactgagttggagctggatggccagcaagtggtggtgccccagggccagcctgtgccctgcccagagttcagcagctccacattctcccagagcgagtacctcatctaccaggagagccagtgtcgcctgcgctacctgctggaggtccacctctgagtgcccgccctgtcccccggggtcctgcaaggctggactgtgatcttcaatcatcctgcccatctctggtacccctatatcactcctttttttcaagaatacaatacgttgttgttaactatagtcaccatgctgtacaagatccctgaacttatgcctcctaactgaaattttgtattctttgacacatctgcccagtccctctcctcccagcccatggtaaccagcatttgactctttacttgtataagggcagcttttataggttccacatgtaagtgagatcatgcagtgtttgtctttctgtgcctggcttatttcactcagcataatgtgcaccgggttcacccatgttttcataaatgacaagatttcctcctaaaaaaaggcn

SEQ ID NO: 320815 - DNA, 2550 bp, Homo sapiens
  misc_feature (2550)..(2550): n is a, c, g, or t
ctccatgggcagcccggcgctagacccaacggggatccaagcagccccggggagagggaggctgcgtctgtatccgggcccaaggtcaccgcgcgaccggcagatgcgtgctgcaggccccggccacatgagcagcgctacggacgcgactgccccggccttggatatgccagatcgagtgtccacccgtccgtgggactggtcgcctgactcggcctgccccagcctctgcttcaccccactggtggccaaatagccgatgtctaatcccccacacaagctcatccccggcctctggcgattgttgggaattctctccctaattcacgcctgaggctcatggagagttgctagacctgggactgccctgggaggcgcacacaaccaggccgggtggcagccaggacctctcccatgtccctgcttttcttggctcggtgactcggcccggcaaccatgccagggctgaactagctgacacagggggaggagccccgaagtggaagagagagagcctcctttcactttccctacccctcaggacacacaggacagccatggctccaaagccgaagccctgggtacagactgagggccctgagaagaagaagggccggcaggcaggaagggaggaggaccccttccgctccaccgctgaggccctcaaggccatacccgcagagaagcgcataatccgcgtggatccaacatgtccactcagcagcaaccccgggacccaggtgtatgaggactacaactgcaccctgaaccagaccaacatcgagaacaacaacaacaagttctacatcatccagctgctccaagacagcaaccgcttcttcacctgctggaaccgctggggccgtgtgggagaggtcggccagtcaaagatcaaccacttcacaaggctagaagatgcaaagaaggactttgagaagaaatttcgggaaaagaccaagaacaactgggcagagcgggaccactttgtgtctcacccgggcaagtacacacttatcgaagtacaggcagaggatgaggcccaggaagctgtggtgaaggtggacagaggcccagtgaggactgtgactaagcgggtgcagccctgctccctggacccagccacgcagaagctcatcactaacatcttcagcaaggagatgttcaagaacaccatggccctcatggacctggatgtgaagaagatgcccctgggaaagctgagcaagcaacagattgcacggggtttcgaggccttggaggcgctggaggaggccctgaaaggccccacggatggtggccaaagcctggaggagctgtcctcacacttttacaccgtcatcccgcacaacttcggccacagccagcccccgcccatcaattcccctgagcttctgcaggccaagaaggacatgctgctggtgctggcggacatcgagctggcccaggccctgcaggcagtctctgagcaggagaagacggtggaggaggtgccacaccccctggaccgagactaccagcttctcaagtgccagctgcagctgctagactctggagcacctgagtacaaggtgatacagacctacttagaacagactggcagcaaccacaggtgccctacacttcaacacatctggaaagtaaaccaagaaggggaggaagacagattccaggcccactccaaactgggtaatcggaagctgctgtggcatggcaccaacatggccgtggtggccgccatcctcactagtgggctccgcatcatgccacattctggtgggcgtgttggcaagggcatctactttgcctcagagaacagcaagtcagctggatatgttattggcatgaagtgtggggcccaccatgtcggctacatgttcctgggtgaggtggccctgggcagagagcaccatatcaacacggacaaccccagcttgaagagcccacctcctggcttcgacagtgtcattgcccgaggccacaccgagcctgatccgacccaggacactgagttggagctggatggccagcaagtggtggtgccccagggccagcctgtgccctgcccagagttcagcagctccacattctcccagagcgagtacctcatctaccaggagagccagtgtcgcctgcgctacctgctggaggtccacctctgagtgcccgccctgtcccccggggtcctgcaaggctggactgtgatcttcaatcatcctgcccatctctggtacccctatatcactcctttttttcaagaatacaatacgttgttgttaactatagtcaccatgctgtacaagatccctgaacttatgcctcctaactgaaattttgtattctttgacacatctgcccagtccctctcctcccagcccatggtaaccagcatttgactctttacttgtataagggcagcttttataggttccacatgtaagtgagatcatgcagtgtttgtctttctgtgcctggcttatttcactcagcataatgtgcaccgggttcacccatgttttcataaatgacaagatttcctcctaaaaaaaggcn

SEQ ID NO: 320816 - DNA, 2632 bp, Homo sapiens
  misc_feature (2632)..(2632): n is a, c, g, or t
ctccatgggcagcccggcgctagacccaacggggatccaagcagccccggggagagggaggctgcgtctgtatccgggcccaaggtcaccgcgcgaccggcagatgcgtgctgcaggccccggccacatgagcagcgctacggacgcgactgccccggccttggatatgccagatcgagtgtccacccgtccgtgggactggtcgcctgactcggcctgccccagcctctgcttcaccccactggtggccaaatagccgatgtctaatcccccacacaagctcatccccggcctctggcgattgttgggaattctctccctaattcacgcctgaggctcatggagagttgctagacctgggactgccctgggaggcgcacacaaccaggccgggtggcagccaggacctctcccatgtccctgcttttcttgggacagccatggctccaaagccgaagccctgggtacagactgagggccctgagaagaagaagggccggcaggcaggaagggaggaggaccccttccgctccaccgctgaggccctcaaggccatacccgcagagaagcgcataatccgcgtggatccaacatgtccactcagcagcaaccccgggacccaggtgtatgaggactacaactgcaccctgaaccagaccaacatcgagaacaacaacaacaagttctacatcatccagctgctccaagacagcaaccgcttcttcacctgctggaaccgctggggccgtgtgggagaggtcggccagtcaaagatcaaccacttcacaaggctagaagatgcaaagaaggactttgagaagaaatttcgggaaaagaccaagaacaactgggcagagcgggaccactttgtgtctcacccgggcaagtacacacttatcgaagtacaggcagaggatgaggcccaggaagctgtggtgaaggtgagatggccaaggaaggtgggcaggccctggactgagggaggggactcgttggagagttcccgctggttgggctctgccactgcccagctgcgcagcctcagccacagaactcccctctggcctcaggctggctggtctctgtctggtgtcacgccctgccccgctgctcctgcccacatgtgccctctatcttcaggtggacagaggcccagtgaggactgtgactaagcgggtgcagccctgctccctggacccagccacgcagaagctcatcactaacatcttcagcaaggagatgttcaagaacaccatggccctcatggacctggatgtgaagaagatgcccctgggaaagctgagcaagcaacagattgcacggggtttcgaggccttggaggcgctggaggaggccctgaaaggccccacggatggtggccaaagcctggaggagctgtcctcacacttttacaccgtcatcccgcacaacttcggccacagccagcccccgcccatcaattcccctgagcttctgcaggccaagaaggacatgctgctggtgctggcggacatcgagctggcccaggccctgcaggcagtctctgagcaggagaagacggtggaggaggtgccacaccccctggaccgagactaccagcttctcaagtgccagctgcagctgctagactctggagcacctgagtacaaggtgatacagacctacttagaacagactggcagcaaccacaggtgccctacacttcaacacatctggaaagtaaaccaagaaggggaggaagacagattccaggcccactccaaactgggtaatcggaagctgctgtggcatggcaccaacatggccgtggtggccgccatcctcactagtgggctccgcatcatgccacattctggtgggcgtgttggcaagggcatctactttgcctcagagaacagcaagtcagctggatatgttattggcatgaagtgtggggcccaccatgtcggctacatgttcctgggtgaggtggccctgggcagagagcaccatatcaacacggacaaccccagcttgaagagcccacctcctggcttcgacagtgtcattgcccgaggccacaccgagcctgatccgacccaggacactgagttggagctggatggccagcaagtggtggtgccccagggccagcctgtgccctgcccagagttcagcagctccacattctcccagagcgagtacctcatctaccaggagagccagtgtcgcctgcgctacctgctggaggtccacctctgagtgcccgccctgtcccccggggtcctgcaaggctggactgtgatcttcaatcatcctgcccatctctggtacccctatatcactcctttttttcaagaatacaatacgttgttgttaactatagtcaccatgctgtacaagatccctgaacttatgcctcctaactgaaattttgtattctttgacacatctgcccagtccctctcctcccagcccatggtaaccagcatttgactctttacttgtataagggcagcttttataggttccacatgtaagtgagatcatgcagtgtttgtctttctgtgcctggcttatttcactcagcataatgtgcaccgggttcacccatgttttcataaatgacaagatttcctcctaaaaaaaggcn

SEQ ID NO: 320817 - DNA, 2261 bp, Homo sapiens
  misc_feature (2261)..(2261): n is a, c, g, or t
ctgagagtgggtcgttggggatgaggagaccatggaggcctaagggcctctctgtgccccaggacagccatggctccaaagccgaagccctgggtacagactgagggccctgagaagaagaagggccggcaggcaggaagggaggaggaccccttccgctccaccgctgaggccctcaaggccatacccgcagagaagcgcataatccgcgtggatccaacatgtccactcagcagcaaccccgggacccaggtgtatgaggactacaactgcaccctgaaccagaccaacatcgagaacaacaacaacaagttctacatcatccagctgctccaagacagcaaccgcttcttcacctgctggaaccgctggggccgtgtgggagaggtcggccagtcaaagatcaaccacttcacaaggctagaagatgcaaagaaggactttgagaagaaatttcgggaaaagaccaagaacaactgggcagagcgggaccactttgtgtctcacccgggcaagtacacacttatcgaagtacaggcagaggatgaggcccaggaagctgtggtgaaggtgagatggccaaggaaggtgggcaggccctggactgagggaggggactcgttggagagttcccgctggttgggctctgccactgcccagctgcgcagcctcagccacagaactcccctctggcctcaggctggctggtctctgtctggtgtcacgccctgccccgctgctcctgcccacatgtgccctctatcttcaggtggacagaggcccagtgaggactgtgactaagcgggtgcagccctgctccctggacccagccacgcagaagctcatcactaacatcttcagcaaggagatgttcaagaacaccatggccctcatggacctggatgtgaagaagatgcccctgggaaagctgagcaagcaacagattgcacggggtttcgaggccttggaggcgctggaggaggccctgaaaggccccacggatggtggccaaagcctggaggagctgtcctcacacttttacaccgtcatcccgcacaacttcggccacagccagcccccgcccatcaattcccctgagcttctgcaggccaagaaggacatgctgctggtgctggcggacatcgagctggcccaggccctgcaggcagtctctgagcaggagaagacggtggaggaggtgccacaccccctggaccgagactaccagcttctcaagtgccagctgcagctgctagactctggagcacctgagtacaaggtgatacagacctacttagaacagactggcagcaaccacaggtgccctacacttcaacacatctggaaagtaaaccaagaaggggaggaagacagattccaggcccactccaaactgggtaatcggaagctgctgtggcatggcaccaacatggccgtggtggccgccatcctcactagtgggctccgcatcatgccacattctggtgggcgtgttggcaagggcatctactttgcctcagagaacagcaagtcagctggatatgttattggcatgaagtgtggggcccaccatgtcggctacatgttcctgggtgaggtggccctgggcagagagcaccatatcaacacggacaaccccagcttgaagagcccacctcctggcttcgacagtgtcattgcccgaggccacaccgagcctgatccgacccaggacactgagttggagctggatggccagcaagtggtggtgccccagggccagcctgtgccctgcccagagttcagcagctccacattctcccagagcgagtacctcatctaccaggagagccagtgtcgcctgcgctacctgctggaggtccacctctgagtgcccgccctgtcccccggggtcctgcaaggctggactgtgatcttcaatcatcctgcccatctctggtacccctatatcactcctttttttcaagaatacaatacgttgttgttaactatagtcaccatgctgtacaagatccctgaacttatgcctcctaactgaaattttgtattctttgacacatctgcccagtccctctcctcccagcccatggtaaccagcatttgactctttacttgtataagggcagcttttataggttccacatgtaagtgagatcatgcagtgtttgtctttctgtgcctggcttatttcactcagcataatgtgcaccgggttcacccatgttttcataaatgacaagatttcctcctaaaaaaaggcn

SEQ ID NO: 320818 - DNA, 2099 bp, Homo sapiens
  misc_feature (2099)..(2099): n is a, c, g, or t
ctccatgggcagcccggcgctagacccaacggggatccaagcagccccggggagagggaggctgcgtctgtatccgggcccaaggtcaccgcgcgaccggcagatgcgtgctgcaggccccggccacatgagcagcgctacggacgcgactgccccggccttggatatgccagatcgagtgtccacccgtccgtgggactggtcgcctgactcggcctgccccagcctctgcttcaccccactggtggccaaatagccgatgtctaatcccccacacaagctcatccccggcctctggcgattgttgggaattctctccctaattcacgcctgaggctcatggagagttgctagacctgggactgccctgggaggcgcacacaaccaggccgggtggcagccaggacctctcccatgtccctgcttttcttgggacagccatggctccaaagccgaagccctgggtacagactgagggccctgagaagaagaagggccggcaggcaggaagggaggaggaccccttccgctccaccgctgaggccctcaaggccatacccgcagagaagcgcataatccgcgtggatccaacatgtccactcagcagcaaccccgggacccaggtgtatgaggactacaactgcaccctgaaccagaccaacatcgagaacaacaacaacaagttctacatcatccagctgctccaagacagcaaccgcttcttcacctgctggaaccgctggggccgtgtgggagaggtcggccagtcaaagatcaaccacttcacaaggctagaagatgcaaagaaggactttgagaagaaatttcgggaaaagaccaagaacaactgggcagagcgggaccactttgtgtctcacccgggcaagtacacacttatcgaagtacaggcagaggatgaggcccaggaagctgtggtgaaggtggacagaggcccagtgaggactgtgactaagcgggtgcagccctgctccctggacccagccacgcagaagctcatcactaacatcttcagcaaggagatgttcaagaacaccatggccctcatggacctggatgtgaagaagatgcccctgggaaagctgagcaagcaacagattgcacggggtttcgaggccttggaggcgctggaggaggccctgaaaggccccacggatggtggccaaagcctggaggagctgtcctcacacttttacaccgtcatcccgcacaacttcggccacagccagcccccgcccatcaattcccctgagcttctgcaggccaagaaggacatgctgctggtgctggcggacatcgagctggcccaggccctgcaggcagtctctgagcaggagaagacggtggaggaggtgccacaccccctggaccgagactaccagcttctcaagtgccagctgcagctgctagactctggagcacctgagtacaaggtgatacagacctacttagaacagactggcagcaaccacaggtgccctacacttcaacacatctggaaagtaaaccaagaaggggaggaagacagattccaggcccactccaaactgggtaatcggaagctgctgtggcatggcaccagcctgtgccctgcccagagttcagcagctccacattctcccagagcgagtacctcatctaccaggagagccagtgtcgcctgcgctacctgctggaggtccacctctgagtgcccgccctgtcccccggggtcctgcaaggctggactgtgatcttcaatcatcctgcccatctctggtacccctatatcactcctttttttcaagaatacaatacgttgttgttaactatagtcaccatgctgtacaagatccctgaacttatgcctcctaactgaaattttgtattctttgacacatctgcccagtccctctcctcccagcccatggtaaccagcatttgactctttacttgtataagggcagcttttataggttccacatgtaagtgagatcatgcagtgtttgtctttctgtgcctggcttatttcactcagcataatgtgcaccgggttcacccatgttttcataaatgacaagatttcctcctaaaaaaaggcn

SEQ ID NO: 320819 - DNA, 1422 bp, Homo sapiens
  misc_feature (1422)..(1422): n is a, c, g, or t
ggacgcgtgggtcgaccacgcgtcggagatgtgcgaagaacaccatggccctcatggacctggatgtgaagaagatgcccctgggaaagctgagcaagcaacagattgcacggggtttcgaggccttggaggcgctggaggaggccctgaaaggccccacggatggtggccaaagcctggaggagctgtcctcacacttttacaccgtcatcccgcacaacttcggccacagccagcccccgcccatcaattcccctgagcttctgcaggccaagaaggacatgctgctggtgctggcggacatcgagctggcccaggccctgcaggcagtctctgagcaggagaagacggtggaggaggtgccacaccccctggaccgagactaccagcttctcaagtgccagctgcagctgctagactctggagcacctgagtacaaggtgatacagacctacttagaacagactggcagcaaccacaggtgccctacacttcaacacatctggaaagtaaaccaagaaggggaggaagacagattccaggcccactccaaactgggtaatcggaagctgctgtggcatggcaccaacatggccgtggtggccgccatcctcactagtgggctccgcatcatgccacattctggtgggcgtgttggcaagggcatctactttgcctcagagaacagcaagtcagctggatatgttattggcatgaagtgtggggcccaccatgtcggctacatgttcctgggtgaggtggccctgggcagagagcaccatatcaacacggacaaccccagcttgaagagcccacctcctggcttcgacagtgtcattgcccgaggccacaccgagcctgatccgacccaggacactgagttggagctggatggccagcaagtggtggtgccccagggccagcctgtgccctgcccagagttcagcagctccacattctcccagagcgagtacctcatctaccaggagagccagtgtcgcctgcgctacctgctggaggtccacctctgagtgcccgccctgtcccccggggtcctgcaaggctggactgtgatcttcaatcatcctgcccatctctggtacccctatatcactcctttttttcaagaatacaatacgttgttgttaactatagtcaccatgctgtacaagatccctgaacttatgcctcctaactgaaattttgtattctttgacacatctgcccagtccctctcctcccagcccatggtaaccagcatttgactctttacttgtataagggcagcttttataggttccacatgtaagtgagatcatgcagtgtttgtctttctgtgcctggcttatttcactcagcataatgtgcaccgggttcacccatgttttcataaatgacaagatttcctcctaaaaaaaggcn

SEQ ID NO: 320820 - DNA, 627 bp, Homo sapiens
cgcgcgaccggcagatgcgtgctgcaggccccggccacatgagcagcgctacggacgcgactgccccggccttggatatgccagatcgagtgtccacccgtccgtgggactggtcgcctgactcggcctgccccagcctctgcttcaccccactggtggccaaatagccgatgtctaatcccccacacaagctcatccccggcctctggcgattgttgggaattctctccctaattcacgcctgaggctcatggagagttgctagacctgggactgccctgggaggcgcacacaaccaggccgggtggcagccaggacctctcccatgtccctgcttttcttgggtgagtgtcctatggtcctgcccacggcagggcagggcaaggcctggtgggactggcctttgccctctatcagttcaaggccactgatccggagttctggctcctcagaactcttgagtccattgggaagggcttctacagctctgggttctaagctccgggaggataatctggccccaagaatcctgcccccaggatcctctgcccaccctcccccatagctcggtgactcggcccggcaaccatgccagggctgaactagctgacacagggggaggagccc

SEQ ID NO: 320821 - DNA, 832 bp, Homo sapiens
  misc_feature (832)..(832): n is a, c, g, or t
ccttttcttgctggagcagcaaagccagaaggaataacatcgcagcagagaggggccccacaggtcagcaggaggcaggctgagctgcccaccggtgcctccctgtgtcttgcagttattggcatgaagtgtggggcccaccatgtcggctacatgttcctgggtgaggtggccctgggcagagagcaccatatcaacacggacaaccccagcttgaagagcccacctcctggcttcgacagtgtcattgcccgaggccacaccgagcctgatccgacccaggacactgagttggagctggatggccagcaagtggtggtgccccagggccagcctgtgccctgcccagagttcagcagctccacattctcccagagcgagtacctcatctaccaggagagccagtgtcgcctgcgctacctgctggaggtccacctctgagtgcccgccctgtcccccggggtcctgcaaggctggactgtgatcttcaatcatcctgcccatctctggtacccctatatcactcctttttttcaagaatacaatacgttgttgttaactatagtcaccatgctgtacaagatccctgaacttatgcctcctaactgaaattttgtattctttgacacatctgcccagtccctctcctcccagcccatggtaaccagcatttgactctttacttgtataagggcagcttttataggttccacatgtaagtgagatcatgcagtgtttgtctttctgtgcctggcttatttcactcagcataatgtgcaccgggttcacccatgttttcataaatgacaagatttcctcctaaaaaaaggcn

SEQ ID NO: 320822 - DNA, 2164 bp, Homo sapiens
ctccatgggcagcccggcgctagacccaacggggatccaagcagccccggggagagggaggctgcgtctgtatccgggcccaaggtcaccgcgcgaccggcagatgcgtgctgcaggccccggccacatgagcagcgctacggacgcgactgccccggccttggatatgccagatcgagtgtccacccgtccgtgggactggtcgcctgactcggcctgccccagcctctgcttcaccccactggtggccaaatagccgatgtctaatcccccacacaagctcatccccggcctctggcgattgttgggaattctctccctaattcacgcctgaggctcatggagagttgctagacctgggactgccctgggaggcgcacacaaccaggccgggtggcagccaggacctctcccatgtccctgcttttcttgggacagccatggctccaaagccgaagccctgggtacagactgagggccctgagaagaagaagggccggcaggcaggaagggaggaggaccccttccgctccaccgctgaggccctcaaggccatacccgcagagaagcgcataatccgcgtggatccaacatgtccactcagcagcaaccccgggacccaggtgtatgaggactacaactgcaccctgaaccagaccaacatcgagaacaacaacaacaagttctacatcatccagctgctccaagacagcaaccgcttcttcacctgctggaaccgctggggccgtgtgggagaggtcggccagtcaaagatcaaccacttcacaaggctagaagatgcaaagaaggactttgagaagaaatttcgggaaaagaccaagaacaactgggcagagcgggaccactttgtgtctcacccgggcaagtacacacttatcgaagtacaggcagaggatgaggcccaggaagctgtggtgaaggtggacagaggcccagtgaggactgtgactaagcgggtgcagccctgctccctggacccagccacgcagaagctcatcactaacatcttcagcaaggagatgttcaagaacaccatggccctcatggacctggatgtgaagaagatgcccctgggaaagctgagcaagcaacagattgcacggggtttcgaggccttggaggcgctggaggaggccctgaaaggccccacggatggtggccaaagcctggaggagctgtcctcacacttttacaccgtcatcccgcacaacttcggccacagccagcccccgcccatcaattcccctgagcttctgcaggccaagaaggacatgctgctggtgctggcggacatcgagctggcccaggccctgcaggcagtctctgagcaggagaagacggtggaggaggtgccacaccccctggaccgagactaccagcttctcaagtgccagctgcagctgctagactctggagcacctgagtacaaggtgatacagacctacttagaacagactggcagcaaccacaggtgccctacacttcaacacatctggaaagtaaaccaagaaggggaggaagacagattccaggcccactccaaactgggtaatcggaagctgctgtggcatggcaccaacatggccgtggtggccgccatcctcactagtgggctccgcatcatgccacattctggtgggcgtgttggcaagggcatctactttgcctcagagaacagcaagtcagctggatatgttattggcatgaagtgtggggcccaccatgtcggctacatgttcctgggtgaggtggccctgggcagagagcaccatatcaacacggacaaccccagcttgaagagcccacctcctggcttcgacagtgtcattgcccgaggccacaccgagcctgatccgacccaggacactgagttggagctggatggccagcaagtggtggtgccccagggccagcctgtgccctgcccagagttcagcagctccacattctcccagagcgagtacctcatctaccaggagagccagtgtcgcctgcgctacctgctggaggtccacctctgagtgcccgccctgtcccccggggtcctgcaaggctggactgtgatcttcaatcatcctgcccatctctggtacccctatatcactcctttttttcaagaatacaatacgttgttgttaactat

SEQ ID NO: 320823 - DNA, 2520 bp, Homo sapiens
  misc_feature (2520)..(2520): n is a, c, g, or t
ctccatgggcagcccggcgctagacccaacggggatccaagcagccccggggagagggaggctgcgtctgtatccgggcccaaggtcaccgcgcgaccggcagatgcgtgctgcaggccccggccacatgagcagcgctacggacgcgactgccccggccttggatatgccagatcgagtgtccacccgtccgtgggactggtcgcctgactcggcctgccccagcctctgcttcaccccactggtggccaaatagccgatgtctaatcccccacacaagctcatccccggcctctggcgattgttgggaattctctccctaattcacgcctgaggctcatggagagttgctagacctgggactgccctgggaggcgcacacaaccaggccgggtggcagccaggacctctcccatgtccctgcttttcttgggacagccatggctccaaagccgaagccctgggtacagactgagggccctgagaagaagaagggccggcaggcaggaagggaggaggaccccttccgctccaccgctgaggccctcaaggccatacccgcagagaagcgcataatccgcgtggatccaacatgtccactcagcagcaaccccgggacccaggtgtatgaggactacaactgcaccctgaaccagaccaacatcgagaacaacaacaacaagttctacatcatccagctgctccaagacagcaaccgcttcttcacctgctggaaccgctggggccgtgtgggagaggtcggccagtcaaagatcaaccacttcacaaggctagaagatgcaaagaaggactttgagaagaaatttcgggaaaagaccaagaacaactgggcagagcgggaccactttgtgtctcacccgggcaagtacacacttatcgaagtacaggcagaggatgaggcccaggaagctgtggtgaaggtggacagaggcccagtgaggactgtgactaagcgggtgcagccctgctccctggacccagccacgcagaagctcatcactaacatcttcagcaaggagatgttcaagaacaccatggccctcatggacctgggtgaggggtgagaggcaggcagggtggcaggggcctcagggtggcagggctgtggggctgagtctccccactcccctgtccccctagatgtgaagaagatgcccctgggaaagctgagcaagcaacagattgcacggggtttcgaggccttggaggcgctggaggaggccctgaaaggccccacggatggtggccaaagcctggaggagctgtcctcacacttttacaccgtcatcccgcacaacttcggccacagccagcccccgcccatcaattcccctgagcttctgcaggccaagaaggacatgctgctggtgctggcggacatcgagctggcccaggccctgcaggcagtctctgagcaggagaagacggtggaggaggtgccacaccccctggaccgagactaccagcttctcaagtgccagctgcagctgctagactctggagcacctgagtacaaggtgatacagacctacttagaacagactggcagcaaccacaggtgccctacacttcaacacatctggaaagtaaaccaagaaggggaggaagacagattccaggcccactccaaactgggtaatcggaagctgctgtggcatggcaccaacatggccgtggtggccgccatcctcactagtgggctccgcatcatgccacattctggtgggcgtgttggcaagggcatctactttgcctcagagaacagcaagtcagctggatatgttattggcatgaagtgtggggcccaccatgtcggctacatgttcctgggtgaggtggccctgggcagagagcaccatatcaacacggacaaccccagcttgaagagcccacctcctggcttcgacagtgtcattgcccgaggccacaccgagcctgatccgacccaggacactgagttggagctggatggccagcaagtggtggtgccccagggccagcctgtgccctgcccagagttcagcagctccacattctcccagagcgagtacctcatctaccaggagagccagtgtcgcctgcgctacctgctggaggtccacctctgagtgcccgccctgtcccccggggtcctgcaaggctggactgtgatcttcaatcatcctgcccatctctggtacccctatatcactcctttttttcaagaatacaatacgttgttgttaactatagtcaccatgctgtacaagatccctgaacttatgcctcctaactgaaattttgtattctttgacacatctgcccagtccctctcctcccagcccatggtaaccagcatttgactctttacttgtataagggcagcttttataggttccacatgtaagtgagatcatgcagtgtttgtctttctgtgcctggcttatttcactcagcataatgtgcaccgggttcacccatgttttcataaatgacaagatttcctcctaaaaaaaggcn

SEQ ID NO: 320824 - DNA, 2421 bp, Homo sapiens
ctccatgggcagcccggcgctagacccaacggggatccaagcagccccggggagagggaggctgcgtctgtatccgggcccaaggtcaccgcgcgaccggcagatgcgtgctgcaggccccggccacatgagcagcgctacggacgcgactgccccggccttggatatgccagatcgagtgtccacccgtccgtgggactggtcgcctgactcggcctgccccagcctctgcttcaccccactggtggccaaatagccgatgtctaatcccccacacaagctcatccccggcctctggcgattgttgggaattctctccctaattcacgcctgaggctcatggagagttgctagacctgggactgccctgggaggcgcacacaaccaggccgggtggcagccaggacctctcccatgtccctgcttttcttgggacagccatggctccaaagccgaagccctgggtacagactgagggccctgagaagaagaagggccggcaggcaggaagggaggaggaccccttccgctccaccgctgaggccctcaaggccatacccgcagagaagcgcataatccgcgtggatccaacatgtccactcagcagcaaccccgggacccaggtgtatgaggactacaactgcaccctgaaccagaccaacatcgagaacaacaacaacaagttctacatcatccagctgctccaagacagcaaccgcttcttcacctgctggaaccgctggggccgtgtgggagaggtcggccagtcaaagatcaaccacttcacaaggctagaagatgcaaagaaggactttgagaagaaatttcgggaaaagaccaagaacaactgggcagagcgggaccactttgtgtctcacccgggcaagtacacacttatcgaagtacaggcagaggatgaggcccaggaagctgtggtgaaggtggacagaggcccagtgaggactgtgactaagcgggtgcagccctgctccctggacccagccacgcagaagctcatcactaacatcttcagcaaggagatgttcaagaacaccatggccctcatggacctggatgtgaagaagatgcccctgggaaagctgagcaagcaacagattgcacggggtttcgaggccttggaggcgctggaggaggccctgaaaggccccacggatggtggccaaagcctggaggagctgtcctcacacttttacaccgtcatcccgcacaacttcggccacagccagcccccgcccatcaattcccctgagcttctgcaggccaagaaggacatgctgctggtgctggcggacatcgagctggcccaggccctgcaggcagtctctgagcaggagaagacggtggaggaggtgccacaccccctggaccgagactaccagcttctcaagtgccagctgcagctgctagactctggagcacctgagtacaaggtgatacagacctacttagaacagactggcagcaaccacaggtgccctacacttcaacacatctggaaagtaaaccaagaaggggaggaagacagattccaggcccactccaaactgggtaatcggaagctgctgtggcatggcaccaacatggccgtggtggccgccatcctcactagtgggctccgcatcatgccacattctggtgggcgtgttggcaagggcatctactttgcctcagagaacagcaagtcagctggatatgttattggcatgaagtgtggggcccaccatgtcggctacatgttcctgggtgaggtggccctgggcagagagcaccatatcaacacggacaaccccagcttgaagagcccacctcctggcttcgacagtgtcattgcccgaggccacaccgagcctgatccgacccaggacactgagttggagctggatggccagcaagtggtggtgccccagggccagcctgtgccctgcccagagttcagcagctccacattctcccagagcgagtacctcatctaccaggagagccagtgtcgcctgcgctacctgctggaggtccacctctgagtgcccgccctgtcccccggggtcctgcaaggctggactgtgatcttcaatcatcctgcccatctctggtacccctatatcactcctttttttcaagaatacaatacgttgttgttaactatagtcaccatgctgtacaagatccctgaacttatgcctcctaactgaaattttgtattctttgacacatctgcccagtccctctcctcccagcccatggtaaccagcatttgactctttacttgtataagggcagcttttataggttccacatgtaagtgagatcatgcagtgtttgtctttctgtgcctggcttatttcactcagcataatgtgcacacaggcacagggggagcatacagtgggatggggatcctca

SEQ ID NO: 320825 - DNA, 535 bp, Homo sapiens
cttccccaccggagggggcggctggcgcgcacggagggcggtgagtggccggggacctggcgtccgagaaggggaatggaggaggaggcagcggcggatgtcatctggctatgggcggagcaggtgatggagaaggggagcatgaccccgggggtgggaatcccacggatgggaagttgaatccgacaggcaccccggaactgactcgtgggggtgtttcctgggcaggaggactcgaaggggtggagagaggcaggccagggcaaaggtgggccgctgggctgagaggaagctctagtgagaacaggtgatagaggcagaacttctaagttgggagagtggagcggccgccgcttggctctgggacagggagcgcagggagagttggtgaggtgggcagaggcccgggagtgaggggaggaaaactgcgggggtagagtccacgaaccttggaggggagtcactggtgaagaggttggaagaggagcctgaagaacctgtttccttttccttctggaaaaggaattcgttggtg

SEQ ID NO: 320826 - DNA, 4108 bp, Homo sapiens
atcgagtggcctcgcctcatcgcctagcgcccccctcagtcgccgccgcctccgcccgctggccatgtcccccggccgccgccgccgccgcccgagcgcggcgctcccgcggccccgcgcgcagtgagcgcgggcccgtcttgccgttcgcccgccccagggcccccttgttctccgcgccgccgccgccgccatgttgggtttggagctccagcggagccgccgccgccgccgcgggtgagggaggccgagagcggagcccgccccgccccggggcccagggagcggggccgcctcggagcccggcctctccccgccagccgccttcccggcccgccgtgcagccagcgagccagcgagcgagcaagcaagcaagcaccggaccccggccgcgccttcagctacggcccgagcgagcccgccgccgccgggcccggccacagcctgcagcggagcccacgagaggcagcgccatggcggagcagacctactcgtgggcctattccctggtggattccagtcaagtgtctacatttctgatttccattcttcttatagtctatggtagtttcaggtcccttaatatggactttgaaaatcaagataaggagaaagacagtaatagttcttctgggtctttcaatggcaacagcaccaataatagcatccaaacaattgactctacccaggctctgttccttccaattggagcatctgtctctcttttagtaatgttcttcttctttgactcagttcaagtagtttttacaatatgtacagcagttcttgcaacgatagcttttgcttttcttctcctcccgatgtgccagtatttaacaagaccctgctcacctcagaacaagatttcctttggttgctgtggacgtttcactgctgctgagttgctgtcattctctctgtctgtcatgctcgtcctcatctgggttctcactggccattggcttctcatggatgcactggccatgggcctctgtgtcgccatgatcgcctttgtccgcctgccgagcctcaaggtctcctgcctgcttctctcagggcttctcatctatgatgtcttttgggtatttttctcagcctacatcttcaatagcaacgtcatggtgaaggtggccactcagccggctgacaatccccttgacgttctatcccggaagctccacctggggcccaatgttgggcgtgatgttcctcgcctgtctctgcctggaaaactggtcttcccaagctccactggcagccacttctccatgttgggcatcggagacatcgttatgcctggtctcctactatgctttgtccttcgctatgacaactacaaaaagcaagccagtggggactcctgtggggcccctggacctgccaacatctccgggcgcatgcagaaggtctcctactttcactgcaccctcatcggatactttgtaggcctgctcactgctactgtggcgtctcgcattcaccgggccgcccagcccgcccttctctatttggtgccatttactttattgccactcctcacgatggcctatttaaagggcgacctccggcggatgtggtctgagcctttccactccaagtccagcagctcccgattcctggaagtatgatggatcacgtggaaagtgaccagatggccgtcatagtccttttctctcaactcatggtttgtttcctcttagagctggcctggtactcagaaatgtacctgtgtttaaggaactgccgtgtgactggatttggcattgaaagggagctcgtttgcaggagagaggtgctggagccctgtttggttccttctcttcctgcggatgtagaggtggggccccttccaagagggacaggcctctccccagcgcgccttcctcccacgtttttatggatctgcaccagactgttaccttctgggggagatggagatttgactgtttaaaaactgaaaacagcgaggagtctttctagaacttttgaacactaaaaggatgaaaaaaattagcaaaccgaagtttcttcaatgacccctcgagaactttgggaccagtttcctatgggggactcagtttcagagaactgagacagaagctcttctgtcgttatattcttctttcctttttttggatttattaaatattttctgtggtgtgaagtgacttattaaatccacagacattgagtgacttcttacaacatccacataagaatttgttgtaatgagttcatgtccacccagatgttgtgttggcagtgaacaagggcacggtttttatacatacgtacatatatatatataaacacacacatagatatatatgaataaacaaaaatgaaatcctgctaagatcacgctgtgtagctgacaggggcttgctgtcgttttgagcatgtcgagcagtttactgtggcttccttgtatatggataagctgctgtccttccccttcacaactgaccccgcagttacaaactagtatagcatttgtgctgattgatgatagactcatggacttcaggagcccttacttggttttgatcagtgtagcaaattagggatgaagagttcaaaccttttggccctttctttcttttctaggcttctccctcgcagggtgttccgtagtttcttctcgagccaatgcatgtattatagcagcaggtgtctttgtgctttctcatcatagtaacgtactacttgtaaatacatttttctattttctatttttttgtatttttttttttgacattttgtttcattggtgtgctgtatattttccatgccctcactcctttaagaaaaaaaaaaaggaaaaaagcaacacaatcctgtccttgctgttgtgattatagtcttggtttacctgtggtgacaaccgggtgttggggacacatgtcaaatgcccctctgagatgggccctaaattccagtaactggggaaagaaccagctgctgtgtcctgagagcctggccctgtgctgtggtctctgctgcaagcccagatttctgggagtaactagtgttaggtctgctgacctttacctaagcagcccctgcctggtaagaaggtgcccattgttcagaggcaaagagaagcctgcggttggcatgaggatgcctgacaacaaaggctggagaagggccctgagttccagcctctccccaagggtccccgccccagtggctgcctctgtcttgacctgtgtaatgaattagtgtgctgtgtcactgtggcttgaagtcactgtggatcgagctcacagggggcacccatcctgttgtcaacagagtctgaagcagtcagggtgttggattcctctgttgttgtcatcaattcctgctgaggggtttctggggttttgtttttaataaatgactcctttgtagcctttgtcacataatcttcactttggttgttggtaccaaacagagctcccagccatctcctccctgttctggaagactgatgggaagactctgtctgtccccagacctggtcatctgcagctctggcccagtcatagatacatcaaagaactgaagcttctgctgtccacagaactcaaaactgcctctgcattgggtgaagactaaaaatccacttgcggactctcccttccttccttctcagccctcgaggatgcatatagctaattaagcaggcccagagacagagaggggggctccaaaatgactcggattaagggcaagtgccagtgatgggtagaaataacgttatccttcatgcctgtaatcccagcactttgggaggccgaggcaggtggatcacaaggttgggagctcgagaccagcctggccaacatggtgaaaccccgtctctactaaaaacacaaaaattagctgggcatggtggcaggcgcctgtaatcccagctatttgggaggctgaggcagaagaatcgcttgaacctggaaggcggaggttgcagtgagcagagattgcgccactgcactcaagtctgggcgacagggtgagactccatctcaaaaaaaaaaaaaagggggcgtcaaaatttccccggagggccaagttaagagttacacattctgtaaaaggggcctatagggggatataaagc

SEQ ID NO: 320827 - DNA, 4056 bp, Homo sapiens
atcgagtggcctcgcctcatcgcctagcgcccccctcagtcgccgccgcctccgcccgctggccatgtcccccggccgccgccgccgccgcccgagcgcggcgctcccgcggccccgcgcgcagtgagcgcgggcccgtcttgccgttcgcccgccccagggcccccttgttctccgcgccgccgccgccgccatgttgggtttggagctccagcggagccgccgccgccgccgcgggtgagggaggccgagagcggagcccgccccgccccggggcccagggagcggggccgcctcggagcccggcctctccccgccagccgccttcccggcccgccgtgcagccagcgagccagcgagcgagcaagcaagcaagcaccggaccccggccgcgccttcagctacggcccgagcgagcccgccgccgccgggcccggccacagcggcctattccctggtggattccagtcaagtgtctacatttctgatttccattcttcttatagtctatggtagtttcaggtcccttaatatggactttgaaaatcaagataaggagaaagacagtaatagttcttctgggtctttcaatggcaacagcaccaataatagcatccaaacaattgactctacccaggctctgttccttccaattggagcatctgtctctcttttagtaatgttcttcttctttgactcagttcaagtagtttttacaatatgtacagcagttcttgcaacgatagcttttgcttttcttctcctcccgatgtgccagtatttaacaagaccctgctcacctcagaacaagatttcctttggttgctgtggacgtttcactgctgctgagttgctgtcattctctctgtctgtcatgctcgtcctcatctgggttctcactggccattggcttctcatggatgcactggccatgggcctctgtgtcgccatgatcgcctttgtccgcctgccgagcctcaaggtctcctgcctgcttctctcagggcttctcatctatgatgtcttttgggtatttttctcagcctacatcttcaatagcaacgtcatggtgaaggtggccactcagccggctgacaatccccttgacgttctatcccggaagctccacctggggcccaatgttgggcgtgatgttcctcgcctgtctctgcctggaaaactggtcttcccaagctccactggcagccacttctccatgttgggcatcggagacatcgttatgcctggtctcctactatgctttgtccttcgctatgacaactacaaaaagcaagccagtggggactcctgtggggcccctggacctgccaacatctccgggcgcatgcagaaggtctcctactttcactgcaccctcatcggatactttgtaggcctgctcactgctactgtggcgtctcgcattcaccgggccgcccagcccgcccttctctatttggtgccatttactttattgccactcctcacgatggcctatttaaagggcgacctccggcggatgtggtctgagcctttccactccaagtccagcagctcccgattcctggaagtatgatggatcacgtggaaagtgaccagatggccgtcatagtccttttctctcaactcatggtttgtttcctcttagagctggcctggtactcagaaatgtacctgtgtttaaggaactgccgtgtgactggatttggcattgaaagggagctcgtttgcaggagagaggtgctggagccctgtttggttccttctcttcctgcggatgtagaggtggggccccttccaagagggacaggcctctccccagcgcgccttcctcccacgtttttatggatctgcaccagactgttaccttctgggggagatggagatttgactgtttaaaaactgaaaacagcgaggagtctttctagaacttttgaacactaaaaggatgaaaaaaattagcaaaccgaagtttcttcaatgacccctcgagaactttgggaccagtttcctatgggggactcagtttcagagaactgagacagaagctcttctgtcgttatattcttctttcctttttttggatttattaaatattttctgtggtgtgaagtgacttattaaatccacagacattgagtgacttcttacaacatccacataagaatttgttgtaatgagttcatgtccacccagatgttgtgttggcagtgaacaagggcacggtttttatacatacgtacatatatatatataaacacacacatagatatatatgaataaacaaaaatgaaatcctgctaagatcacgctgtgtagctgacaggggcttgctgtcgttttgagcatgtcgagcagtttactgtggcttccttgtatatggataagctgctgtccttccccttcacaactgaccccgcagttacaaactagtatagcatttgtgctgattgatgatagactcatggacttcaggagcccttacttggttttgatcagtgtagcaaattagggatgaagagttcaaaccttttggccctttctttcttttctaggcttctccctcgcagggtgttccgtagtttcttctcgagccaatgcatgtattatagcagcaggtgtctttgtgctttctcatcatagtaacgtactacttgtaaatacatttttctattttctatttttttgtatttttttttttgacattttgtttcattggtgtgctgtatattttccatgccctcactcctttaagaaaaaaaaaaaggaaaaaagcaacacaatcctgtccttgctgttgtgattatagtcttggtttacctgtggtgacaaccgggtgttggggacacatgtcaaatgcccctctgagatgggccctaaattccagtaactggggaaagaaccagctgctgtgtcctgagagcctggccctgtgctgtggtctctgctgcaagcccagatttctgggagtaactagtgttaggtctgctgacctttacctaagcagcccctgcctggtaagaaggtgcccattgttcagaggcaaagagaagcctgcggttggcatgaggatgcctgacaacaaaggctggagaagggccctgagttccagcctctccccaagggtccccgccccagtggctgcctctgtcttgacctgtgtaatgaattagtgtgctgtgtcactgtggcttgaagtcactgtggatcgagctcacagggggcacccatcctgttgtcaacagagtctgaagcagtcagggtgttggattcctctgttgttgtcatcaattcctgctgaggggtttctggggttttgtttttaataaatgactcctttgtagcctttgtcacataatcttcactttggttgttggtaccaaacagagctcccagccatctcctccctgttctggaagactgatgggaagactctgtctgtccccagacctggtcatctgcagctctggcccagtcatagatacatcaaagaactgaagcttctgctgtccacagaactcaaaactgcctctgcattgggtgaagactaaaaatccacttgcggactctcccttccttccttctcagccctcgaggatgcatatagctaattaagcaggcccagagacagagaggggggctccaaaatgactcggattaagggcaagtgccagtgatgggtagaaataacgttatccttcatgcctgtaatcccagcactttgggaggccgaggcaggtggatcacaaggttgggagctcgagaccagcctggccaacatggtgaaaccccgtctctactaaaaacacaaaaattagctgggcatggtggcaggcgcctgtaatcccagctatttgggaggctgaggcagaagaatcgcttgaacctggaaggcggaggttgcagtgagcagagattgcgccactgcactcaagtctgggcgacagggtgagactccatctcaaaaaaaaaaaaaagggggcgtcaaaatttccccggagggccaagttaagagttacacattctgtaaaaggggcctatagggggatataaagc

SEQ ID NO: 320828 - DNA, 4004 bp, Homo sapiens
cttccccaccggagggggcggctggcgcgcacggagggcggtgagtggccggggacctggcgtccgagaaggggaatggaggaggaggcagcggcggatgtcatctggctatgggcggagcaggtgatggagaaggggagcatgaccccgggggtgggaatcccacggatgggaagttgaatccgacaggcaccccggaactgactcgtgggggtgtttcctgggcaggaggactcgaaggggtggagagaggcaggccagggcaaaggtgggccgctgggctgagaggaagctctagtgagaacaggtgatagaggcagaacttctaagttgggagagtggagcggccgccgcttggctctgggacagggagcgcagggagagttggtgagggcctattccctggtggattccagtcaagtgtctacatttctgatttccattcttcttatagtctatggtagtttcaggtcccttaatatggactttgaaaatcaagataaggagaaagacagtaatagttcttctgggtctttcaatggcaacagcaccaataatagcatccaaacaattgactctacccaggctctgttccttccaattggagcatctgtctctcttttagtaatgttcttcttctttgactcagttcaagtagtttttacaatatgtacagcagttcttgcaacgatagcttttgcttttcttctcctcccgatgtgccagtatttaacaagaccctgctcacctcagaacaagatttcctttggttgctgtggacgtttcactgctgctgagttgctgtcattctctctgtctgtcatgctcgtcctcatctgggttctcactggccattggcttctcatggatgcactggccatgggcctctgtgtcgccatgatcgcctttgtccgcctgccgagcctcaaggtctcctgcctgcttctctcagggcttctcatctatgatgtcttttgggtatttttctcagcctacatcttcaatagcaacgtcatggtgaaggtggccactcagccggctgacaatccccttgacgttctatcccggaagctccacctggggcccaatgttgggcgtgatgttcctcgcctgtctctgcctggaaaactggtcttcccaagctccactggcagccacttctccatgttgggcatcggagacatcgttatgcctggtctcctactatgctttgtccttcgctatgacaactacaaaaagcaagccagtggggactcctgtggggcccctggacctgccaacatctccgggcgcatgcagaaggtctcctactttcactgcaccctcatcggatactttgtaggcctgctcactgctactgtggcgtctcgcattcaccgggccgcccagcccgcccttctctatttggtgccatttactttattgccactcctcacgatggcctatttaaagggcgacctccggcggatgtggtctgagcctttccactccaagtccagcagctcccgattcctggaagtatgatggatcacgtggaaagtgaccagatggccgtcatagtccttttctctcaactcatggtttgtttcctcttagagctggcctggtactcagaaatgtacctgtgtttaaggaactgccgtgtgactggatttggcattgaaagggagctcgtttgcaggagagaggtgctggagccctgtttggttccttctcttcctgcggatgtagaggtggggccccttccaagagggacaggcctctccccagcgcgccttcctcccacgtttttatggatctgcaccagactgttaccttctgggggagatggagatttgactgtttaaaaactgaaaacagcgaggagtctttctagaacttttgaacactaaaaggatgaaaaaaattagcaaaccgaagtttcttcaatgacccctcgagaactttgggaccagtttcctatgggggactcagtttcagagaactgagacagaagctcttctgtcgttatattcttctttcctttttttggatttattaaatattttctgtggtgtgaagtgacttattaaatccacagacattgagtgacttcttacaacatccacataagaatttgttgtaatgagttcatgtccacccagatgttgtgttggcagtgaacaagggcacggtttttatacatacgtacatatatatatataaacacacacatagatatatatgaataaacaaaaatgaaatcctgctaagatcacgctgtgtagctgacaggggcttgctgtcgttttgagcatgtcgagcagtttactgtggcttccttgtatatggataagctgctgtccttccccttcacaactgaccccgcagttacaaactagtatagcatttgtgctgattgatgatagactcatggacttcaggagcccttacttggttttgatcagtgtagcaaattagggatgaagagttcaaaccttttggccctttctttcttttctaggcttctccctcgcagggtgttccgtagtttcttctcgagccaatgcatgtattatagcagcaggtgtctttgtgctttctcatcatagtaacgtactacttgtaaatacatttttctattttctatttttttgtatttttttttttgacattttgtttcattggtgtgctgtatattttccatgccctcactcctttaagaaaaaaaaaaaggaaaaaagcaacacaatcctgtccttgctgttgtgattatagtcttggtttacctgtggtgacaaccgggtgttggggacacatgtcaaatgcccctctgagatgggccctaaattccagtaactggggaaagaaccagctgctgtgtcctgagagcctggccctgtgctgtggtctctgctgcaagcccagatttctgggagtaactagtgttaggtctgctgacctttacctaagcagcccctgcctggtaagaaggtgcccattgttcagaggcaaagagaagcctgcggttggcatgaggatgcctgacaacaaaggctggagaagggccctgagttccagcctctccccaagggtccccgccccagtggctgcctctgtcttgacctgtgtaatgaattagtgtgctgtgtcactgtggcttgaagtcactgtggatcgagctcacagggggcacccatcctgttgtcaacagagtctgaagcagtcagggtgttggattcctctgttgttgtcatcaattcctgctgaggggtttctggggttttgtttttaataaatgactcctttgtagcctttgtcacataatcttcactttggttgttggtaccaaacagagctcccagccatctcctccctgttctggaagactgatgggaagactctgtctgtccccagacctggtcatctgcagctctggcccagtcatagatacatcaaagaactgaagcttctgctgtccacagaactcaaaactgcctctgcattgggtgaagactaaaaatccacttgcggactctcccttccttccttctcagccctcgaggatgcatatagctaattaagcaggcccagagacagagaggggggctccaaaatgactcggattaagggcaagtgccagtgatgggtagaaataacgttatccttcatgcctgtaatcccagcactttgggaggccgaggcaggtggatcacaaggttgggagctcgagaccagcctggccaacatggtgaaaccccgtctctactaaaaacacaaaaattagctgggcatggtggcaggcgcctgtaatcccagctatttgggaggctgaggcagaagaatcgcttgaacctggaaggcggaggttgcagtgagcagagattgcgccactgcactcaagtctgggcgacagggtgagactccatctcaaaaaaaaaaaaaagggggcgtcaaaatttccccggagggccaagttaagagttacacattctgtaaaaggggcctatagggggatataaagc

SEQ ID NO: 320829 - DNA, 2355 bp, Homo sapiens
  misc_feature (2327)..(2327): n is a, c, g, or t
atcgagtggcctcgcctcatcgcctagcgcccccctcagtcgccgccgcctccgcccgctggccatgtcccccggccgccgccgccgccgcccgagcgcggcgctcccgcggccccgcgcgcagtgagcgcgggcccgtcttgccgttcgcccgccccagggcccccttgttctccgcgccgccgccgccgccatgttgggtttggagctccagcggagccgccgccgccgccgcgggtgagggaggccgagagcggagcccgccccgccccggggcccagggagcggggccgcctcggagcccggcctctccccgccagccgccttcccggcccgccgtgcagccagcgagccagcgagcgagcaagcaagcaagcaccggaccccggccgcgccttcagctacggcccgagcgagcccgccgccgccgggcccggccacagcctgcagcggagcccacgagaggcagcgccatggcggagcagacctactcgtgggcctattccctggtggattccagtcaagtgtctacatttctgatttccattcttcttatagtctatggtagtttcaggtcccttaatatggactttgaaaatcaagataaggagaaagacagtaatagttcttctgggtctttcaatggcaacagcaccaataatagcatccaaacaattgactctacccaggctctgttccttccaattggagcatctgtctctcttttagtaatgttcttcttctttgactcagttcaagtagtttttacaatatgtacagcagttcttgcaacgatagcttttgcttttcttctcctcccgatgtgccagtatttaacaagaccctgctcacctcagaacaagatttcctttggttgctgtggacgtttcactgctgctgagttgctgtcattctctctgtctgtcatgctcgtcctcatctgggttctcactggccattggcttctcatggatgcactggccatgggcctctgtgtcgccatgatcgcctttgtccgcctgccgagcctcaaggtctcctgcctgcttctctcagggcttctcatctatgatgtcttttgggtatttttctcagcctacatcttcaatagcaacgtcatggtgaaggtggccactcagccggctgacaatccccttgacgttctatcccggaagctccacctggggcccaatgttgggcgtgatgttcctcgcctgtctctgcctggaaaactggtcttcccaagctccactggcagccacttctccatgttgggcatcggagacatcgttatgcctggtctcctactatgctttgtccttcgctatgacaactacaaaaagcaagccagtggggactcctgtggggcccctggacctgccaacatctccgggcgcatgcagaaggtctcctactttcactgcaccctcatcggatactttgtaggcctgctcactgctactgtggcgtctcgcattcaccgggccgcccagcccgcccttctctatttggtgccatttactttattgccactcctcacgatggcctatttaaagggcgacctccggcggatgtggtctgagcctttccactccaagtccagcagctcccgattcctggaagtatgatggatcacgtggaaagtgaccagatggccgtcatagtccttttctctcaactcatggtttgtttcctcttagagctggcctggtactcagaaatgtacctgtgtttaaggaactgccgtgtgactggatttggcattgaaagggagctcgtttgcaggagagaggtgctggagccctgtttggttccttctcttcctgcggatgtagaggtggggccccttccaagagggacaggcctctccccagcgcgccttcctcccacgtttttatggatctgcaccagactgttaccttctgggggagatggagatttgactgtttaaaaactgaaaacagcgaggagtctttctagaacttttgaacactaaaaggatgaaaaaaattagcaaaccgaagtttcttcaatgacccctcgagaactttgggaccagtttcctatgggggactcagtttcagagaactgagacagaagctcttctgtcgttatattcttctttcctttttttggatttattaaatattttctgtggtgtgaagtgacttattaaatccacagacattgagtgacttcttacaacatccacataagaatttgttgtaatgagttcatgtccacccagatgttgtgttggcagtgaacaagggcacggtttttatacatacgtacatatatatatataaacactataacaacctacngaagtgctattattgaatttacattatt

SEQ ID NO: 320830 - DNA, 753 bp, Homo sapiens
atcgagtggcctcgcctcatcgcctagcgcccccctcagtcgccgccgcctccgcccgctggccatgtcccccggccgccgccgccgccgcccgagcgcggcgctcccgcggccccgcgcgcagtgagcgcgggcccgtcttgccgttcgcccgccccagggcccccttgttctccgcgccgccgccgccgccatgttgggtttggagctccagcggagccgccgccgccgccgcgggtgagggaggccgagagcggagcccgccccgccccggggcccagggagcggggccgcctcggagcccggcctctccccgccagccgccttcccggcccgccgtgcagccagcgagccagcgagcgagcaagcaagcaagcaccggaccccggccgcgccttcagctacggcccgagcgagcccgccgccgccgggcccggccacagcctgcagcggagcccacgagaggcagcgccatggcggagcagacctactcgtgggcctattccctggtggattccagtcaagtgtctacatttctgatttccattcttcttatagtctatggtagtttcagcccttaatatggactttgacagcaccaataatagcatcccgcatccaaacaattgactctacccaggctctgttccttccaattggagcatctgtctctcttttagtaatgttcttcttctttgactcagttcaagtagtttttacaatatgtacagcaggtaaatatgagtttctctg

SEQ ID NO: 320831 - DNA, 3409 bp, Homo sapiens
atcgagtggcctcgcctcatcgcctagcgcccccctcagtcgccgccgcctccgcccgctggccatgtcccccggccgccgccgccgccgcccgagcgcggcgctcccgcggccccgcgcgcagtgagcgcgggcccgtcttgccgttcgcccgccccagggcccccttgttctccgcgccgccgccgccgccatgttgggtttggagctccagcggagccgccgccgccgccgcgggtgagggaggccgagagcggagcccgccccgccccggggcccagggagcggggccgcctcggagcccggcctctccccgccagccgccttcccggcccgccgtgcagccagcgagccagcgagcgagcaagcaagcaagcaccggaccccggccgcgccttcagctacggcccgagcgagcccgccgccgccgggcccggccacagcctgcagcggagcccacgagaggcagcgccatggcggagcagacctactcgtgggcctattccctggtggattccagtcaagtgtctacatttctgatttccattcttcttatagtctatggtagtttcaggtcccttaatatggactttgaaaatcaagataaggagaaagacagtaatagttcttctgggtctttcaatggcaacagcaccaataatagcatccaaacaattgactctacccaggctctgttccttccaattggagcatctgtctctcttttagtaatgttcttcttctttgactcagttcaagtagtttttacaatatgtacagcagttcttgcaacgatagcttttgcttttcttctcctcccgatgtgccagtatttaacaagaccctgctcacctcagaacaagatttcctttggttgctgtggacgtttcactgctgctgagttgctgtcattctctctgtctgtcatgctcgtcctcatctgggttctcactggccattggcttctcatggatgcactggccatgggcctctgtgtcgccatgatcgcctttgtccgcctgccgagcctcaaggtctcctgcctgcttctctcagggcttctcatctatgatgtcttttgggtatttttctcagcctacatcttcaatagcaacgtcatggtgaaggtggccactcagccggctgacaatccccttgacgttctatcccggaagctccacctggggcccaatgttgggcgtgatgttcctcgcctgtctctgcctggaaaactggtcttcccaagctccactggcagccacttctccatgttgggcatcggagacatcgttatgcctggtctcctactatgctttgtccttcgctatgacaactacaaaaagcaagccagtggggactcctgtggggcccctggacctgccaacatctccgggcgcatgcagaaggtctcctactttcactgcaccctcatcggatactttgtaggcctgctcactgctactgtggcgtctcgcattcaccgggccgcccagcccgcccttctctatttggtgccatttactttattgccactcctcacgatggcctatttaaagggcgacctccggcggatgtggtctgagcctttccactccaagtccagcagctcccgattcctggaagtatgatggatcacgtggaaagtgaccagatggccgtcatagtccttttctctcaactcatggtttgtttcctcttagagctggcctggtactcagaaatgtacctgtgtttaaggaactgccgtgtgactggatttggcattgaaagggagctcgtttgcaggagagaggtgctggagccctgtttggttccttctcttcctgcggatgtagaggtggggccccttccaagagggacaggcctctccccagcgcgccttcctcccacgtttttatggatctgcaccagactgttaccttctgggggagatggagatttgactgtttaaaaactgaaaacagcgaggagtctttctagaacttttgaacactaaaaggatgaaaaaaattagcaaaccgaagtttcttcaatgacccctcgagaactttgggaccagtttcctatgggggactcagtttcagagaactgagacagaagctcttctgtcgttatattcttctttcctttttttggatttattaaatattttctgtggtgtgaagtgacttattaaatccacagacattgagtgacttcttacaacatccacataagaatttgttgtaatgagttcatgtccacccagatgttgtgttggcagtgaacaagggcacggtttttatacatacgtacatatatatatataaacacacacatagatatatatgaataaacaaaaatgaaatcctgctaagatcacgctgtgtagctgacaggggcttgctgtcgttttgagcatgtcgagcagtttactgtggcttccttgtatatggataagctgctgtccttccccttcacaactgaccccgcagttacaaactagtatagcatttgtgctgattgatgatagactcatggacttcaggagcccttacttggttttgatcagtgtagcaaattagggatgaagagttcaaaccttttggccctttctttcttttctaggcttctccctcgcagggtgttccgtagtttcttctcgagccaatgcatgtattatagcagcaggtgtctttgtgctttctcatcatagtaacgtactacttgtaaatacatttttctattttctatttttttgtatttttttttttgacattttgtttcattggtgtgctgtatattttccatgccctcactcctttaagaaaaaaaaaaaggaaaaaagcaacacaatcctgtccttgctgttgtgattatagtcttggtttacctgtggtgacaaccgggtgttggggacacatgtcaaatgcccctctgagatgggccctaaattccagtaactggggaaagaaccagctgctgtgtcctgagagcctggccctgtgctgtggtctctgctgcaagcccagatttctgggagtaactagtgttaggtctgctgacctttacctaagcagcccctgcctggtaagaaggtgcccattgttcagaggcaaagagaagcctgcggttggcatgaggatgcctgacaacaaaggctggagaagggccctgagttccagcctctccccaagggtccccgccccagtggctgcctctgtcttgacctgtgtaatgaattagtgtgctgtgtcactgtggcttgaagtcactgtggatcgagctcacagggggcacccatcctgttgtcaacagagtctgaagcagtcagggtgttggattcctctgttgttgtcatcaattcctgctgaggggtttctggggttttgtttttaataaatgactcctttgtagcctttgtcacata

SEQ ID NO: 320832 - DNA, 3666 bp, Homo sapiens
aagaatagaaaactcagtggtcaagaaatggggaaaatgaaaatgttttactagggcctattccctggtggattccagtcaagtgtctacatttctgatttccattcttcttatagtctatggtagtttcaggtcccttaatatggactttgaaaatcaagataaggagaaagacagtaatagttcttctgggtctttcaatggcaacagcaccaataatagcatccaaacaattgactctacccaggctctgttccttccaattggagcatctgtctctcttttagtaatgttcttcttctttgactcagttcaagtagtttttacaatatgtacagcagttcttgcaacgatagcttttgcttttcttctcctcccgatgtgccagtatttaacaagaccctgctcacctcagaacaagatttcctttggttgctgtggacgtttcactgctgctgagttgctgtcattctctctgtctgtcatgctcgtcctcatctgggttctcactggccattggcttctcatggatgcactggccatgggcctctgtgtcgccatgatcgcctttgtccgcctgccgagcctcaaggtctcctgcctgcttctctcagggcttctcatctatgatgtcttttgggtatttttctcagcctacatcttcaatagcaacgtcatggtgaaggtggccactcagccggctgacaatccccttgacgttctatcccggaagctccacctggggcccaatgttgggcgtgatgttcctcgcctgtctctgcctggaaaactggtcttcccaagctccactggcagccacttctccatgttgggcatcggagacatcgttatgcctggtctcctactatgctttgtccttcgctatgacaactacaaaaagcaagccagtggggactcctgtggggcccctggacctgccaacatctccgggcgcatgcagaaggtctcctactttcactgcaccctcatcggatactttgtaggcctgctcactgctactgtggcgtctcgcattcaccgggccgcccagcccgcccttctctatttggtgccatttactttattgccactcctcacgatggcctatttaaagggcgacctccggcggatgtggtctgagcctttccactccaagtccagcagctcccgattcctggaagtatgatggatcacgtggaaagtgaccagatggccgtcatagtccttttctctcaactcatggtttgtttcctcttagagctggcctggtactcagaaatgtacctgtgtttaaggaactgccgtgtgactggatttggcattgaaagggagctcgtttgcaggagagaggtgctggagccctgtttggttccttctcttcctgcggatgtagaggtggggccccttccaagagggacaggcctctccccagcgcgccttcctcccacgtttttatggatctgcaccagactgttaccttctgggggagatggagatttgactgtttaaaaactgaaaacagcgaggagtctttctagaacttttgaacactaaaaggatgaaaaaaattagcaaaccgaagtttcttcaatgacccctcgagaactttgggaccagtttcctatgggggactcagtttcagagaactgagacagaagctcttctgtcgttatattcttctttcctttttttggatttattaaatattttctgtggtgtgaagtgacttattaaatccacagacattgagtgacttcttacaacatccacataagaatttgttgtaatgagttcatgtccacccagatgttgtgttggcagtgaacaagggcacggtttttatacatacgtacatatatatatataaacacacacatagatatatatgaataaacaaaaatgaaatcctgctaagatcacgctgtgtagctgacaggggcttgctgtcgttttgagcatgtcgagcagtttactgtggcttccttgtatatggataagctgctgtccttccccttcacaactgaccccgcagttacaaactagtatagcatttgtgctgattgatgatagactcatggacttcaggagcccttacttggttttgatcagtgtagcaaattagggatgaagagttcaaaccttttggccctttctttcttttctaggcttctccctcgcagggtgttccgtagtttcttctcgagccaatgcatgtattatagcagcaggtgtctttgtgctttctcatcatagtaacgtactacttgtaaatacatttttctattttctatttttttgtatttttttttttgacattttgtttcattggtgtgctgtatattttccatgccctcactcctttaagaaaaaaaaaaaggaaaaaagcaacacaatcctgtccttgctgttgtgattatagtcttggtttacctgtggtgacaaccgggtgttggggacacatgtcaaatgcccctctgagatgggccctaaattccagtaactggggaaagaaccagctgctgtgtcctgagagcctggccctgtgctgtggtctctgctgcaagcccagatttctgggagtaactagtgttaggtctgctgacctttacctaagcagcccctgcctggtaagaaggtgcccattgttcagaggcaaagagaagcctgcggttggcatgaggatgcctgacaacaaaggctggagaagggccctgagttccagcctctccccaagggtccccgccccagtggctgcctctgtcttgacctgtgtaatgaattagtgtgctgtgtcactgtggcttgaagtcactgtggatcgagctcacagggggcacccatcctgttgtcaacagagtctgaagcagtcagggtgttggattcctctgttgttgtcatcaattcctgctgaggggtttctggggttttgtttttaataaatgactcctttgtagcctttgtcacataatcttcactttggttgttggtaccaaacagagctcccagccatctcctccctgttctggaagactgatgggaagactctgtctgtccccagacctggtcatctgcagctctggcccagtcatagatacatcaaagaactgaagcttctgctgtccacagaactcaaaactgcctctgcattgggtgaagactaaaaatccacttgcggactctcccttccttccttctcagccctcgaggatgcatatagctaattaagcaggcccagagacagagaggggggctccaaaatgactcggattaagggcaagtgccagtgatgggtagaaataacgttatccttcatgcctgtaatcccagcactttgggaggccgaggcaggtggatcacaaggttgggagctcgagaccagcctggccaacatggtgaaaccccgtctctactaaaaacacaaaaattagctgggcatggtggcaggcgcctgtaatcccagctatttgggaggctgaggcagaagaatcgcttgaacctggaaggcggaggttgcagtgagcagagattgcgccactgcactcaagtctgggcgacagggtgagactccatctcaaaaaaaaaaaaaagggggcgtcaaaatttccccggagggccaagttaagagttacacattctgtaaaaggggcctatagggggatataaagc

SEQ ID NO: 320833 - DNA, 3684 bp, Homo sapiens
agtggagcagccgccgcagctgcgcggccgccgcttggctctgggacagggagcgcagggagagttggtgagggcctattccctggtggattccagtcaagtgtctacatttctgatttccattcttcttatagtctatggtagtttcaggtcccttaatatggactttgaaaatcaagataaggagaaagacagtaatagttcttctgggtctttcaatggcaacagcaccaataatagcatccaaacaattgactctacccaggctctgttccttccaattggagcatctgtctctcttttagtaatgttcttcttctttgactcagttcaagtagtttttacaatatgtacagcagttcttgcaacgatagcttttgcttttcttctcctcccgatgtgccagtatttaacaagaccctgctcacctcagaacaagatttcctttggttgctgtggacgtttcactgctgctgagttgctgtcattctctctgtctgtcatgctcgtcctcatctgggttctcactggccattggcttctcatggatgcactggccatgggcctctgtgtcgccatgatcgcctttgtccgcctgccgagcctcaaggtctcctgcctgcttctctcagggcttctcatctatgatgtcttttgggtatttttctcagcctacatcttcaatagcaacgtcatggtgaaggtggccactcagccggctgacaatccccttgacgttctatcccggaagctccacctggggcccaatgttgggcgtgatgttcctcgcctgtctctgcctggaaaactggtcttcccaagctccactggcagccacttctccatgttgggcatcggagacatcgttatgcctggtctcctactatgctttgtccttcgctatgacaactacaaaaagcaagccagtggggactcctgtggggcccctggacctgccaacatctccgggcgcatgcagaaggtctcctactttcactgcaccctcatcggatactttgtaggcctgctcactgctactgtggcgtctcgcattcaccgggccgcccagcccgcccttctctatttggtgccatttactttattgccactcctcacgatggcctatttaaagggcgacctccggcggatgtggtctgagcctttccactccaagtccagcagctcccgattcctggaagtatgatggatcacgtggaaagtgaccagatggccgtcatagtccttttctctcaactcatggtttgtttcctcttagagctggcctggtactcagaaatgtacctgtgtttaaggaactgccgtgtgactggatttggcattgaaagggagctcgtttgcaggagagaggtgctggagccctgtttggttccttctcttcctgcggatgtagaggtggggccccttccaagagggacaggcctctccccagcgcgccttcctcccacgtttttatggatctgcaccagactgttaccttctgggggagatggagatttgactgtttaaaaactgaaaacagcgaggagtctttctagaacttttgaacactaaaaggatgaaaaaaattagcaaaccgaagtttcttcaatgacccctcgagaactttgggaccagtttcctatgggggactcagtttcagagaactgagacagaagctcttctgtcgttatattcttctttcctttttttggatttattaaatattttctgtggtgtgaagtgacttattaaatccacagacattgagtgacttcttacaacatccacataagaatttgttgtaatgagttcatgtccacccagatgttgtgttggcagtgaacaagggcacggtttttatacatacgtacatatatatatataaacacacacatagatatatatgaataaacaaaaatgaaatcctgctaagatcacgctgtgtagctgacaggggcttgctgtcgttttgagcatgtcgagcagtttactgtggcttccttgtatatggataagctgctgtccttccccttcacaactgaccccgcagttacaaactagtatagcatttgtgctgattgatgatagactcatggacttcaggagcccttacttggttttgatcagtgtagcaaattagggatgaagagttcaaaccttttggccctttctttcttttctaggcttctccctcgcagggtgttccgtagtttcttctcgagccaatgcatgtattatagcagcaggtgtctttgtgctttctcatcatagtaacgtactacttgtaaatacatttttctattttctatttttttgtatttttttttttgacattttgtttcattggtgtgctgtatattttccatgccctcactcctttaagaaaaaaaaaaaggaaaaaagcaacacaatcctgtccttgctgttgtgattatagtcttggtttacctgtggtgacaaccgggtgttggggacacatgtcaaatgcccctctgagatgggccctaaattccagtaactggggaaagaaccagctgctgtgtcctgagagcctggccctgtgctgtggtctctgctgcaagcccagatttctgggagtaactagtgttaggtctgctgacctttacctaagcagcccctgcctggtaagaaggtgcccattgttcagaggcaaagagaagcctgcggttggcatgaggatgcctgacaacaaaggctggagaagggccctgagttccagcctctccccaagggtccccgccccagtggctgcctctgtcttgacctgtgtaatgaattagtgtgctgtgtcactgtggcttgaagtcactgtggatcgagctcacagggggcacccatcctgttgtcaacagagtctgaagcagtcagggtgttggattcctctgttgttgtcatcaattcctgctgaggggtttctggggttttgtttttaataaatgactcctttgtagcctttgtcacataatcttcactttggttgttggtaccaaacagagctcccagccatctcctccctgttctggaagactgatgggaagactctgtctgtccccagacctggtcatctgcagctctggcccagtcatagatacatcaaagaactgaagcttctgctgtccacagaactcaaaactgcctctgcattgggtgaagactaaaaatccacttgcggactctcccttccttccttctcagccctcgaggatgcatatagctaattaagcaggcccagagacagagaggggggctccaaaatgactcggattaagggcaagtgccagtgatgggtagaaataacgttatccttcatgcctgtaatcccagcactttgggaggccgaggcaggtggatcacaaggttgggagctcgagaccagcctggccaacatggtgaaaccccgtctctactaaaaacacaaaaattagctgggcatggtggcaggcgcctgtaatcccagctatttgggaggctgaggcagaagaatcgcttgaacctggaaggcggaggttgcagtgagcagagattgcgccactgcactcaagtctgggcgacagggtgagactccatctcaaaaaaaaaaaaaagggggcgtcaaaatttccccggagggccaagttaagagttacacattctgtaaaaggggcctatagggggatataaagc

SEQ ID NO: 320834 - DNA, 4084 bp, Homo sapiens
atcgagtggcctcgcctcatcgcctagcgcccccctcagtcgccgccgcctccgcccgctggccatgtcccccggccgccgccgccgccgcccgagcgcggcgctcccgcggccccgcgcgcagtgagcgcgggcccgtcttgccgttcgcccgccccagggcccccttgttctccgcgccgccgccgccgccatgttgggtttggagctccagcggagccgccgccgccgccgcgggtgagggaggccgagagcggagcccgccccgccccggggcccagggagcggggccgcctcggagcccggcctctccccgccagccgccttcccggcccgccgtgcagccagcgagccagcgagcgagcaagcaagcaagcaccggaccccggccgcgccttcagctacggcccgagcgagcccgccgccgccgggcccggccacagcctgcagcggagcccacgagaggcagcgccatggcggagcagacctactcgtgggcctattccctggtggattccagtcaagtgtctacatttctgatttccattcttcttatagtctatggtagtttcaggtcccttaatatggactttgaaaatcaagataaggagaaagacagtaatagttcttctgggtctttcaatggcaacagcaccaataatagcatccaaacaattgactctacccaggctctgttccttccaattggagcatctgtctctcttttagtaatgttcttcttctttgactcagttcaagtagtttttacaatatgtacagcagttcttgcaacgatagcttttgcttttcttctcctcccgatgtgccagtatttaacaagaccctgctcacctcagaacaagatttcctttggttgctgtggacgtttcactgctgctgagttgctgtcattctctctgtctgtcatgctcgtcctcatctgggttctcactggccattggcttctcatggatgcactggccatgggcctctgtgtcgccatgatcgcctttgtccgcctgcttctctcagggcttctcatctatgatgtcttttgggtatttttctcagcctacatcttcaatagcaacgtcatggtgaaggtggccactcagccggctgacaatccccttgacgttctatcccggaagctccacctggggcccaatgttgggcgtgatgttcctcgcctgtctctgcctggaaaactggtcttcccaagctccactggcagccacttctccatgttgggcatcggagacatcgttatgcctggtctcctactatgctttgtccttcgctatgacaactacaaaaagcaagccagtggggactcctgtggggcccctggacctgccaacatctccgggcgcatgcagaaggtctcctactttcactgcaccctcatcggatactttgtaggcctgctcactgctactgtggcgtctcgcattcaccgggccgcccagcccgcccttctctatttggtgccatttactttattgccactcctcacgatggcctatttaaagggcgacctccggcggatgtggtctgagcctttccactccaagtccagcagctcccgattcctggaagtatgatggatcacgtggaaagtgaccagatggccgtcatagtccttttctctcaactcatggtttgtttcctcttagagctggcctggtactcagaaatgtacctgtgtttaaggaactgccgtgtgactggatttggcattgaaagggagctcgtttgcaggagagaggtgctggagccctgtttggttccttctcttcctgcggatgtagaggtggggccccttccaagagggacaggcctctccccagcgcgccttcctcccacgtttttatggatctgcaccagactgttaccttctgggggagatggagatttgactgtttaaaaactgaaaacagcgaggagtctttctagaacttttgaacactaaaaggatgaaaaaaattagcaaaccgaagtttcttcaatgacccctcgagaactttgggaccagtttcctatgggggactcagtttcagagaactgagacagaagctcttctgtcgttatattcttctttcctttttttggatttattaaatattttctgtggtgtgaagtgacttattaaatccacagacattgagtgacttcttacaacatccacataagaatttgttgtaatgagttcatgtccacccagatgttgtgttggcagtgaacaagggcacggtttttatacatacgtacatatatatatataaacacacacatagatatatatgaataaacaaaaatgaaatcctgctaagatcacgctgtgtagctgacaggggcttgctgtcgttttgagcatgtcgagcagtttactgtggcttccttgtatatggataagctgctgtccttccccttcacaactgaccccgcagttacaaactagtatagcatttgtgctgattgatgatagactcatggacttcaggagcccttacttggttttgatcagtgtagcaaattagggatgaagagttcaaaccttttggccctttctttcttttctaggcttctccctcgcagggtgttccgtagtttcttctcgagccaatgcatgtattatagcagcaggtgtctttgtgctttctcatcatagtaacgtactacttgtaaatacatttttctattttctatttttttgtatttttttttttgacattttgtttcattggtgtgctgtatattttccatgccctcactcctttaagaaaaaaaaaaaggaaaaaagcaacacaatcctgtccttgctgttgtgattatagtcttggtttacctgtggtgacaaccgggtgttggggacacatgtcaaatgcccctctgagatgggccctaaattccagtaactggggaaagaaccagctgctgtgtcctgagagcctggccctgtgctgtggtctctgctgcaagcccagatttctgggagtaactagtgttaggtctgctgacctttacctaagcagcccctgcctggtaagaaggtgcccattgttcagaggcaaagagaagcctgcggttggcatgaggatgcctgacaacaaaggctggagaagggccctgagttccagcctctccccaagggtccccgccccagtggctgcctctgtcttgacctgtgtaatgaattagtgtgctgtgtcactgtggcttgaagtcactgtggatcgagctcacagggggcacccatcctgttgtcaacagagtctgaagcagtcagggtgttggattcctctgttgttgtcatcaattcctgctgaggggtttctggggttttgtttttaataaatgactcctttgtagcctttgtcacataatcttcactttggttgttggtaccaaacagagctcccagccatctcctccctgttctggaagactgatgggaagactctgtctgtccccagacctggtcatctgcagctctggcccagtcatagatacatcaaagaactgaagcttctgctgtccacagaactcaaaactgcctctgcattgggtgaagactaaaaatccacttgcggactctcccttccttccttctcagccctcgaggatgcatatagctaattaagcaggcccagagacagagaggggggctccaaaatgactcggattaagggcaagtgccagtgatgggtagaaataacgttatccttcatgcctgtaatcccagcactttgggaggccgaggcaggtggatcacaaggttgggagctcgagaccagcctggccaacatggtgaaaccccgtctctactaaaaacacaaaaattagctgggcatggtggcaggcgcctgtaatcccagctatttgggaggctgaggcagaagaatcgcttgaacctggaaggcggaggttgcagtgagcagagattgcgccactgcactcaagtctgggcgacagggtgagactccatctcaaaaaaaaaaaaaagggggcgtcaaaatttccccggagggccaagttaagagttacacattctgtaaaaggggcctatagggggatataaagc

SEQ ID NO: 320835 - DNA, 3170 bp, Homo sapiens
caaagattttctcaaatcatacagtcaacgaaagcattgcagtcacagcattctgagactctgctcttaagagcaaggagggctgatgctgaaagcaggttgcttccaactccctctgttaaaggcatctctccaactcggcaggtatttttctcagcctacatcttcaatagcaacgtcatggtgaaggtggccactcagccggctgacaatccccttgacgttctatcccggaagctccacctggggcccaatgttgggcgtgatgttcctcgcctgtctctgcctggaaaactggtcttcccaagctccactggcagccacttctccatgttgggcatcggagacatcgttatgcctggtctcctactatgctttgtccttcgctatgacaactacaaaaagcaagccagtggggactcctgtggggcccctggacctgccaacatctccgggcgcatgcagaaggtctcctactttcactgcaccctcatcggatactttgtaggcctgctcactgctactgtggcgtctcgcattcaccgggccgcccagcccgcccttctctatttggtgccatttactttattgccactcctcacgatggcctatttaaagggcgacctccggcggatgtggtctgagcctttccactccaagtccagcagctcccgattcctggaagtatgatggatcacgtggaaagtgaccagatggccgtcatagtccttttctctcaactcatggtttgtttcctcttagagctggcctggtactcagaaatgtacctgtgtttaaggaactgccgtgtgactggatttggcattgaaagggagctcgtttgcaggagagaggtgctggagccctgtttggttccttctcttcctgcggatgtagaggtggggccccttccaagagggacaggcctctccccagcgcgccttcctcccacgtttttatggatctgcaccagactgttaccttctgggggagatggagatttgactgtttaaaaactgaaaacagcgaggagtctttctagaacttttgaacactaaaaggatgaaaaaaattagcaaaccgaagtttcttcaatgacccctcgagaactttgggaccagtttcctatgggggactcagtttcagagaactgagacagaagctcttctgtcgttatattcttctttcctttttttggatttattaaatattttctgtggtgtgaagtgacttattaaatccacagacattgagtgacttcttacaacatccacataagaatttgttgtaatgagttcatgtccacccagatgttgtgttggcagtgaacaagggcacggtttttatacatacgtacatatatatatataaacacacacatagatatatatgaataaacaaaaatgaaatcctgctaagatcacgctgtgtagctgacaggggcttgctgtcgttttgagcatgtcgagcagtttactgtggcttccttgtatatggataagctgctgtccttccccttcacaactgaccccgcagttacaaactagtatagcatttgtgctgattgatgatagactcatggacttcaggagcccttacttggttttgatcagtgtagcaaattagggatgaagagttcaaaccttttggccctttctttcttttctaggcttctccctcgcagggtgttccgtagtttcttctcgagccaatgcatgtattatagcagcaggtgtctttgtgctttctcatcatagtaacgtactacttgtaaatacatttttctattttctatttttttgtatttttttttttgacattttgtttcattggtgtgctgtatattttccatgccctcactcctttaagaaaaaaaaaaaggaaaaaagcaacacaatcctgtccttgctgttgtgattatagtcttggtttacctgtggtgacaaccgggtgttggggacacatgtcaaatgcccctctgagatgggccctaaattccagtaactggggaaagaaccagctgctgtgtcctgagagcctggccctgtgctgtggtctctgctgcaagcccagatttctgggagtaactagtgttaggtctgctgacctttacctaagcagcccctgcctggtaagaaggtgcccattgttcagaggcaaagagaagcctgcggttggcatgaggatgcctgacaacaaaggctggagaagggccctgagttccagcctctccccaagggtccccgccccagtggctgcctctgtcttgacctgtgtaatgaattagtgtgctgtgtcactgtggcttgaagtcactgtggatcgagctcacagggggcacccatcctgttgtcaacagagtctgaagcagtcagggtgttggattcctctgttgttgtcatcaattcctgctgaggggtttctggggttttgtttttaataaatgactcctttgtagcctttgtcacataatcttcactttggttgttggtaccaaacagagctcccagccatctcctccctgttctggaagactgatgggaagactctgtctgtccccagacctggtcatctgcagctctggcccagtcatagatacatcaaagaactgaagcttctgctgtccacagaactcaaaactgcctctgcattgggtgaagactaaaaatccacttgcggactctcccttccttccttctcagccctcgaggatgcatatagctaattaagcaggcccagagacagagaggggggctccaaaatgactcggattaagggcaagtgccagtgatgggtagaaataacgttatccttcatgcctgtaatcccagcactttgggaggccgaggcaggtggatcacaaggttgggagctcgagaccagcctggccaacatggtgaaaccccgtctctactaaaaacacaaaaattagctgggcatggtggcaggcgcctgtaatcccagctatttgggaggctgaggcagaagaatcgcttgaacctggaaggcggaggttgcagtgagcagagattgcgccactgcactcaagtctgggcgacagggtgagactccatctcaaaaaaaaaaaaaagggggcgtcaaaatttccccggagggccaagttaagagttacacattctgtaaaaggggcctatagggggatataaagc

SEQ ID NO: 320836 - DNA, 2767 bp, Homo sapiens
  misc_feature (2476)..(2476): n is a, c, g, or t
atcgagtggcctcgcctcatcgcctagcgcccccctcagtcgccgccgcctccgcccgctggccatgtcccccggccgccgccgccgccgcccgagcgcggcgctcccgcggccccgcgcgcagtgagcgcgggcccgtcttgccgttcgcccgccccagggcccccttgttctccgcgccgccgccgccgccatgttgggtttggagctccagcggagccgccgccgccgccgcgggtgagggaggccgagagcggagcccgccccgccccggggcccagggagcggggccgcctcggagcccggcctctccccgccagccgccttcccggcccgccgtgcagccagcgagccagcgagcgagcaagcaagcaagcaccggaccccggccgcgccttcagctacggcccgagcgagcccgccgccgccgggcccggccacagcctgcagcggagcccacgagaggcagcgccatggcggagcagacctactcgtgggcctattccctggtggattccagtcaagtgtctacatttctgatttccattcttcttatagtctatggtagtttcaggtcccttaatatggactttgaaaatcaagataaggagaaagacagtaatagttcttctgggtctttcaatggcaacagcaccaataatagcatccaaacaattgactctacccaggctctgttccttccaattggagcatctgtctctcttttagtaatgttcttcttctttgactcagttcaagtagtttttacaatatgtacagcagttcttgcaacgatagcttttgcttttcttctcctcccgatgtgccagtatttaacaagaccctgctcacctcagaacaagatttcctttggttgctgtggacgtttcactgctgctgagttgctgtcattctctctgtctgtcatgctcgtcctcatctgggttctcactggccattggcttctcatggatgcactggccatgggcctctgtgtcgccatgatcgcctttgtccgcctgccgagcctcaaggtctcctgcctgcttctctcagggcttctcatctatgatgtcttttgggtatttttctcagcctacatcttcaatagcaacgtcatggtgaaggtggccactcagccggctgacaatccccttgacgttctatcccggaagctccacctggggcccaatgttgggcgtgatgttcctcgcctgtctctgcctggaaaactggtcttcccaagctccactggcagccacttctccatgttgggcatcggagacatcgttatgcctggtctcctactatgctttgtccttcgctatgacaactacaaaaagcaagccagtggggactcctgtggggcccctggacctgccaacatctccgggcgcatgcagaaggtctcctactttcactgcaccctcatcggatactttgtaggcctgctcactgctactgtggcgtctcgcattcaccgggccgcccagcccgcccttctctatttggtgccatttactttattgccactcctcacgatggcctatttaaagggcgacctccggcggatgtggtctgagcctttccactccaagtccagcagctcccgattcctggaagtatgatggatcacgtggaaagtgaccagatggccgtcatagtccttttctctcaactcatggtttgtttcctcttagagctggcctggtactcagaaatgtacctgtgtttaaggaactgccgtgtgactggatttggcattgaaagggagctcgtttgcaggagagaggtgctggagccctgtttggttccttctcttcctgcggatgtagaggtggggccccttccaagagggacaggcctctccccagcgcgccttcctcccacgtttttatggatctgcaccagactgttaccttctgggggagatggagatttgactgtttaaaaactgaaaacagcgaggagtctttctagaacttttgaacactaaaaggatgaaaaaaattagcaaaccgaagtttcttcaatgacccctcgagaactttgggaccagtttcctatgggggactcagtttcagagaactgagacagaagctcttctgtcgttatattcttctttcctttttttggatttattaaatattttctgtggtgtgaagtgacttattaaatccacagacattgagtgacttcttacaacatccacataagaatttgttgtaatgagttcatgtccacccagatgttgtgttggcagtgaacaagggcacggtttttatacatacgtacatatatatatataaacacacacatagatatatatgaataaacaaaaatgaaatcctgctaagatcacgctgtgtagctgacaggggcttgctgtcgttttgagcatgtcgagcagtttactgtggcttccttgtttttttttatccttggggggggataagctgctgtccttccccttcancaaatgtgggaaacccccccccggggcccagaagggtttttttaaaacccccaaaaaaacaccaaacccccttttttctacacacgcggggggcctttttttgacaaccgtttttcttttcaaccaacggggggggcggccccccgagacaaaaaagtgtcttttttttttggatagtcaggcgtagcaggggggggggcgagcactttattgtgcggggggcgacgcctccactcgatgctctctatgttgggggggggggcacaacacacagcgagttgtcttactgtg

SEQ ID NO: 320837 - DNA, 2163 bp, Homo sapiens
atcgagtggcctcgcctcatcgcctagcgcccccctcagtcgccgccgcctccgcccgctggccatgtcccccggccgccgccgccgccgcccgagcgcggcgctcccgcggccccgcgcgcagtgagcgcgggcccgtcttgccgttcgcccgccccagggcccccttgttctccgcgccgccgccgccgccatgttgggtttggagctccagcggagccgccgccgccgccgcgggtgagggaggccgagagcggagcccgccccgccccggggcccagggagcggggccgcctcggagcccggcctctccccgccagccgccttcccggcccgccgtgcagccagcgagccagcgagcgagcaagcaagcaagcaccggaccccggccgcgccttcagctacggcccgagcgagcccgccgccgccgggcccggccacagcctgcagcggagcccacgagaggcagcgccatggcggagcagacctactcgtgggcctattccctggtggattccagtcaagtgtctacatttctgatttccattcttcttatagtctatggtagtttcaggtcccttaatatggactttgaaaatcaagataaggagaaagacagtaatagttcttctgggtctttcaatggcaacagcaccaataatagcatccaaacaattgactctacccaggctctgttccttccaattggagcatctgtctctcttttagtaatgttcttcttctttgactcagttcaagtagtttttacaatatgtacagcagttcttgcaacgatagcttttgcttttcttctcctcccgatgtgccagtatttaacaagaccctgctcacctcagaacaagatttcctttggttgctgtggacgtttcactgctgctgagttgctgtcattctctctgtctgtcatgctcgtcctcatctgggttctcactggccattggcttctcatggatgcactggccatgggcctctgtgtcgccatgatcgcctttgtccgcctgccgagcctcaaggtctcctgcctgcttctctcagggcttctcatctatgatgtcttttgggtatttttctcagcctacatcttcaatagcaacgtcatggtgaaggtggccactcagccggctgacaatccccttgacgttctatcccggaagctccacctggggcccaatgttgggcgtgatgttcctcgcctgtctctgcctggaaaactggtcttcccaagctccactggcagccacttctccatgttgggcatcggagacatcgttatgcctggtctcctactatgctttgtccttcgctatgacaactacaaaaagcaagccagtggggactcctgtggggcccctggacctgccaacatctccgggcgcatgcagaaggtctcctactttcactgcaccctcatcggatactttgtaggcctgctcactgctactgtggcgtctcgcattcaccgggccgcccagcccgcccttctctatttggtgccatttactttattgccactcctcacgatggcctatttaaagggcgacctccggcggatgtggtctgagcctttccactccaagtccagcagctcccgattcctggaagtatgatggatcacgtggaaagtgaccagatggccgtcatagtccttttctctcaactcatggtttgtttcctcttagagctggcctggtactcagaaatgtacctgtgtttaaggaactgccgtgtgactggatttggcattgaaagggagctcgtttgcaggagagaggtgctggagccctgtttggttccttctcttcctgcggatgtagaggtggggccccttccaagagggacaggcctctccccagcgcgccttcctcccacgtttttatggatctgcaccagactgttaccttctgggggagatggagatttgactgtttaaaaactgaaaacagcgaggagtctttctagaacttttgaacactaaaaggatgaaaaaaattagcaaaccgaagtttcttcaatgacccctcgagaactttgggaccagtttcctatgggggactcagtttcagagaactgagacagaagctcttctgtcgttatattcttctttcctttttttggatttattaaatattttctgtggtgtga

SEQ ID NO: 320838 - DNA, 501 bp, Homo sapiens
cttaggggaatgtgttttcttatgaaattttaatgtgatgacaaatgctgattgcccagcagcacattttctgtttctgtcttcgggaaaataggttaattttaagcagtgcgaaggggagctcaggccagtgttttcactccccgtgtgtcgttgatgtctctctcccacagaactgaagcagattacctggctcagtgtcacagggctgctgatggtggtcttcggagaatgtctgaggaaggcggccatgtttacagctggctccaatttcaaccacgtggtacagaatgaaaaatcagatacacatactctggtgaccagtggagtgtacgcttggtttcggcatccttcttacgtcgggtggttttactggagtattggaactcaggtataatattaaatatgacactgcttttcttttttttttttttaagtaacattttaaacgtgatattcacgtagcataaaagtcaccatttcaaaatatacaattagtgg

SEQ ID NO: 320839 - DNA, 4752 bp, Homo sapiens
  misc_feature (2799)..(2799): n is a, c, g, or t
gcagccggcgcgtttctccgggctacagccggcgccgccgcccgctagtccgccgcccggcgccatggcgggctgcgcggcgcgggctccgccgggctctgaggcgcgtctcagcctcgccaccttcctgctgggcgcctcggtgctcgcgctgccgctgctcacgcgcgccggcctgcagggccgcaccgggctggcgctctacgtggccgggctcaacgcgctgctgctgctgctctatcggccgcctcgctaccagatagccatccgagcttgtttcctggggtttgtgttcggctgcggcacgctgctaagttttagccagtcttcttggagtcactttggctggtacatgtgctccctgtcattgttccactattctgaatacttggtgacagcagtcaataatcccaaaagtctgtccttggattcctttctcctgaatcacagcctggagtatacagtagctgctctttcttcttggttagagttcacacttgaaaatatcttttggccagaactgaagcagattacctggctcagtgtcacagggctgctgatggtggtcttcggagaatgtctgaggaaggcggccatgtttacagctggctccaatttcaaccacgtggtacagaatgaaaaatcagatacacatactctggtgaccagtggagtgtacgcttggtttcggcatccttcttacgtcgggtggttttactggagtattggaactcaggtgatgctgtgtaaccccatctgcggcgtcagctatgccctgacagtgtggcgattcttccgcgatcgaacagaagaagaagaaatctcactaattcacttttttggagaggagtacctggagtataagaagagggtgcccacgggcctgcctttcataaagggggtcaaggtggacctgtgacgggcagtggccccggtgaccttggggcctccgaccctgtgcagcctgggacaaaactgtttccggttggccgctgccacatggattttcttaatcgttttatgtcattagtcactcttctggaatgtcactcaagaccaagcggtcagaaggcctgaggacccaaggccccactggagcagtctgtccttatgccgaatcaaggcggaacatgggtgaaagacgagtaaggggcaaatcacagcaatattccacagcgccctccagagttacctggggaggaccgaggccacacgccactgcccccgaggccagagtgtaagtaaaggataaccaggactcgctgggagagatggactctgtcctcagcaacactccacagcagaaaggggtagcaggtaccccttcttatcagcggtaaaaatgcatttacaacctttcatttaaccgaaaaacacagaccgctttaacctctttatttctgtcccccactgcatgaacatctatacaattttaaaaatacttcctcataggatgctttggcccttcatctatttaatcatagctacatacctattttttataagtagcagtacacattcaaaggggtattcctagctcaatgcttggtgttctagttcaacttttatcctgcagcaagtaagcctagataactctacacgatttggctgagtggctttgtgtgaccgtggccccaggccaaggggatcatggccctggctggctttcccgggggtctcagctcctgttgtcagtgataggcggctcaaaggagcatcagtttcttttgatccaagaagtgcttactgaatgcctgccctgtgcgtggccttaaacattgagaagtgctgctctccgtttatttgggatttgattctcattttaccatagcttatattctcaatttcaatgccagtctcagaactcttgttttctgtgttctgttctcaaaattacattgtccctcatgtcatttcaaactgttttccaaagggatttgagcatatacaactacaaatccaagcagattgactctcaaaaataatcttaaatactgcaaatagtcccaactaagattcagtcagtatgtttgttttgcaagtttgggagagtaagttggctttgagtcacacatcgaagctttaagaggtgagacgctggcttcattctggactagacaggaacttggcctcagcgtgagatcctgccatgcagtgttgcggtggcactgaagaagtgtgaatgtgaaggcggcgtcggcgcggggccagagcaccactctgctgccccaccacgcggcctgtgaggagccactaaacctttccgtgcctagacctccccatctgtggaatggggtcaataccacctacctcacaggggtgttgtgaggactgagaagaacaatgtcaaatgtttttaatactcagatgtgggagcgacatcaatgaaatctgtactgtatgaaagctacacaaaaatgggcagacatttggttaattgtgccagatacctaaaatgtatgttcagaaaagcattttatcaactcagaaatatgacttatttctagatttcatggcttaatgaattttttcattgttatatataccaaagaggcttacgggttcattgattggtttgaaaaccagacagacggccgggcgcggtggctcacgcctgtaatcccagcaatttgggaggccaaggcgggtggatcatgaggtcaggcgttcgagaccagcctggccaacatgataaaaccccgtctctactaaaaatacaaaaaaatagctgggcgtgctggcgggtgcctgtaatcccagctactcaggaggctgagacaggagaatcctttgaacccnggaggcggaggttgcagtgagttgagatcgggcctttgcacttcagtctgggcaacagggcgagactccatctcaaaaaacaacaacaacaacaaaaaaaaccggacggacttgcccatcggccctcacgacacgcgtgcagtgggactctagccaaggcggtggccgagccatcattacaatttttctggagtaaatgatccacggtgggacatcaactggcacttactctgtttaggaacttgagttgaatcatttctaaacttgtcctttagaccacgcctagggcagcaaattccacttcctagaactgcaaaccgggagaggatgtagttagattctggcatcctgccccggctctttgagggaaaagttctttcccctgctctaagtagggcgggcccagcctccattcccattgggagccatgaagttgtcttgttgataggtctagggcagctgttggcagctgctggccttgtggatggtaagctgactgtgttggcatttaatgccatcctccatctgccagaggcccaggaagcccaccttcacaccaggcccaccagctggaaggagcccaggaggcaggtcttagggtttcatggtgaaatgctgtctgacaccagggaaaaattcccaccctgtttataatcccagagcagaagtcagcaattacttagggataaaagatgaactccattttttttattttcttaagacagtcttgctctgtggcccaggctggaggctggagtgcagtggcaccatttcggctcaccgcaacctctgcctcccgggttcaagcgattctcctgcctcagcctcctgagtagctgggattacaggcttgggccaccatgcccagctaatttttttgtatttttagtagagacggggtttcaccatgatggccaggctggtctcgaactcctgacctcaagtgatccacgcgcctcggcctcccaaagtgctgggattgcaggcgtgagccaccacgcccagccaagatgaactccttaaggacaggatttggtaagtgattgacttctttttagttccatgatcttgagattatttttagctttataaatttagcagtggcagggcccgtggagaatcaggttaatgaggtaaaggctttctgggtatttgctgccaaggccacatcaccaattttctcgatttaaaaaactgtcaagagatttatttttccattgcaggttttaaagtggagattctgaagtggaaaataggtactgtcagaacaaagctacctggaaacagcatagagtgaagcctttcgtgagggcttgcaggccgctgctgagtggcagtttacagaagaggtcgcggggtgagcctcttagcaggacagaaaacaaggcagcagcgcacctgccaccccttcacgagctgctccttgagcctaaaaagtaggctttattcatcccttctgttcatttaccaacctgggggattgatacgaccggggaaaatgttcctaaaccaggaagctgcgttagccgatcaggctttgtaagatctcgccaacagctagctgcttaggagtacccccacgatacgcacagcacaccactgtcccttcactgcactttcttcctgccttaggtagttgggcttgcccaccctagtttgcttttgtagtggtttggcaaggttagaaggcctcggcctctctgtcatgctgggaagtgcctactctctgggccactgctgcagaggccgtggcacttgtcatgggtttggaagacccagccatctgcagcagaggcagcctatcccattgcaaggagaggaactgaacggagtaattattctactcttctttttacataaatgtttatttaaatattctaaattggattttctttcacagatactgattattctttccagttcttaaataaaactgcacttgatttcactcaa

SEQ ID NO: 320840 - DNA, 4699 bp, Homo sapiens
  misc_feature (2799)..(2799): n is a, c, g, or t
gcagccggcgcgtttctccgggctacagccggcgccgccgcccgctagtccgccgcccggcgccatggcgggctgcgcggcgcgggctccgccgggctctgaggcgcgtctcagcctcgccaccttcctgctgggcgcctcggtgctcgcgctgccgctgctcacgcgcgccggcctgcagggccgcaccgggctggcgctctacgtggccgggctcaacgcgctgctgctgctgctctatcggccgcctcgctaccagatagccatccgagcttgtttcctggggtttgtgttcggctgcggcacgctgctaagttttagccagtcttcttggagtcactttggctggtacatgtgctccctgtcattgttccactattctgaatacttggtgacagcagtcaataatcccaaaagtctgtccttggattcctttctcctgaatcacagcctggagtatacagtagctgctctttcttcttggttagagttcacacttgaaaatatcttttggccagaactgaagcagattacctggctcagtgtcacagggctgctgatggtggtcttcggagaatgtctgaggaaggcggccatgtttacagctggctccaatttcaaccacgtggtacagaatgaaaaatcagatacacatactctggtgaccagtggagtgtacgcttggtttcggcatccttcttacgtcgggtggttttactggagtattggaactcaggtgatgctgtgtaaccccatctgcggcgtcagctatgccctgacagtgtggcgattcttccgcgatcgaacagaagaagaagaaatctcactaattcacttttttggagaggagtacctggagtataagaagagggtgcccacgggcctgcctttcataaagggggtcaaggtggacctgtgacgggcagtggccccggtgaccttggggcctccgaccctgtgcagcctgggacaaaactgtttccggttggccgctgccacatggattttcttaatcgttttatgtcattagtcactcttctggaatgtcactcaagaccaagcggtcagaaggcctgaggacccaaggccccactggagcagtctgtccttatgccgaatcaaggcggaacatgggtgaaagacgagtaaggggcaaatcacagcaatattccacagcgccctccagagttacctggggaggaccgaggccacacgccactgcccccgaggccagagtgtaagtaaaggataaccaggactcgctgggagagatggactctgtcctcagcaacactccacagcagaaaggggtagcaggtaccccttcttatcagcggtaaaaatgcatttacaacctttcatttaaccgaaaaacacagaccgctttaacctctttatttctgtcccccactgcatgaacatctatacaattttaaaaatacttcctcataggatgctttggcccttcatctatttaatcatagctacatacctattttttataagtagcagtacacattcaaaggggtattcctagctcaatgcttggtgttctagttcaacttttatcctgcagcaagtaagcctagataactctacacgatttggctgagtggctttgtgtgaccgtggccccaggccaaggggatcatggccctggctggctttcccgggggtctcagctcctgttgtcagtgataggcggctcaaaggagcatcagtttcttttgatccaagaagtgcttactgaatgcctgccctgtgcgtggccttaaacattgagaagtgctgctctccgtttatttgggatttgattctcattttaccatagcttatattctcaatttcaatgccagtctcagaactcttgttttctgtgttctgttctcaaaattacattgtccctcatgtcatttcaaactgttttccaaagggatttgagcatatacaactacaaatccaagcagattgactctcaaaaataatcttaaatactgcaaatagtcccaactaagattcagtcagtatgtttgttttgcaagtttgggagagtaagttggctttgagtcacacatcgaagctttaagaggtgagacgctggcttcattctggactagacaggaacttggcctcagcgtgagatcctgccatgcagtgttgcggtggcactgaagaagtgtgaatgtgaaggcggcgtcggcgcggggccagagcaccactctgctgccccaccacgcggcctgtgaggagccactaaacctttccgtgcctagacctccccatctgtggaatggggtcaataccacctacctcacaggggtgttgtgaggactgagaagaacaatgtcaaatgtttttaatactcagatgtgggagcgacatcaatgaaatctgtactgtatgaaagctacacaaaaatgggcagacatttggttaattgtgccagatacctaaaatgtatgttcagaaaagcattttatcaactcagaaatatgacttatttctagatttcatggcttaatgaattttttcattgttatatataccaaagaggcttacgggttcattgattggtttgaaaaccagacagacggccgggcgcggtggctcacgcctgtaatcccagcaatttgggaggccaaggcgggtggatcatgaggtcaggcgttcgagaccagcctggccaacatgataaaaccccgtctctactaaaaatacaaaaaaatagctgggcgtgctggcgggtgcctgtaatcccagctactcaggaggctgagacaggagaatcctttgaacccnggaggcggaggttgcagtgagttgagatcgggcctttgcacttcagtctgggcaacagggcgagactccatctcaaaaaacaacaacaacaacaaaaaaaaccggacggacttgcccatcggccctcacgacacgcgtgcagtgggactctagccaaggcggtggccgagccatcattacaatttttctggagtaaatgatccacggtgggacatcaactggcacttactctgtttaggaacttgagttgaatcatttctaaacttgtcctttagaccacgcctagggcagcaaattccacttcctagaactgcaaaccgggagaggatgtagttagattctggcatcctgccccggctctttgagggaaaaccatgaagttgtcttgttgataggtctagggcagctgttggcagctgctggccttgtggatggtaagctgactgtgttggcatttaatgccatcctccatctgccagaggcccaggaagcccaccttcacaccaggcccaccagctggaaggagcccaggaggcaggtcttagggtttcatggtgaaatgctgtctgacaccagggaaaaattcccaccctgtttataatcccagagcagaagtcagcaattacttagggataaaagatgaactccattttttttattttcttaagacagtcttgctctgtggcccaggctggaggctggagtgcagtggcaccatttcggctcaccgcaacctctgcctcccgggttcaagcgattctcctgcctcagcctcctgagtagctgggattacaggcttgggccaccatgcccagctaatttttttgtatttttagtagagacggggtttcaccatgatggccaggctggtctcgaactcctgacctcaagtgatccacgcgcctcggcctcccaaagtgctgggattgcaggcgtgagccaccacgcccagccaagatgaactccttaaggacaggatttggtaagtgattgacttctttttagttccatgatcttgagattatttttagctttataaatttagcagtggcagggcccgtggagaatcaggttaatgaggtaaaggctttctgggtatttgctgccaaggccacatcaccaattttctcgatttaaaaaactgtcaagagatttatttttccattgcaggttttaaagtggagattctgaagtggaaaataggtactgtcagaacaaagctacctggaaacagcatagagtgaagcctttcgtgagggcttgcaggccgctgctgagtggcagtttacagaagaggtcgcggggtgagcctcttagcaggacagaaaacaaggcagcagcgcacctgccaccccttcacgagctgctccttgagcctaaaaagtaggctttattcatcccttctgttcatttaccaacctgggggattgatacgaccggggaaaatgttcctaaaccaggaagctgcgttagccgatcaggctttgtaagatctcgccaacagctagctgcttaggagtacccccacgatacgcacagcacaccactgtcccttcactgcactttcttcctgccttaggtagttgggcttgcccaccctagtttgcttttgtagtggtttggcaaggttagaaggcctcggcctctctgtcatgctgggaagtgcctactctctgggccactgctgcagaggccgtggcacttgtcatgggtttggaagacccagccatctgcagcagaggcagcctatcccattgcaaggagaggaactgaacggagtaattattctactcttctttttacataaatgtttatttaaatattctaaattggattttctttcacagatactgattattctttccagttcttaaataaaactgcacttgatttcactcaa

SEQ ID NO: 320841 - DNA, 3518 bp, Homo sapiens
gcagccggcgcgtttctccgggctacagccggcgccgccgcccgctagtccgccgcccggcgccatggcgggctgcgcggcgcgggctccgccgggctctgaggcgcgtctcagcctcgccaccttcctgctgggcgcctcggtgctcgcgctgccgctgctcacgcgcgccggcctgcagggccgcaccgggctggcgctctacgtggccgggctcaacgcgctgctgctgctgctctatcggccgcctcgctaccagatagccatccgagcttgtttcctggggtttgtgttcggctgcggcacgctgctaagttttagccagtcttcttggagtcactttggctggtacatgtgctccctgtcattgttccactattctgaatacttggtgacagcagtcaataatcccaaaagtctgtccttggattcctttctcctgaatcacagcctggagtatacagtagctgctctttcttcttggttagagttcacacttgaaaatatcttttggccagaactgaagcagattacctggctcagtgtcacagggctgctgatggtggtcttcggagaatgtctgaggaaggcggccatgtttacagctggctccaatttcaaccacgtggtacagaatgaaaaatcagatacacatactctggtgaccagtggagtgtacgcttggtttcggcatccttcttacgtcgggtggttttactggagtattggaactcaggtgatgctgtgtaaccccatctgcggcgtcagctatgccctgacagtgtggcgattcttccgcgatcgaacagaagaagaagaaatctcactaattcacttttttggagaggagtacctggagtataagaagagggtgcccacgggcctgcctttcataaagggggtcaaggtggacctgtgacgggcagtggccccggtgaccttggggcctccgaccctgtgcagcctgggacaaaactgtttccggttggccgctgccacatggattttcttaatcgttttatgtcattagtcactcttctggaatgtcactcaagaccaagcggtcagaaggcctgaggacccaaggccccactggagcagtctgtccttatgccgaatcaaggcggaacatgggtgaaagacgagtaaggggcaaatcacagcaatattccacagcgccctccagagttacctggggaggaccgaggccacacgccactgcccccgaggccagagtgtaagtaaaggataaccaggactcgctgggagagatggactctgtcctcagcaacactccacagcagaaaggggtagcaggtaccccttcttatcagcggtaaaaatgcatttacaacctttcatttaaccgaaaaacacagaccgctttaacctctttatttctgtcccccactgcatgaacatctatacaattttaaaaatacttcctcataggatgctttggcccttcatctatttaatcatagctacatacctattttttataagtagcagtacacattcaaaggggtattcctagctcaatgcttggtgttctagttcaacttttatcctgcagcaagtaagcctagataactctacacgatttggctgagtggctttgtgtgaccgtggccccaggccaaggggatcatggccctggctggctttcccgggggtctcagctcctgttgtcagtgataggcggctcaaaggagcatcagtttcttttgatccaagaagtgcttactgaatgcctgccctgtgcgtggccttaaacattgagaagtgctgctctccgtttatttgggatttgattctcattttaccatagcttatattctcaatttcaatgccagtctcagaactcttgttttctgtgttctgttctcaaaattacattgtccctcatgtcatttcaaactgttttccaaagggatttgagcatatacaactacaaatccaagcagattgactctcaaaaataatcttaaatactgcaaatagtcccaactaagattcagtcagtatgtttgttttgcaagtttgggagagtaagttggctttgagtcacacatcgaagctttaagaggtgagacgctggcttcattctggactagacaggaacttggcctcagcgtgagatcctgccatgcagtgttgcggtggcactgaagaagtgtgaatgtgaaggcggcgtcggcgcggggccagagcaccactctgctgccccaccacgcggcctgtgaggagccactaaacctttccgtgcctagacctccccatctgtggaatggggtcaataccacctacctcacaggggtgttgtgaggactgagaagaacaatgtcaaatgtttttaatactcagatgtgggagcgacatcaatgaaatctgtactgtatgaaagctacacaaaaatgggcagacatttggttaattgtgccagatacctaaaatgtatgttcagaaaagcattttatcaactcagaaatatgacttatttctagatttcatggcttaatgaattttttcattgttatatataccaaagagggagccaccacgcccagccaagatgaactccttaaggacaggatttggtaagtgattgacttctttttagttccatgatcttgagattatttttagctttataaatttagcagtggcagggcccgtggagaatcaggttaatgaggtaaaggctttctgggtatttgctgccaaggccacatcaccaattttctcgatttaaaaaactgtcaagagatttatttttccattgcaggttttaaagtggagattctgaagtggaaaataggtactgtcagaacaaagctacctggaaacagcatagagtgaagcctttcgtgagggcttgcaggccgctgctgagtggcagtttacagaagaggtcgcggggtgagcctcttagcaggacagaaaacaaggcagcagcgcacctgccaccccttcacgagctgctccttgagcctaaaaagtaggctttattcatcccttctgttcatttaccaacctgggggattgatacgaccggggaaaatgttcctaaaccaggaagctgcgttagccgatcaggctttgtaagatctcgccaacagctagctgcttaggagtacccccacgatacgcacagcacaccactgtcccttcactgcactttcttcctgccttaggtagttgggcttgcccaccctagtttgcttttgtagtggtttggcaaggttagaaggcctcggcctctctgtcatgctgggaagtgcctactctctgggccactgctgcagaggccgtggcacttgtcatgggtttggaagacccagccatctgcagcagaggcagcctatcccattgcaaggagaggaactgaacggagtaattattctactcttctttttacataaatgtttatttaaatattctaaattggattttctttcacagatactgattattctttccagttcttaaataaaactgcacttgatttcactcaa

SEQ ID NO: 320842 - DNA, 3832 bp, Homo sapiens
  misc_feature (2799)..(2799): n is a, c, g, or t
gcagccggcgcgtttctccgggctacagccggcgccgccgcccgctagtccgccgcccggcgccatggcgggctgcgcggcgcgggctccgccgggctctgaggcgcgtctcagcctcgccaccttcctgctgggcgcctcggtgctcgcgctgccgctgctcacgcgcgccggcctgcagggccgcaccgggctggcgctctacgtggccgggctcaacgcgctgctgctgctgctctatcggccgcctcgctaccagatagccatccgagcttgtttcctggggtttgtgttcggctgcggcacgctgctaagttttagccagtcttcttggagtcactttggctggtacatgtgctccctgtcattgttccactattctgaatacttggtgacagcagtcaataatcccaaaagtctgtccttggattcctttctcctgaatcacagcctggagtatacagtagctgctctttcttcttggttagagttcacacttgaaaatatcttttggccagaactgaagcagattacctggctcagtgtcacagggctgctgatggtggtcttcggagaatgtctgaggaaggcggccatgtttacagctggctccaatttcaaccacgtggtacagaatgaaaaatcagatacacatactctggtgaccagtggagtgtacgcttggtttcggcatccttcttacgtcgggtggttttactggagtattggaactcaggtgatgctgtgtaaccccatctgcggcgtcagctatgccctgacagtgtggcgattcttccgcgatcgaacagaagaagaagaaatctcactaattcacttttttggagaggagtacctggagtataagaagagggtgcccacgggcctgcctttcataaagggggtcaaggtggacctgtgacgggcagtggccccggtgaccttggggcctccgaccctgtgcagcctgggacaaaactgtttccggttggccgctgccacatggattttcttaatcgttttatgtcattagtcactcttctggaatgtcactcaagaccaagcggtcagaaggcctgaggacccaaggccccactggagcagtctgtccttatgccgaatcaaggcggaacatgggtgaaagacgagtaaggggcaaatcacagcaatattccacagcgccctccagagttacctggggaggaccgaggccacacgccactgcccccgaggccagagtgtaagtaaaggataaccaggactcgctgggagagatggactctgtcctcagcaacactccacagcagaaaggggtagcaggtaccccttcttatcagcggtaaaaatgcatttacaacctttcatttaaccgaaaaacacagaccgctttaacctctttatttctgtcccccactgcatgaacatctatacaattttaaaaatacttcctcataggatgctttggcccttcatctatttaatcatagctacatacctattttttataagtagcagtacacattcaaaggggtattcctagctcaatgcttggtgttctagttcaacttttatcctgcagcaagtaagcctagataactctacacgatttggctgagtggctttgtgtgaccgtggccccaggccaaggggatcatggccctggctggctttcccgggggtctcagctcctgttgtcagtgataggcggctcaaaggagcatcagtttcttttgatccaagaagtgcttactgaatgcctgccctgtgcgtggccttaaacattgagaagtgctgctctccgtttatttgggatttgattctcattttaccatagcttatattctcaatttcaatgccagtctcagaactcttgttttctgtgttctgttctcaaaattacattgtccctcatgtcatttcaaactgttttccaaagggatttgagcatatacaactacaaatccaagcagattgactctcaaaaataatcttaaatactgcaaatagtcccaactaagattcagtcagtatgtttgttttgcaagtttgggagagtaagttggctttgagtcacacatcgaagctttaagaggtgagacgctggcttcattctggactagacaggaacttggcctcagcgtgagatcctgccatgcagtgttgcggtggcactgaagaagtgtgaatgtgaaggcggcgtcggcgcggggccagagcaccactctgctgccccaccacgcggcctgtgaggagccactaaacctttccgtgcctagacctccccatctgtggaatggggtcaataccacctacctcacaggggtgttgtgaggactgagaagaacaatgtcaaatgtttttaatactcagatgtgggagcgacatcaatgaaatctgtactgtatgaaagctacacaaaaatgggcagacatttggttaattgtgccagatacctaaaatgtatgttcagaaaagcattttatcaactcagaaatatgacttatttctagatttcatggcttaatgaattttttcattgttatatataccaaagaggcttacgggttcattgattggtttgaaaaccagacagacggccgggcgcggtggctcacgcctgtaatcccagcaatttgggaggccaaggcgggtggatcatgaggtcaggcgttcgagaccagcctggccaacatgataaaaccccgtctctactaaaaatacaaaaaaatagctgggcgtgctggcgggtgcctgtaatcccagctactcaggaggctgagacaggagaatcctttgaacccnggaggcggaggttgcagtgagttgagatcgggcctttgcacttcagtctgggcaacagggcgagactccatctcaaaaaacaacaacaacaacaaaaaaaaccggacaggatttggtaagtgattgacttctttttagttccatgatcttgagattatttttagctttataaatttagcagtggcagggcccgtggagaatcaggttaatgaggtaaaggctttctgggtatttgctgccaaggccacatcaccaattttctcgatttaaaaaactgtcaagagatttatttttccattgcaggttttaaagtggagattctgaagtggaaaataggtactgtcagaacaaagctacctggaaacagcatagagtgaagcctttcgtgagggcttgcaggccgctgctgagtggcagtttacagaagaggtcgcggggtgagcctcttagcaggacagaaaacaaggcagcagcgcacctgccaccccttcacgagctgctccttgagcctaaaaagtaggctttattcatcccttctgttcatttaccaacctgggggattgatacgaccggggaaaatgttcctaaaccaggaagctgcgttagccgatcaggctttgtaagatctcgccaacagctagctgcttaggagtacccccacgatacgcacagcacaccactgtcccttcactgcactttcttcctgccttaggtagttgggcttgcccaccctagtttgcttttgtagtggtttggcaaggttagaaggcctcggcctctctgtcatgctgggaagtgcctactctctgggccactgctgcagaggccgtggcacttgtcatgggtttggaagacccagccatctgcagcagaggcagcctatcccattgcaaggagaggaactgaacggagtaattattctactcttctttttacataaatgtttatttaaatattctaaattggattttctttcacagatactgattattctttccagttcttaaataaaactgcacttgatttcactcaa

SEQ ID NO: 320843 - DNA, 4764 bp, Homo sapiens
  misc_feature (2799)..(2799): n is a, c, g, or t
  misc_feature (4031)..(4031): n is a, c, g, or t
  misc_feature (4052)..(4052): n is a, c, g, or t
  misc_feature (4068)..(4068): n is a, c, g, or t
gcagccggcgcgtttctccgggctacagccggcgccgccgcccgctagtccgccgcccggcgccatggcgggctgcgcggcgcgggctccgccgggctctgaggcgcgtctcagcctcgccaccttcctgctgggcgcctcggtgctcgcgctgccgctgctcacgcgcgccggcctgcagggccgcaccgggctggcgctctacgtggccgggctcaacgcgctgctgctgctgctctatcggccgcctcgctaccagatagccatccgagcttgtttcctggggtttgtgttcggctgcggcacgctgctaagttttagccagtcttcttggagtcactttggctggtacatgtgctccctgtcattgttccactattctgaatacttggtgacagcagtcaataatcccaaaagtctgtccttggattcctttctcctgaatcacagcctggagtatacagtagctgctctttcttcttggttagagttcacacttgaaaatatcttttggccagaactgaagcagattacctggctcagtgtcacagggctgctgatggtggtcttcggagaatgtctgaggaaggcggccatgtttacagctggctccaatttcaaccacgtggtacagaatgaaaaatcagatacacatactctggtgaccagtggagtgtacgcttggtttcggcatccttcttacgtcgggtggttttactggagtattggaactcaggtgatgctgtgtaaccccatctgcggcgtcagctatgccctgacagtgtggcgattcttccgcgatcgaacagaagaagaagaaatctcactaattcacttttttggagaggagtacctggagtataagaagagggtgcccacgggcctgcctttcataaagggggtcaaggtggacctgtgacgggcagtggccccggtgaccttggggcctccgaccctgtgcagcctgggacaaaactgtttccggttggccgctgccacatggattttcttaatcgttttatgtcattagtcactcttctggaatgtcactcaagaccaagcggtcagaaggcctgaggacccaaggccccactggagcagtctgtccttatgccgaatcaaggcggaacatgggtgaaagacgagtaaggggcaaatcacagcaatattccacagcgccctccagagttacctggggaggaccgaggccacacgccactgcccccgaggccagagtgtaagtaaaggataaccaggactcgctgggagagatggactctgtcctcagcaacactccacagcagaaaggggtagcaggtaccccttcttatcagcggtaaaaatgcatttacaacctttcatttaaccgaaaaacacagaccgctttaacctctttatttctgtcccccactgcatgaacatctatacaattttaaaaatacttcctcataggatgctttggcccttcatctatttaatcatagctacatacctattttttataagtagcagtacacattcaaaggggtattcctagctcaatgcttggtgttctagttcaacttttatcctgcagcaagtaagcctagataactctacacgatttggctgagtggctttgtgtgaccgtggccccaggccaaggggatcatggccctggctggctttcccgggggtctcagctcctgttgtcagtgataggcggctcaaaggagcatcagtttcttttgatccaagaagtgcttactgaatgcctgccctgtgcgtggccttaaacattgagaagtgctgctctccgtttatttgggatttgattctcattttaccatagcttatattctcaatttcaatgccagtctcagaactcttgttttctgtgttctgttctcaaaattacattgtccctcatgtcatttcaaactgttttccaaagggatttgagcatatacaactacaaatccaagcagattgactctcaaaaataatcttaaatactgcaaatagtcccaactaagattcagtcagtatgtttgttttgcaagtttgggagagtaagttggctttgagtcacacatcgaagctttaagaggtgagacgctggcttcattctggactagacaggaacttggcctcagcgtgagatcctgccatgcagtgttgcggtggcactgaagaagtgtgaatgtgaaggcggcgtcggcgcggggccagagcaccactctgctgccccaccacgcggcctgtgaggagccactaaacctttccgtgcctagacctccccatctgtggaatggggtcaataccacctacctcacaggggtgttgtgaggactgagaagaacaatgtcaaatgtttttaatactcagatgtgggagcgacatcaatgaaatctgtactgtatgaaagctacacaaaaatgggcagacatttggttaattgtgccagatacctaaaatgtatgttcagaaaagcattttatcaactcagaaatatgacttatttctagatttcatggcttaatgaattttttcattgttatatataccaaagaggcttacgggttcattgattggtttgaaaaccagacagacggccgggcgcggtggctcacgcctgtaatcccagcaatttgggaggccaaggcgggtggatcatgaggtcaggcgttcgagaccagcctggccaacatgataaaaccccgtctctactaaaaatacaaaaaaatagctgggcgtgctggcgggtgcctgtaatcccagctactcaggaggctgagacaggagaatcctttgaacccnggaggcggaggttgcagtgagttgagatcgggcctttgcacttcagtctgggcaacagggcgagactccatctcaaaaaacaacaacaacaacaaaaaaaaccggacggacttgcccatcggccctcacgacacgcgtgcagtgggactctagccaaggcggtggccgagccatcattacaatttttctggagtaaatgatccacggtgggacatcaactggcacttactctgtttaggaacttgagttgaatcatttctaaacttgtcctttagaccacgcctagggcagcaaattccacttcctagaactgcaaaccgggagaggatgtagttagattctggcatcctgccccggctctttgagggaaaagttctttcccctgctctaagtagggcgggcccagcctccattcccattgggagccatgaagttgtcttgttgataggtctagggcagctgttggcagctgctggccttgtggatggtaagctgactgtgttggcatttaatgccatcctccatctgccagaggcccaggaagcccaccttcacaccaggcccaccagctggaaggagcccaggaggcaggtcttagggtttcatggtgaaatgctgtctgacaccagggaaaaattcccaccctgtttataatcccagagcagaagtcagcaattacttagggataaaagatgaactccattttttttattttcttaagacagtcttgctctgtggcccaggctggaggctggagtgcagtggcaccatttcggctcaccgcaacctctgcctcccgggttcaagcgattctcctgcctcagcctcctgagtagctgggattacaggcttgggccaccatgcccagctaatttttttgtatttttagtagagacggggtttcaccatgatggccaggctggtctcgaactcctgacctcaagtgatccacgcgcctcggcctcccaaagtgctgggattgcaggcgtgagccaccacgcccagccaagatgaactccttaaggacaggatttggtaagtgattgacttctttttagttccatgatcttgagattatttttagctttataaatttagcagtggcagccggaaatcagtatgagtaagcgttctggattgtgcaggcaatacattttcgttagaaatgtggagttatttttccattgcacggttttacaacggattggggaacggaaatatctgtcgtacanggcctggctgtgaaaatgaanaatatgcgtatcctgntgcagtagacaatagactacctggaaacagcatagagtgaagcctttcgtgagggcttgcaggccgctgctgagtggcagtttacagaagaggtcgcggggtgagcctcttagcaggacagaaaacaaggcagcagcgcacctgccaccccttcacgagctgctccttgagcctaaaaagtaggctttattcatcccttctgttcatttaccaacctgggggattgatacgaccggggaaaatgttcctaaaccaggaagctgcgttagccgatcaggctttgtaagatctcgccaacagctagctgcttaggagtacccccacgatacgcacagcacaccactgtcccttcactgcactttcttcctgccttaggtagttgggcttgcccaccctagtttgcttttgtagtggtttggcaaggttagaaggcctcggcctctctgtcatgctgggaagtgcctactctctgggccactgctgcagaggccgtggcacttgtcatgggtttggaagacccagccatctgcagcagaggcagcctatcccattgcaaggagaggaactgaacggagtaattattctactcttctttttacataaatgtttatttaaatattctaaattggattttctttcacagatactgattattctttccagttcttaaataaaactgcacttgatttcactcaa

SEQ ID NO: 320844 - DNA, 4407 bp, Homo sapiens
  misc_feature (2454)..(2454): n is a, c, g, or t
cttaggggaatgtgttttcttatgaaattttaatgtgatgacaaatgctgattgcccagcagcacattttctgtttctgtcttcgggaaaataggttaattttaagcagtgcgaaggggagctcaggccagtgttttcactccccgtgtgtcgttgatgtctctctcccacagaactgaagcagattacctggctcagtgtcacagggctgctgatggtggtcttcggagaatgtctgaggaaggcggccatgtttacagctggctccaatttcaaccacgtggtacagaatgaaaaatcagatacacatactctggtgaccagtggagtgtacgcttggtttcggcatccttcttacgtcgggtggttttactggagtattggaactcaggtgatgctgtgtaaccccatctgcggcgtcagctatgccctgacagtgtggcgattcttccgcgatcgaacagaagaagaagaaatctcactaattcacttttttggagaggagtacctggagtataagaagagggtgcccacgggcctgcctttcataaagggggtcaaggtggacctgtgacgggcagtggccccggtgaccttggggcctccgaccctgtgcagcctgggacaaaactgtttccggttggccgctgccacatggattttcttaatcgttttatgtcattagtcactcttctggaatgtcactcaagaccaagcggtcagaaggcctgaggacccaaggccccactggagcagtctgtccttatgccgaatcaaggcggaacatgggtgaaagacgagtaaggggcaaatcacagcaatattccacagcgccctccagagttacctggggaggaccgaggccacacgccactgcccccgaggccagagtgtaagtaaaggataaccaggactcgctgggagagatggactctgtcctcagcaacactccacagcagaaaggggtagcaggtaccccttcttatcagcggtaaaaatgcatttacaacctttcatttaaccgaaaaacacagaccgctttaacctctttatttctgtcccccactgcatgaacatctatacaattttaaaaatacttcctcataggatgctttggcccttcatctatttaatcatagctacatacctattttttataagtagcagtacacattcaaaggggtattcctagctcaatgcttggtgttctagttcaacttttatcctgcagcaagtaagcctagataactctacacgatttggctgagtggctttgtgtgaccgtggccccaggccaaggggatcatggccctggctggctttcccgggggtctcagctcctgttgtcagtgataggcggctcaaaggagcatcagtttcttttgatccaagaagtgcttactgaatgcctgccctgtgcgtggccttaaacattgagaagtgctgctctccgtttatttgggatttgattctcattttaccatagcttatattctcaatttcaatgccagtctcagaactcttgttttctgtgttctgttctcaaaattacattgtccctcatgtcatttcaaactgttttccaaagggatttgagcatatacaactacaaatccaagcagattgactctcaaaaataatcttaaatactgcaaatagtcccaactaagattcagtcagtatgtttgttttgcaagtttgggagagtaagttggctttgagtcacacatcgaagctttaagaggtgagacgctggcttcattctggactagacaggaacttggcctcagcgtgagatcctgccatgcagtgttgcggtggcactgaagaagtgtgaatgtgaaggcggcgtcggcgcggggccagagcaccactctgctgccccaccacgcggcctgtgaggagccactaaacctttccgtgcctagacctccccatctgtggaatggggtcaataccacctacctcacaggggtgttgtgaggactgagaagaacaatgtcaaatgtttttaatactcagatgtgggagcgacatcaatgaaatctgtactgtatgaaagctacacaaaaatgggcagacatttggttaattgtgccagatacctaaaatgtatgttcagaaaagcattttatcaactcagaaatatgacttatttctagatttcatggcttaatgaattttttcattgttatatataccaaagaggcttacgggttcattgattggtttgaaaaccagacagacggccgggcgcggtggctcacgcctgtaatcccagcaatttgggaggccaaggcgggtggatcatgaggtcaggcgttcgagaccagcctggccaacatgataaaaccccgtctctactaaaaatacaaaaaaatagctgggcgtgctggcgggtgcctgtaatcccagctactcaggaggctgagacaggagaatcctttgaacccnggaggcggaggttgcagtgagttgagatcgggcctttgcacttcagtctgggcaacagggcgagactccatctcaaaaaacaacaacaacaacaaaaaaaaccggacggacttgcccatcggccctcacgacacgcgtgcagtgggactctagccaaggcggtggccgagccatcattacaatttttctggagtaaatgatccacggtgggacatcaactggcacttactctgtttaggaacttgagttgaatcatttctaaacttgtcctttagaccacgcctagggcagcaaattccacttcctagaactgcaaaccgggagaggatgtagttagattctggcatcctgccccggctctttgagggaaaagttctttcccctgctctaagtagggcgggcccagcctccattcccattgggagccatgaagttgtcttgttgataggtctagggcagctgttggcagctgctggccttgtggatggtaagctgactgtgttggcatttaatgccatcctccatctgccagaggcccaggaagcccaccttcacaccaggcccaccagctggaaggagcccaggaggcaggtcttagggtttcatggtgaaatgctgtctgacaccagggaaaaattcccaccctgtttataatcccagagcagaagtcagcaattacttagggataaaagatgaactccattttttttattttcttaagacagtcttgctctgtggcccaggctggaggctggagtgcagtggcaccatttcggctcaccgcaacctctgcctcccgggttcaagcgattctcctgcctcagcctcctgagtagctgggattacaggcttgggccaccatgcccagctaatttttttgtatttttagtagagacggggtttcaccatgatggccaggctggtctcgaactcctgacctcaagtgatccacgcgcctcggcctcccaaagtgctgggattgcaggcgtgagccaccacgcccagccaagatgaactccttaaggacaggatttggtaagtgattgacttctttttagttccatgatcttgagattatttttagctttataaatttagcagtggcagggcccgtggagaatcaggttaatgaggtaaaggctttctgggtatttgctgccaaggccacatcaccaattttctcgatttaaaaaactgtcaagagatttatttttccattgcaggttttaaagtggagattctgaagtggaaaataggtactgtcagaacaaagctacctggaaacagcatagagtgaagcctttcgtgagggcttgcaggccgctgctgagtggcagtttacagaagaggtcgcggggtgagcctcttagcaggacagaaaacaaggcagcagcgcacctgccaccccttcacgagctgctccttgagcctaaaaagtaggctttattcatcccttctgttcatttaccaacctgggggattgatacgaccggggaaaatgttcctaaaccaggaagctgcgttagccgatcaggctttgtaagatctcgccaacagctagctgcttaggagtacccccacgatacgcacagcacaccactgtcccttcactgcactttcttcctgccttaggtagttgggcttgcccaccctagtttgcttttgtagtggtttggcaaggttagaaggcctcggcctctctgtcatgctgggaagtgcctactctctgggccactgctgcagaggccgtggcacttgtcatgggtttggaagacccagccatctgcagcagaggcagcctatcccattgcaaggagaggaactgaacggagtaattattctactcttctttttacataaatgtttatttaaatattctaaattggattttctttcacagatactgattattctttccagttcttaaataaaactgcacttgatttcactcaa

SEQ ID NO: 320845 - DNA, 5075 bp, Homo sapiens
  misc_feature (2799)..(2799): n is a, c, g, or t
gcagccggcgcgtttctccgggctacagccggcgccgccgcccgctagtccgccgcccggcgccatggcgggctgcgcggcgcgggctccgccgggctctgaggcgcgtctcagcctcgccaccttcctgctgggcgcctcggtgctcgcgctgccgctgctcacgcgcgccggcctgcagggccgcaccgggctggcgctctacgtggccgggctcaacgcgctgctgctgctgctctatcggccgcctcgctaccagatagccatccgagcttgtttcctggggtttgtgttcggctgcggcacgctgctaagttttagccagtcttcttggagtcactttggctggtacatgtgctccctgtcattgttccactattctgaatacttggtgacagcagtcaataatcccaaaagtctgtccttggattcctttctcctgaatcacagcctggagtatacagtagctgctctttcttcttggttagagttcacacttgaaaatatcttttggccagaactgaagcagattacctggctcagtgtcacagggctgctgatggtggtcttcggagaatgtctgaggaaggcggccatgtttacagctggctccaatttcaaccacgtggtacagaatgaaaaatcagatacacatactctggtgaccagtggagtgtacgcttggtttcggcatccttcttacgtcgggtggttttactggagtattggaactcaggtgatgctgtgtaaccccatctgcggcgtcagctatgccctgacagtgtggcgattcttccgcgatcgaacagaagaagaagaaatctcactaattcacttttttggagaggagtacctggagtataagaagagggtgcccacgggcctgcctttcataaagggggtcaaggtggacctgtgacgggcagtggccccggtgaccttggggcctccgaccctgtgcagcctgggacaaaactgtttccggttggccgctgccacatggattttcttaatcgttttatgtcattagtcactcttctggaatgtcactcaagaccaagcggtcagaaggcctgaggacccaaggccccactggagcagtctgtccttatgccgaatcaaggcggaacatgggtgaaagacgagtaaggggcaaatcacagcaatattccacagcgccctccagagttacctggggaggaccgaggccacacgccactgcccccgaggccagagtgtaagtaaaggataaccaggactcgctgggagagatggactctgtcctcagcaacactccacagcagaaaggggtagcaggtaccccttcttatcagcggtaaaaatgcatttacaacctttcatttaaccgaaaaacacagaccgctttaacctctttatttctgtcccccactgcatgaacatctatacaattttaaaaatacttcctcataggatgctttggcccttcatctatttaatcatagctacatacctattttttataagtagcagtacacattcaaaggggtattcctagctcaatgcttggtgttctagttcaacttttatcctgcagcaagtaagcctagataactctacacgatttggctgagtggctttgtgtgaccgtggccccaggccaaggggatcatggccctggctggctttcccgggggtctcagctcctgttgtcagtgataggcggctcaaaggagcatcagtttcttttgatccaagaagtgcttactgaatgcctgccctgtgcgtggccttaaacattgagaagtgctgctctccgtttatttgggatttgattctcattttaccatagcttatattctcaatttcaatgccagtctcagaactcttgttttctgtgttctgttctcaaaattacattgtccctcatgtcatttcaaactgttttccaaagggatttgagcatatacaactacaaatccaagcagattgactctcaaaaataatcttaaatactgcaaatagtcccaactaagattcagtcagtatgtttgttttgcaagtttgggagagtaagttggctttgagtcacacatcgaagctttaagaggtgagacgctggcttcattctggactagacaggaacttggcctcagcgtgagatcctgccatgcagtgttgcggtggcactgaagaagtgtgaatgtgaaggcggcgtcggcgcggggccagagcaccactctgctgccccaccacgcggcctgtgaggagccactaaacctttccgtgcctagacctccccatctgtggaatggggtcaataccacctacctcacaggggtgttgtgaggactgagaagaacaatgtcaaatgtttttaatactcagatgtgggagcgacatcaatgaaatctgtactgtatgaaagctacacaaaaatgggcagacatttggttaattgtgccagatacctaaaatgtatgttcagaaaagcattttatcaactcagaaatatgacttatttctagatttcatggcttaatgaattttttcattgttatatataccaaagaggcttacgggttcattgattggtttgaaaaccagacagacggccgggcgcggtggctcacgcctgtaatcccagcaatttgggaggccaaggcgggtggatcatgaggtcaggcgttcgagaccagcctggccaacatgataaaaccccgtctctactaaaaatacaaaaaaatagctgggcgtgctggcgggtgcctgtaatcccagctactcaggaggctgagacaggagaatcctttgaacccnggaggcggaggttgcagtgagttgagatcgggcctttgcacttcagtctgggcaacagggcgagactccatctcaaaaaacaacaacaacaacaaaaaaaaccggacggacttgcccatcggccctcacgacacgcgtgcagtgggactctagccaaggcggtggccgagccatcattacaatttttctggagtaaatgatccacggtgggacatcaactggcacttactctgtttaggaacttgagttgaatcatttctaaacttgtcctttagaccacgcctagggcagcaaattccacttcctagaactgcaaaccgggagaggatgtagttagattctggcatcctgccccggctctttgagggaaaagttctttcccctgctctaagtagggcgggcccagcctccattcccattgggagccatgaagttgtcttgttgataggtctagggcagctgttggcagctgctggccttgtggatggtaagctgactgtgttggcatttaatgccatcctccatctgccagaggcccaggaagcccaccttcacaccaggcccaccagctggaaggagcccaggaggcaggtcttagggtttcatggtgaaatgctgtctgacaccagggaaaaattcccaccctgtttataatcccagagcagaagtcagcaattacttagggataaaagatgaactccattttttttattttcttaagacagtcttgctctgtggcccaggctggaggctggagtgcagtggcaccatttcggctcaccgcaacctctgcctcccgggttcaagcgattctcctgcctcagcctcctgagtagctgggattacaggcttgggccaccatgcccagctaatttttttgtatttttagtagagacggggtttcaccatgatggccaggctggtctcgaactcctgacctcaagtgatccacgcgcctcggcctcccaaagtgctgggattgcaggcgtgagccaccacgcccagccaagatgaactccttaaggacaggatttggtaagtgattgacttctttttagttccatgatcttgagattatttttagctttataaatttagcagtggcagggcccgtggagaatcaggttaatgaggtaaaggctttctgggtatttgctgccaaggccacatcaccaattttctcgatttaaaaaactgtcaagagatttatttttccattgcaggttttaaagtggagattctgaagtggaaaataggtactgtcagaacaaagctacctggaaacagcatagagtgaagcctttcgtgagggcttgcaggccgctgctgagtggcagtttacagaagaggtcgcggggtgagcctcttagcaggacagaaaacaaggcagcagcgcacctgccaccccttcacgagctgctccttgagcctaaaaagtaggctttattcatcccttctgttcatttaccaacctgggggattgatacgaccggggaaaatgttcctaaaccaggaagctgcgttagccgatcaggctttgtaagatctcgccaacagctagctgcttaggagtacccccacgatacgcacagcacaccactgtcccttcactgcactttcttcctgccttaggtagttgggcttgcccaccctagtttgcttttgtagtggtttggcaaggttagaaggcctcggcctctctgtcatgctgggaagtgcctactctctgggccactgctgcagaggccgtggcacttgtcatgggtttggaagacccagccatctgcagcagaggcagcctatcccattgcaaggagaggaactgaacggagtaattattctactcttctttttacataaatgtttatttaaatattctaaattggattttctttcacagatactgattattctttccagttcttaaataaaactgcacttgatttcactcaaaaaaaaataatcgtccgctcaacgccgacaccagaccgaccaccaccgaccaccacaacacgtacatagcgtccacaacgacgcccgaacagagagagtcgaatgaaccctagagccgccttcgaccgaccatgaggcgagacatatcgccgtgccgccagctcccgcatcgtatgtcgactgggtggacccagcgccgactccgccaaccgcggccgacggacagcctaggcgggggcgagcccgcacaatccccccaccgggactcgggacaggatccgtccgggcggcgggggaatgcgagcctggccgtacggacgccg

SEQ ID NO: 320846 - DNA, 5940 bp, Homo sapiens
  misc_feature (2799)..(2799): n is a, c, g, or t
gcagccggcgcgtttctccgggctacagccggcgccgccgcccgctagtccgccgcccggcgccatggcgggctgcgcggcgcgggctccgccgggctctgaggcgcgtctcagcctcgccaccttcctgctgggcgcctcggtgctcgcgctgccgctgctcacgcgcgccggcctgcagggccgcaccgggctggcgctctacgtggccgggctcaacgcgctgctgctgctgctctatcggccgcctcgctaccagatagccatccgagcttgtttcctggggtttgtgttcggctgcggcacgctgctaagttttagccagtcttcttggagtcactttggctggtacatgtgctccctgtcattgttccactattctgaatacttggtgacagcagtcaataatcccaaaagtctgtccttggattcctttctcctgaatcacagcctggagtatacagtagctgctctttcttcttggttagagttcacacttgaaaatatcttttggccagaactgaagcagattacctggctcagtgtcacagggctgctgatggtggtcttcggagaatgtctgaggaaggcggccatgtttacagctggctccaatttcaaccacgtggtacagaatgaaaaatcagatacacatactctggtgaccagtggagtgtacgcttggtttcggcatccttcttacgtcgggtggttttactggagtattggaactcaggtgatgctgtgtaaccccatctgcggcgtcagctatgccctgacagtgtggcgattcttccgcgatcgaacagaagaagaagaaatctcactaattcacttttttggagaggagtacctggagtataagaagagggtgcccacgggcctgcctttcataaagggggtcaaggtggacctgtgacgggcagtggccccggtgaccttggggcctccgaccctgtgcagcctgggacaaaactgtttccggttggccgctgccacatggattttcttaatcgttttatgtcattagtcactcttctggaatgtcactcaagaccaagcggtcagaaggcctgaggacccaaggccccactggagcagtctgtccttatgccgaatcaaggcggaacatgggtgaaagacgagtaaggggcaaatcacagcaatattccacagcgccctccagagttacctggggaggaccgaggccacacgccactgcccccgaggccagagtgtaagtaaaggataaccaggactcgctgggagagatggactctgtcctcagcaacactccacagcagaaaggggtagcaggtaccccttcttatcagcggtaaaaatgcatttacaacctttcatttaaccgaaaaacacagaccgctttaacctctttatttctgtcccccactgcatgaacatctatacaattttaaaaatacttcctcataggatgctttggcccttcatctatttaatcatagctacatacctattttttataagtagcagtacacattcaaaggggtattcctagctcaatgcttggtgttctagttcaacttttatcctgcagcaagtaagcctagataactctacacgatttggctgagtggctttgtgtgaccgtggccccaggccaaggggatcatggccctggctggctttcccgggggtctcagctcctgttgtcagtgataggcggctcaaaggagcatcagtttcttttgatccaagaagtgcttactgaatgcctgccctgtgcgtggccttaaacattgagaagtgctgctctccgtttatttgggatttgattctcattttaccatagcttatattctcaatttcaatgccagtctcagaactcttgttttctgtgttctgttctcaaaattacattgtccctcatgtcatttcaaactgttttccaaagggatttgagcatatacaactacaaatccaagcagattgactctcaaaaataatcttaaatactgcaaatagtcccaactaagattcagtcagtatgtttgttttgcaagtttgggagagtaagttggctttgagtcacacatcgaagctttaagaggtgagacgctggcttcattctggactagacaggaacttggcctcagcgtgagatcctgccatgcagtgttgcggtggcactgaagaagtgtgaatgtgaaggcggcgtcggcgcggggccagagcaccactctgctgccccaccacgcggcctgtgaggagccactaaacctttccgtgcctagacctccccatctgtggaatggggtcaataccacctacctcacaggggtgttgtgaggactgagaagaacaatgtcaaatgtttttaatactcagatgtgggagcgacatcaatgaaatctgtactgtatgaaagctacacaaaaatgggcagacatttggttaattgtgccagatacctaaaatgtatgttcagaaaagcattttatcaactcagaaatatgacttatttctagatttcatggcttaatgaattttttcattgttatatataccaaagaggcttacgggttcattgattggtttgaaaaccagacagacggccgggcgcggtggctcacgcctgtaatcccagcaatttgggaggccaaggcgggtggatcatgaggtcaggcgttcgagaccagcctggccaacatgataaaaccccgtctctactaaaaatacaaaaaaatagctgggcgtgctggcgggtgcctgtaatcccagctactcaggaggctgagacaggagaatcctttgaacccnggaggcggaggttgcagtgagttgagatcgggcctttgcacttcagtctgggcaacagggcgagactccatctcaaaaaacaacaacaacaacaaaaaaaaccggacggacttgcccatcggccctcacgacacgcgtgcagtgggactctagccaaggcggtggccgagccatcattacaatttttctggagtaaatgatccacggtgggacatcaactggcacttactctgtttaggaacttgagttgaatcatttctaaacttgtcctttagaccacgcctagggcagcaaattccacttcctagaactgcaaaccgggagaggatgtagttagattctggcatcctgccccggctctttgagggaaaagttctttcccctgctctaagtagggcgggcccagcctccattcccattgggagccatgaagttgtcttgttgataggtctagggcagctgttggcagctgctggccttgtggatggtaagctgactgtgttggcatttaatgccatcctccatctgccagaggcccaggaagcccaccttcacaccaggcccaccagctggaaggagcccaggaggcaggtcttagggtttcatggtgaaatgctgtctgacaccagggaaaaattcccaccctgtttataatcccagagcagaagtcagcaattacttagggataaaagatgaactccattttttttattttcttaagacagtcttgctctgtggcccaggctggaggctggagtgcagtggcaccatttcggctcaccgcaacctctgcctcccgggttcaagcgattctcctgcctcagcctcctgagtagctgggattacaggcttgggccaccatgcccagctaatttttttgtatttttagtagagacggggtttcaccatgatggccaggctggtctcgaactcctgacctcaagtgatccacgcgcctcggcctcccaaagtgctgggattgcaggcgtgagccaccacgcccagccaagatgaactccttaaggacaggatttggtaagtgattgacttctttttagttccatgatcttgagattatttttagctttataaatttagcagtggcagggcccgtggagaatcaggttaatgaggtaaaggctttctgggtatttgctgccaaggccacatcaccaattttctcgatttaaaaaactgtcaagagatttatttttccattgcaggttttaaagtggagattctgaagtggaaaataggtactgtcagaacaaagctacctggaaacagcatagagtgaagcctttcgtgagggcttgcaggccgctgctgagtggcagtttacagaagaggtcgcggggtgagcctcttagcaggacagaaaacaaggcagcagcgcacctgccaccccttcacgagctgctccttgagcctaaaaagtaggctttattcatcccttctgttcatttaccaacctgggggattgatacgaccggggaaaatgttcctaaaccaggaagctgcgttagccgatcaggctttgtaagatctcgccaacagctagctgcttaggagtacccccacgatacgcacagcacaccactgtcccttcactgcactttcttcctgccttaggtagttgggcttgcccaccctagtttgcttttgtagtggtttggcaaggttagaaggcctcggcctctctgtcatgctgggaagtgcctactctctgggccactgctgcagaggccgtggcacttgtcatgggtttggaagacccagccatctgcagcagaggcagcctatcccattgcaaggagaggaactgaacggagtaattattctactcttctttttacataaatgtttatttaaatattctaaattggattttctttcacagatactgattattctttccagttcttaaataaaactgcacttgatttcactcaaccacagtgtgattgtctgggatgtgaaactctgaggtcactcttgggtaagaagcgtcttaagcctttagcctcaaacgacgtgtgtttggcctcctcaatttctttctgaattcctacctctaaccagttgtaatgataattccttttgccctgcaggccaccacataggtttgtaaggccttggaacaggagcctcagtgcccctgaagtagcaggtgcagggacagtggacgtcaatgtgagtgatgtgttatgtgttgaatgtgctgccatgttagcacgtagacccatttgctgttaatcactgaatcaagctgaatatttgcttaaatgtgactatctgggcatcattttgccacaaaaacttgtaaaattttacgtcacgtgggttactttttaaaaagcatttattaagctcctctaaatgaaaaggatactgtggagaaatggaaaactgctgggaaaaaactactagaaaaaaggttgctgccacccagtgccttgctatcaacggaagtcggactcaggagggctgcaggagtttgggaaagcagcgaagttgtaactgagaccatctgccacataagctggccaggtgctaacccctggctttaggagctctgcccttgctggaaagggagagaagctggagcaaacgttcctcatccttccatgagtcactgctcagattactgtgtggaacttcccagtagcaccaggttaacagtgggactgttattccggaggaactggattcctttgcaatagggcaggtgccactcagtggtggagtcttgttacctaaaaccggcacaccctgacataccacactctgcccagcacagggcctggcacaccgacgctcggtgcgtaggtgtggaactagcgagggatttcttgctggattgtcactccctgatgttttccatgtggactgggagtcatcccaagctactgtgacaaggacgaagacttcatgccatgcaaacacggggaaaatcaaaactgcccaagccaaaggatctgaaattatggcctgtcagagcttctgggttttactcttgacaaatgattaccttttaaagaaataaccggccgggcacagtggcttacccctgtaatcccagcattttatgagccggcccccgacggctcatccgctgcctgagccccagcgaaggaaggc

SEQ ID NO: 320847 - DNA, 3559 bp, Homo sapiens
  misc_feature (1606)..(1606): n is a, c, g, or t
gcagctgccagaacatctcaccaatttcaaatctggtaagtggcctcttatttactctcttctccagcttccctcactatccctcaacctctttctcctttcaatcttggcgccacacttcaatctctcccttcttatcagcggtaaaaatgcatttacaacctttcatttaaccgaaaaacacagaccgctttaacctctttatttctgtcccccactgcatgaacatctatacaattttaaaaatacttcctcataggatgctttggcccttcatctatttaatcatagctacatacctattttttataagtagcagtacacattcaaaggggtattcctagctcaatgcttggtgttctagttcaacttttatcctgcagcaagtaagcctagataactctacacgatttggctgagtggctttgtgtgaccgtggccccaggccaaggggatcatggccctggctggctttcccgggggtctcagctcctgttgtcagtgataggcggctcaaaggagcatcagtttcttttgatccaagaagtgcttactgaatgcctgccctgtgcgtggccttaaacattgagaagtgctgctctccgtttatttgggatttgattctcattttaccatagcttatattctcaatttcaatgccagtctcagaactcttgttttctgtgttctgttctcaaaattacattgtccctcatgtcatttcaaactgttttccaaagggatttgagcatatacaactacaaatccaagcagattgactctcaaaaataatcttaaatactgcaaatagtcccaactaagattcagtcagtatgtttgttttgcaagtttgggagagtaagttggctttgagtcacacatcgaagctttaagaggtgagacgctggcttcattctggactagacaggaacttggcctcagcgtgagatcctgccatgcagtgttgcggtggcactgaagaagtgtgaatgtgaaggcggcgtcggcgcggggccagagcaccactctgctgccccaccacgcggcctgtgaggagccactaaacctttccgtgcctagacctccccatctgtggaatggggtcaataccacctacctcacaggggtgttgtgaggactgagaagaacaatgtcaaatgtttttaatactcagatgtgggagcgacatcaatgaaatctgtactgtatgaaagctacacaaaaatgggcagacatttggttaattgtgccagatacctaaaatgtatgttcagaaaagcattttatcaactcagaaatatgacttatttctagatttcatggcttaatgaattttttcattgttatatataccaaagaggcttacgggttcattgattggtttgaaaaccagacagacggccgggcgcggtggctcacgcctgtaatcccagcaatttgggaggccaaggcgggtggatcatgaggtcaggcgttcgagaccagcctggccaacatgataaaaccccgtctctactaaaaatacaaaaaaatagctgggcgtgctggcgggtgcctgtaatcccagctactcaggaggctgagacaggagaatcctttgaacccnggaggcggaggttgcagtgagttgagatcgggcctttgcacttcagtctgggcaacagggcgagactccatctcaaaaaacaacaacaacaacaaaaaaaaccggacggacttgcccatcggccctcacgacacgcgtgcagtgggactctagccaaggcggtggccgagccatcattacaatttttctggagtaaatgatccacggtgggacatcaactggcacttactctgtttaggaacttgagttgaatcatttctaaacttgtcctttagaccacgcctagggcagcaaattccacttcctagaactgcaaaccgggagaggatgtagttagattctggcatcctgccccggctctttgagggaaaagttctttcccctgctctaagtagggcgggcccagcctccattcccattgggagccatgaagttgtcttgttgataggtctagggcagctgttggcagctgctggccttgtggatggtaagctgactgtgttggcatttaatgccatcctccatctgccagaggcccaggaagcccaccttcacaccaggcccaccagctggaaggagcccaggaggcaggtcttagggtttcatggtgaaatgctgtctgacaccagggaaaaattcccaccctgtttataatcccagagcagaagtcagcaattacttagggataaaagatgaactccattttttttattttcttaagacagtcttgctctgtggcccaggctggaggctggagtgcagtggcaccatttcggctcaccgcaacctctgcctcccgggttcaagcgattctcctgcctcagcctcctgagtagctgggattacaggcttgggccaccatgcccagctaatttttttgtatttttagtagagacggggtttcaccatgatggccaggctggtctcgaactcctgacctcaagtgatccacgcgcctcggcctcccaaagtgctgggattgcaggcgtgagccaccacgcccagccaagatgaactccttaaggacaggatttggtaagtgattgacttctttttagttccatgatcttgagattatttttagctttataaatttagcagtggcagggcccgtggagaatcaggttaatgaggtaaaggctttctgggtatttgctgccaaggccacatcaccaattttctcgatttaaaaaactgtcaagagatttatttttccattgcaggttttaaagtggagattctgaagtggaaaataggtactgtcagaacaaagctacctggaaacagcatagagtgaagcctttcgtgagggcttgcaggccgctgctgagtggcagtttacagaagaggtcgcggggtgagcctcttagcaggacagaaaacaaggcagcagcgcacctgccaccccttcacgagctgctccttgagcctaaaaagtaggctttattcatcccttctgttcatttaccaacctgggggattgatacgaccggggaaaatgttcctaaaccaggaagctgcgttagccgatcaggctttgtaagatctcgccaacagctagctgcttaggagtacccccacgatacgcacagcacaccactgtcccttcactgcactttcttcctgccttaggtagttgggcttgcccaccctagtttgcttttgtagtggtttggcaaggttagaaggcctcggcctctctgtcatgctgggaagtgcctactctctgggccactgctgcagaggccgtggcacttgtcatgggtttggaagacccagccatctgcagcagaggcagcctatcccattgcaaggagaggaactgaacggagtaattattctactcttctttttacataaatgtttatttaaatattctaaattggattttctttcacagatactgattattctttccagttcttaaataaaactgcacttgatttcactcaa

SEQ ID NO: 320848 - DNA, 5788 bp, Homo sapiens
  misc_feature (2799)..(2799): n is a, c, g, or t
gcagccggcgcgtttctccgggctacagccggcgccgccgcccgctagtccgccgcccggcgccatggcgggctgcgcggcgcgggctccgccgggctctgaggcgcgtctcagcctcgccaccttcctgctgggcgcctcggtgctcgcgctgccgctgctcacgcgcgccggcctgcagggccgcaccgggctggcgctctacgtggccgggctcaacgcgctgctgctgctgctctatcggccgcctcgctaccagatagccatccgagcttgtttcctggggtttgtgttcggctgcggcacgctgctaagttttagccagtcttcttggagtcactttggctggtacatgtgctccctgtcattgttccactattctgaatacttggtgacagcagtcaataatcccaaaagtctgtccttggattcctttctcctgaatcacagcctggagtatacagtagctgctctttcttcttggttagagttcacacttgaaaatatcttttggccagaactgaagcagattacctggctcagtgtcacagggctgctgatggtggtcttcggagaatgtctgaggaaggcggccatgtttacagctggctccaatttcaaccacgtggtacagaatgaaaaatcagatacacatactctggtgaccagtggagtgtacgcttggtttcggcatccttcttacgtcgggtggttttactggagtattggaactcaggtgatgctgtgtaaccccatctgcggcgtcagctatgccctgacagtgtggcgattcttccgcgatcgaacagaagaagaagaaatctcactaattcacttttttggagaggagtacctggagtataagaagagggtgcccacgggcctgcctttcataaagggggtcaaggtggacctgtgacgggcagtggccccggtgaccttggggcctccgaccctgtgcagcctgggacaaaactgtttccggttggccgctgccacatggattttcttaatcgttttatgtcattagtcactcttctggaatgtcactcaagaccaagcggtcagaaggcctgaggacccaaggccccactggagcagtctgtccttatgccgaatcaaggcggaacatgggtgaaagacgagtaaggggcaaatcacagcaatattccacagcgccctccagagttacctggggaggaccgaggccacacgccactgcccccgaggccagagtgtaagtaaaggataaccaggactcgctgggagagatggactctgtcctcagcaacactccacagcagaaaggggtagcaggtaccccttcttatcagcggtaaaaatgcatttacaacctttcatttaaccgaaaaacacagaccgctttaacctctttatttctgtcccccactgcatgaacatctatacaattttaaaaatacttcctcataggatgctttggcccttcatctatttaatcatagctacatacctattttttataagtagcagtacacattcaaaggggtattcctagctcaatgcttggtgttctagttcaacttttatcctgcagcaagtaagcctagataactctacacgatttggctgagtggctttgtgtgaccgtggccccaggccaaggggatcatggccctggctggctttcccgggggtctcagctcctgttgtcagtgataggcggctcaaaggagcatcagtttcttttgatccaagaagtgcttactgaatgcctgccctgtgcgtggccttaaacattgagaagtgctgctctccgtttatttgggatttgattctcattttaccatagcttatattctcaatttcaatgccagtctcagaactcttgttttctgtgttctgttctcaaaattacattgtccctcatgtcatttcaaactgttttccaaagggatttgagcatatacaactacaaatccaagcagattgactctcaaaaataatcttaaatactgcaaatagtcccaactaagattcagtcagtatgtttgttttgcaagtttgggagagtaagttggctttgagtcacacatcgaagctttaagaggtgagacgctggcttcattctggactagacaggaacttggcctcagcgtgagatcctgccatgcagtgttgcggtggcactgaagaagtgtgaatgtgaaggcggcgtcggcgcggggccagagcaccactctgctgccccaccacgcggcctgtgaggagccactaaacctttccgtgcctagacctccccatctgtggaatggggtcaataccacctacctcacaggggtgttgtgaggactgagaagaacaatgtcaaatgtttttaatactcagatgtgggagcgacatcaatgaaatctgtactgtatgaaagctacacaaaaatgggcagacatttggttaattgtgccagatacctaaaatgtatgttcagaaaagcattttatcaactcagaaatatgacttatttctagatttcatggcttaatgaattttttcattgttatatataccaaagaggcttacgggttcattgattggtttgaaaaccagacagacggccgggcgcggtggctcacgcctgtaatcccagcaatttgggaggccaaggcgggtggatcatgaggtcaggcgttcgagaccagcctggccaacatgataaaaccccgtctctactaaaaatacaaaaaaatagctgggcgtgctggcgggtgcctgtaatcccagctactcaggaggctgagacaggagaatcctttgaacccnggaggcggaggttgcagtgagttgagatcgggcctttgcacttcagtctgggcaacagggcgagactccatctcaaaaaacaacaacaacaacaaaaaaaaccggacggacttgcccatcggccctcacgacacgcgtgcagtgggactctagccaaggcggtggccgagccatcattacaatttttctggagtaaatgatccacggtgggacatcaactggcacttactctgtttaggaacttgagttgaatcatttctaaacttgtcctttagaccacgcctagggcagcaaattccacttcctagaactgcaaaccgggagaggatgtagttagattctggcatcctgccccggctctttgagggaaaagttctttcccctgctctaagtagggcgggcccagcctccattcccattgggagccatgaagttgtcttgttgataggtctagggcagctgttggcagctgctggccttgtggatggtaagctgactgtgttggcatttaatgccatcctccatctgccagaggcccaggaagcccaccttcacaccaggcccaccagctggaaggagcccaggaggcaggtcttagggtttcatggtgaaatgctgtctgacaccagggaaaaattcccaccctgtttataatcccagagcagaagtcagcaattacttagggataaaagatgaactccattttttttattttcttaagacagtcttgctctgtggcccaggctggaggctggagtgcagtggcaccatttcggctcaccgcaacctctgcctcccgggttcaagcgattctcctgcctcagcctcctgagtagctgggattacaggcttgggccaccatgcccagctaatttttttgtatttttagtagagacggggtttcaccatgatggccaggctggtctcgaactcctgacctcaagtgatccacgcgcctcggcctcccaaagtgctgggattgcaggcgtgagccaccacgcccagccaagatgaactccttaaggacaggatttggtaagtgattgacttctttttagttccatgatcttgagattatttttagctttataaatttagcagtggcagggcccgtggagaatcaggttaatgaggtaaaggctttctgggtatttgctgccaaggccacatcaccaattttctcgatttaaaaaactgtcaagagatttatttttccattgcaggttttaaagtggagattctgaagtggaaaataggtactgtcagaacaaagctacctggaaacagcatagagtgaagcctttcgtgagggcttgcaggccgctgctgagtggcagtttacagaagaggtcgcggggtgagcctcttagcaggacagaaaacaaggcagcagcgcacctgccaccccttcacgagctgctccttgagcctaaaaagtaggctttattcatcccttctgttcatttaccaacctgggggattgatacgaccggggaaaatgttcctaaaccaggaagctgcgttagccgatcaggctttgtaagatctcgccaacagctagctgcttaggagtacccccacgatacgcacagcacaccactgtcccttcactgcactttcttcctgccttaggtagttgggcttgcccaccctagtttgcttttgtagtggtttggcaaggttagaaggcctcggcctctctgtcatgctgggaagtgcctactctctgggccactgctgcagaggccgtggcacttgtcatgggtttggaagacccagccatctgcagcagaggcagcctatcccattgcaaggagaggaactgaacggagtaattattctactcttctttttacataaatgtttatttaaatattctaaattggattttctttcacagatactgattattctttccagttcttaaataaaactgcacttgatttcactcaaccacagtgtgattgtctgggatgtgaaactctgaggtcactcttgggtaagaagcgtcttaagcctttagcctcaaacgacgtgtgtttggcctcctcaatttctttctgaattcctacctctaaccagttgtaatgataattccttttgccctgcaggccaccacataggtttgtaaggccttggaacaggagcctcagtgcccctgaagtagcaggtgcagggacagtggacgtcaatgtgagtgatgtgttatgtgttgaatgtgctgccatgttagcacgtagacccatttgctgttaatcactgaatcaagctgaatatttgcttaaatgtgactatctgggcatcattttgccacaaaaacttgtaaaattttacgtcacgtgggttactttttaaaaagcatttattaagctcctctaaatgaaaaggatactgtggagaaatggaaaactgctgggaaaaaactactagaaaaaaggttgctgccacccagtgccttgctatcaacggaagtcggactcaggagggctgcaggagtttgggaaagcagcgaagttgtaactgagaccatctgccacataagctggccaggtgctaacccctggctttaggagctctgcccttgctggaaagggagagaagctggagcaaacgttcctcatccttccatgagtcactgctcagattactgtgtggaacttcccagtagcaccaggttaacagtgggactgttattccggaggaatggattgtcactccctgatgttttccatgtggactgggagtcatcccaagctactgtgacaaggacgaagacttcatgccatgcaaacacggggaaaatcaaaactgcccaagccaaaggatctgaaattatggcctgtcagagcttctgggttttactcttgacaaatgattaccttttaaagaaataaccggccgggcacagtggcttacccctgtaatcccagcattttatgagccggcccccgacggctcatccgctgcctgagccccagcgaaggaaggc

SEQ ID NO: 320849 - DNA, 3214 bp, Homo sapiens
gcagccggcgcgtttctccgggctacagccggcgccgccgcccgctagtccgccgcccggcgccatggcgggctgcgcggcgcgggctccgccgggctctgaggcgcgtctcagcctcgccaccttcctgctgggcgcctcggtgctcgcgctgccgctgctcacgcgcgccggcctgcagggccgcaccgggctggcgctctacgtggccgggctcaacgcgctgctgctgctgctctatcggccgcctcgctaccagatagccatccgagcttgtttcctggggtttgtgttcggctgcggcacgctgctaagttttagccagtcttcttggagtcactttggctggtacatgtgctccctgtcattgttccactattctgaatacttggtgacagcagtcaataatcccaaaagtctgtccttggattcctttctcctgaatcacagcctggagtatacagtagctgctctttcttcttggttagagttcacacttgaaaatatcttttggccagaactgaagcagattacctggctcagtgtcacagggctgctgatggtggtcttcggagaatgtctgaggaaggcggccatgtttacagctggctccaatttcaaccacgtggtacagaatgaaaaatcagatacacatactctggtgaccagtggagtgtacgcttggtttcggcatccttcttacgtcgggtggttttactggagtattggaactcaggtgatgctgtgtaaccccatctgcggcgtcagctatgccctgacagtgtggcgattcttccgcgatcgaacagaagaagaagaaatctcactaattcacttttttggagaggagtacctggagtataagaagagggtgcccacgggcctgcctttcataaagggggtcaaggtggacctgtgacgggcagtggccccggtgaccttggggcctccgaccctgtgcagcctgggacaaaactgtttccggttggccgctgccacatggattttcttaatcgttttatgtcattagtcactcttctggaatgtcactcaagaccaagcggtcagaaggcctgaggacccaaggccccactggagcagtctgtccttatgccgaatcaaggcggaacatgggtgaaagacgagtaaggggcaaatcacagcaatattccacagcgccctccagagttacctggggaggaccgaggccacacgccactgcccccgaggccagagtgtaagtaaaggataaccaggactcgctgggagagatggactctgtcctcagcaacactccacagcagaaaggggtagcaggtaccccttcttatcagcggtaaaaatgcatttacaacctttcatttaaccgaaaaacacagaccgctttaacctctttatttctgtcccccactgcatgaacatctatacaattttaaaaatacttcctcataggatgctttggcccttcatctatttaatcatagctacatacctattttttataagtagcagtacacattcaaaggggtattcctagctcaatgcttggtgttctagttcaacttttatcctgcagcaagtaagcctagataactctacacgatttggctgagtggctttgtgtgaccgtggccccaggccaaggggatcatggccctggctggctttcccgggggtctcagctcctgttgtcagtgataggcggctcaaaggagcatcagtttcttttgatccaagaagtgcttactgaatgcctgccctgtgcgtggccttaaacattgagaagtgctgctctccgtttatttgggatttgattctcattttaccatagcttatattctcaatttcaatgccagtctcagaactcttgttttctgtgttctgttctcaaaattacattgtccctcatgtcatttcaaactgttttccaaagggatttgagcatatacaactacaaatccaagcagattgactctcaaaaataatcttaaatactgcaaatagtcccaactaagattcagtcagtatgtttgttttgcaagtttgggagagtaagttggctttgagtcacacatcgaagctttaagaggtgagacgctggcttcattctggactagacaggaacttggcctcagcgtgagatcctgccatgcagtgttgcggtggcactgaagaagtgtgaatgtgaaggcggcgtcggcgcggggccagagcaccactctgctgccccaccacgcggcctgtgaggaggagccaccacgcccagccaagatgaactccttaaggacaggatttggtaagtgattgacttctttttagttccatgatcttgagattatttttagctttataaatttagcagtggcagggcccgtggagaatcaggttaatgaggtaaaggctttctgggtatttgctgccaaggccacatcaccaattttctcgatttaaaaaactgtcaagagatttatttttccattgcaggttttaaagtggagattctgaagtggaaaataggtactgtcagaacaaagctacctggaaacagcatagagtgaagcctttcgtgagggcttgcaggccgctgctgagtggcagtttacagaagaggtcgcggggtgagcctcttagcaggacagaaaacaaggcagcagcgcacctgccaccccttcacgagctgctccttgagcctaaaaagtaggctttattcatcccttctgttcatttaccaacctgggggattgatacgaccggggaaaatgttcctaaaccaggaagctgcgttagccgatcaggctttgtaagatctcgccaacagctagctgcttaggagtacccccacgatacgcacagcacaccactgtcccttcactgcactttcttcctgccttaggtagttgggcttgcccaccctagtttgcttttgtagtggtttggcaaggttagaaggcctcggcctctctgtcatgctgggaagtgcctactctctgggccactgctgcagaggccgtggcacttgtcatgggtttggaagacccagccatctgcagcagaggcagcctatcccattgcaaggagaggaactgaacggagtaattattctactcttctttttacataaatgtttatttaaatattctaaattggattttctttcacagatactgattattctttccagttcttaaataaaactgcacttgatttcactcaa

SEQ ID NO: 320850 - DNA, 3394 bp, Homo sapiens
  misc_feature (2799)..(2799): n is a, c, g, or t
gcagccggcgcgtttctccgggctacagccggcgccgccgcccgctagtccgccgcccggcgccatggcgggctgcgcggcgcgggctccgccgggctctgaggcgcgtctcagcctcgccaccttcctgctgggcgcctcggtgctcgcgctgccgctgctcacgcgcgccggcctgcagggccgcaccgggctggcgctctacgtggccgggctcaacgcgctgctgctgctgctctatcggccgcctcgctaccagatagccatccgagcttgtttcctggggtttgtgttcggctgcggcacgctgctaagttttagccagtcttcttggagtcactttggctggtacatgtgctccctgtcattgttccactattctgaatacttggtgacagcagtcaataatcccaaaagtctgtccttggattcctttctcctgaatcacagcctggagtatacagtagctgctctttcttcttggttagagttcacacttgaaaatatcttttggccagaactgaagcagattacctggctcagtgtcacagggctgctgatggtggtcttcggagaatgtctgaggaaggcggccatgtttacagctggctccaatttcaaccacgtggtacagaatgaaaaatcagatacacatactctggtgaccagtggagtgtacgcttggtttcggcatccttcttacgtcgggtggttttactggagtattggaactcaggtgatgctgtgtaaccccatctgcggcgtcagctatgccctgacagtgtggcgattcttccgcgatcgaacagaagaagaagaaatctcactaattcacttttttggagaggagtacctggagtataagaagagggtgcccacgggcctgcctttcataaagggggtcaaggtggacctgtgacgggcagtggccccggtgaccttggggcctccgaccctgtgcagcctgggacaaaactgtttccggttggccgctgccacatggattttcttaatcgttttatgtcattagtcactcttctggaatgtcactcaagaccaagcggtcagaaggcctgaggacccaaggccccactggagcagtctgtccttatgccgaatcaaggcggaacatgggtgaaagacgagtaaggggcaaatcacagcaatattccacagcgccctccagagttacctggggaggaccgaggccacacgccactgcccccgaggccagagtgtaagtaaaggataaccaggactcgctgggagagatggactctgtcctcagcaacactccacagcagaaaggggtagcaggtaccccttcttatcagcggtaaaaatgcatttacaacctttcatttaaccgaaaaacacagaccgctttaacctctttatttctgtcccccactgcatgaacatctatacaattttaaaaatacttcctcataggatgctttggcccttcatctatttaatcatagctacatacctattttttataagtagcagtacacattcaaaggggtattcctagctcaatgcttggtgttctagttcaacttttatcctgcagcaagtaagcctagataactctacacgatttggctgagtggctttgtgtgaccgtggccccaggccaaggggatcatggccctggctggctttcccgggggtctcagctcctgttgtcagtgataggcggctcaaaggagcatcagtttcttttgatccaagaagtgcttactgaatgcctgccctgtgcgtggccttaaacattgagaagtgctgctctccgtttatttgggatttgattctcattttaccatagcttatattctcaatttcaatgccagtctcagaactcttgttttctgtgttctgttctcaaaattacattgtccctcatgtcatttcaaactgttttccaaagggatttgagcatatacaactacaaatccaagcagattgactctcaaaaataatcttaaatactgcaaatagtcccaactaagattcagtcagtatgtttgttttgcaagtttgggagagtaagttggctttgagtcacacatcgaagctttaagaggtgagacgctggcttcattctggactagacaggaacttggcctcagcgtgagatcctgccatgcagtgttgcggtggcactgaagaagtgtgaatgtgaaggcggcgtcggcgcggggccagagcaccactctgctgccccaccacgcggcctgtgaggagccactaaacctttccgtgcctagacctccccatctgtggaatggggtcaataccacctacctcacaggggtgttgtgaggactgagaagaacaatgtcaaatgtttttaatactcagatgtgggagcgacatcaatgaaatctgtactgtatgaaagctacacaaaaatgggcagacatttggttaattgtgccagatacctaaaatgtatgttcagaaaagcattttatcaactcagaaatatgacttatttctagatttcatggcttaatgaattttttcattgttatatataccaaagaggcttacgggttcattgattggtttgaaaaccagacagacggccgggcgcggtggctcacgcctgtaatcccagcaatttgggaggccaaggcgggtggatcatgaggtcaggcgttcgagaccagcctggccaacatgataaaaccccgtctctactaaaaatacaaaaaaatagctgggcgtgctggcgggtgcctgtaatcccagctactcaggaggctgagacaggagaatcctttgaacccnggaggcggaggttgcagtgagttgagatcgggcctttgcacttcagtctgggcaacagggcgagactccatctcaaaaaacaacaacaacaacaaaaaaaaccggacggacttgcccatcggccctcacgacacgcgtgcagtgggactctagccaaggcggtggccgagccatcattacaatttttctggagtaaatgatccacggtgggacatcaactggcacttactctgtttaggaacttgagttgaatcatttctaaacttgtccttaggtagttgggcttgcccaccctagtttgcttttgtagtggtttggcaaggttagaaggcctcggcctctctgtcatgctgggaagtgcctactctctgggccactgctgcagaggccgtggcacttgtcatgggtttggaagacccagccatctgcagcagaggcagcctatcccattgcaaggagaggaactgaacggagtaattattctactcttctttttacataaatgtttatttaaatattctaaattggattttctttcacagatactgattattctttccagttcttaaataaaactgcacttgatttcactcaa

SEQ ID NO: 320851 - DNA, 1437 bp, Homo sapiens
gcagccggcgcgtttctccgggctacagccggcgccgccgcccgctagtccgccgcccggcgccatggcgggctgcgcggcgcgggctccgccgggctctgaggcgcgtctcagcctcgccaccttcctgctgggcgcctcggtgctcgcgctgccgctgctcacgcgcgccggcctgcagggccgcaccgggctggcgctctacgtggccgggctcaacgcgctgctgctgctgctctatcggccgcctcgctaccagatagccatccgagcttgtttcctggggtttgtgttcggctgcggcacgctgctaagttttagccagtcttcttggagtcactttggctggtacatgtgctccctgtcattgttccactattctgaatacttggtgacagcagtcaataatcccaaaagtctgtccttggattcctttctcctgaatcacagcctggagtatacagtagctgctctttcttcttggttagagttcacacttgaaaatatcttttggccagaactgaagcagattacctggctcagtgtcacagggctgctgatggtggtcttcggagaatgtctgaggaaggcggccatgtttacagctggctccaatttcaaccacgtggtacagaatgaaaaatcagatacacatactctggtgaccagtggagtgtacgcttggtttcggcatccttcttacgtcgggtggttttactggagtattggaactcaggtgatgctgtgtaaccccatctgcggcgtcagctatgccctgacagtgtggcgattcttccgcgatcgaacagaagaagaagaaatctcactaattcacttttttggagaggagtacctggagtataagaagagggtgcccacgggcctgcctttcataaagggggtcaaggtggacctgtgacgggcagtggccccggtgaccttggggcctccgaccctgtgcagcctgggacaaaactgtttccggttggccgctgccacatggattttcttaatcgttttatgtcattagtcactcttctggaatgtcactcaagaccaagcggtcagaaggcctgaggacccaaggccccactggagcagtctgtccttatgccgaatcaaggcggaacatgggtgaaagacgagtaaggggcaaatcacagcaatattccacagcgccctctctgtcatgctgggaagtgcctactctctgggccactgctgcagaggccgtggcacttgtcatgggtttggaagacccagccatctgcagcagaggcagcctatcccattgcaaggagaggaactgaacggagtaattattctactcttctttttacataaatgtttatttaaatattctaaattggattttctttcacagatactgattattctttccagttcttaaataaaactgcacttgatttcactcaa

SEQ ID NO: 320852 - DNA, 742 bp, Homo sapiens
ctggagcaaacgttcctcatccttccatgagtcactgctcagattactgtgtggaacttcccagtagcaccaggttaacagtgggactgttattccggaggaactggattcctttgcaatagggcaggtgccactcagtggtggagtcttgttacctaaaaccggcacaccctgacataccacactctgcccagcacagggcctggcacaccgacgctcggtgcgtaggtgtggaactagcgagggatttcttgctggattgtcactccctgatgttttccatgtggactgggagtcatcccaagctactgtgacaaggacgaagacttcatgccatgcaaacacggggaaaatcaaaactgcccaagccaaaggatctgaaattatggcctgtcagagcttctgggttttactcttgacaaatgattaccttttaaagaaataaccggccgggcacagtggcttacccctgtaatcccagcattttgggaggccgaggtgggcggatcacctgaggttgggagttcgaggccagcctgaccaacatggagaaaccccctctctacttaaaatacaaaaaattagccgggtgtgatggtacatgcctgtaatcccagctactctgggggctgaggtaggagaatcgcttgaacctgggaggcggaggttgcggtgagccagagattgcgccattgcactccagcctgggcaacaaagagtgaaattctgtcttaaaaacaac

SEQ ID NO: 320853 - DNA, 699 bp, Homo sapiens
tctggagtaaatgatccacggtgggacatcaactggcacttactctgtttaggaacttgagttgaatcatttctaaacttgtcctttagaccacgcctagggcagcaaattccacttcctagaactgcaaaccgggagaggatgtagttagattctggcatcctgccccggctctttgagggaaaagttctttcccctgctctaagtagggcgggcccagcctccattcccattgggagccatgaagttgtcttgttgataggtctagggcagctgttggcagctgctggccttgtggatggtaagctgactgtgttggcatttaatgccatcctccatctgccagaggcccaggaagcccaccttcacaccaggcccaccagctggaaggagcccaggaggcaggtcttagggtttcatggtgaaatgctgtctgacaccagggaaaacttgacgtactctgctttggagaggaattccaggggtagggatggtgggagaacattcccaccctgtttataatcccagagcagaagtcagcaattacttagggataaaagatgaactccattttttttattttcttaagacagtcttgctctgtggcccaggctggaggctggagtgcagtggcaccatttcggctcaccgcaacctctgcctcccgggttcaagcgattctcctgcctcagcctcctg

SEQ ID NO: 320854 - DNA, 3594 bp, Homo sapiens
gcagccggcgcgtttctccgggctacagccggcgccgccgcccgctagtccgccgcccggcgccatggcgggctgcgcggcgcgggctccgccgggctctgaggcgcgtctcagcctcgccaccttcctgctgggcgcctcggtgctcgcgctgccgctgctcacgcgcgccggcctgcagggccgcaccgggctggcgctctacgtggccgggctcaacgcgctgctgctgctgctctatcggccgcctcgctaccagatagccatccgagcttgtttcctggggtttgtgttcggctgcggcacgctgctaagttttagccagtcttcttggagtcactttggctggtacatgtgctccctgtcattgttccactattctgaatacttggtgacagcagtcaataatcccaaaagtctgtccttggattcctttctcctgaatcacagcctggagtatacagtagctgctctttcttcttggttagagttcacacttgaaaatatcttttggccagaactgaagcagattacctggctcagtgtcacagggctgctgatggtggtcttcggagaatgtctgaggaaggcggccatgtttacagctggctccaatttcaaccacgtggtacagaatgaaaaatcagatacacatactctggtgaccagtggagtgtacgcttggtttcggcatccttcttacgtcgggtggttttactggagtattggaactcaggtgatgctgtgtaaccccatctgcggcgtcagctatgccctgacagtgtggcgattcttccgcgatcgaacagaagaagaagaaatctcactaattcacttttttggagaggagtacctggagtataagaagagggtgcccacgggcctgcctttcataaagggggtcaaggtggacctgtgacgggcagtggccccggtgaccttggggcctccgaccctgtgcagcctgggacaaaactgtttccggttggccgctgccacatggattttcttaatcgttttatgtcattagtcactcttctggaatgtcactcaagaccaagcggtcagaaggcctgaggacccaaggccccactggagcagtctgtccttatgccgaatcaaggcggaacatgggtgaaagacgagtaaggggcaaatcacagcaatattccacagcgccctccagagttacctggggaggaccgaggccacacgccactgcccccgaggccagagtgtaagtaaaggataaccaggactcgctgggagagatggactctgtcctcagcaacactccacagcagaaaggggtagcaggtaccccttcttatcagcggtaaaaatgcatttacaacctttcatttaaccgaaaaacacagaccgctttaacctctttatttctgtcccccactgcatgaacatctatacaattttaaaaatacttcctcataggatgctttggcccttcatctatttaatcatagctacatacctattttttataagtagcagtacacattcaaaggggtattcctagctcaatgcttggtgttctagttcaacttttatcctgcagcaagtaagcctagataactctacacgatttggctgagtggctttgtgtgaccgtggccccaggccaaggggatcatggccctggctggctttcccgggggtctcagctcctgttgtcagtgataggcggctcaaaggagcatcagtttcttttgatccaagaagtgcttactgaatgcctgccctgtgcgtggccttaaacattgagaagtgctgctctccgtttatttgggatttgattctcattttaccatagcttatattctcaatttcaatgccagtctcagaactcttgttttctgtgttctgttctcaaaattacattgtccctcatgtcatttcaaactgttttccaaagggatttgagcatatacaactacaaatccaagcagattgactctcaaaaataatcttaaatactgcaaatagtcccaactaagattcagtcagtatgtttgttttgcaagtttgggagagtaagttggctttgagtcacacatcgaagctttaagaggtgagacgctggcttcattctggactagacaggaacttggcctcagcgtgagatcctgccatgcagtgttgcggtggcactgaagaagtgtgaatgtgaaggcggcgtcggcgcggggccagagcaccactctgctgccccaccacgcggcctgtgaggagccactaaacctttccgtgcctagacctccccatctgtggaatggggtcaataccacctacctcacaggggtgttgtgaggactgagaagaacaatgtcaaatgtttttaatactcagatgtgggagcgacatcaatgaaatctgtactgtatgaaagctacacaaaaatgggcagacatttggttaattgtgccagatacctaaaatgtatgttcagaaaagcattttatcaactcagaaatatgacttatttctagatttcatggcttaatgaattttttcattgttatatataccaaagaggcttacgggttcattgattggtttgaaaaccagacagacggcgcctcggcctcccaaagtgctgggattgcaggcgtgagccaccacgcccagccaagatgaactccttaaggacaggatttggtaagtgattgacttctttttagttccatgatcttgagattatttttagctttataaatttagcagtggcagggcccgtggagaatcaggttaatgaggtaaaggctttctgggtatttgctgccaaggccacatcaccaattttctcgatttaaaaaactgtcaagagatttatttttccattgcaggttttaaagtggagattctgaagtggaaaataggtactgtcagaacaaagctacctggaaacagcatagagtgaagcctttcgtgagggcttgcaggccgctgctgagtggcagtttacagaagaggtcgcggggtgagcctcttagcaggacagaaaacaaggcagcagcgcacctgccaccccttcacgagctgctccttgagcctaaaaagtaggctttattcatcccttctgttcatttaccaacctgggggattgatacgaccggggaaaatgttcctaaaccaggaagctgcgttagccgatcaggctttgtaagatctcgccaacagctagctgcttaggagtacccccacgatacgcacagcacaccactgtcccttcactgcactttcttcctgccttaggtagttgggcttgcccaccctagtttgcttttgtagtggtttggcaaggttagaaggcctcggcctctctgtcatgctgggaagtgcctactctctgggccactgctgcagaggccgtggcacttgtcatgggtttggaagacccagccatctgcagcagaggcagcctatcccattgcaaggagaggaactgaacggagtaattattctactcttctttttacataaatgtttatttaaatattctaaattggattttctttcacagatactgattattctttccagttcttaaataaaactgcacttgatttcactcaa

SEQ ID NO: 320855 - DNA, 3557 bp, Homo sapiens
gcagccggcgcgtttctccgggctacagccggcgccgccgcccgctagtccgccgcccggcgccatggcgggctgcgcggcgcgggctccgccgggctctgaggcgcgtctcagcctcgccaccttcctgctgggcgcctcggtgctcgcgctgccgctgctcacgcgcgccggcctgcagggccgcaccgggctggcgctctacgtggccgggctcaacgcgctgctgctgctgctctatcggccgcctcgctaccagatagccatccgagcttgtttcctggggtttgtgttcggctgcggcacgctgctaagttttagccagtcttcttggagtcactttggctggtacatgtgctccctgtcattgttccactattctgaatacttggtgacagcagtcaataatcccaaaagtctgtccttggattcctttctcctgaatcacagcctggagtatacagtagctgctctttcttcttggttagagttcacacttgaaaatatcttttggccagaactgaagcagattacctggctcagtgtcacagggctgctgatggtggtcttcggagaatgtctgaggaaggcggccatgtttacagctggctccaatttcaaccacgtggtacagaatgaaaaatcagatacacatactctggtgaccagtggagtgtacgcttggtttcggcatccttcttacgtcgggtggttttactggagtattggaactcaggtgatgctgtgtaaccccatctgcggcgtcagctatgccctgacagtgtggcgattcttccgcgatcgaacagaagaagaagaaatctcactaattcacttttttggagaggagtacctggagtataagaagagggtgcccacgggcctgcctttcataaagggggtcaaggtggacctgtgacgggcagtggccccggtgaccttggggcctccgaccctgtgcagcctgggacaaaactgtttccggttggccgctgccacatggattttcttaatcgttttatgtcattagtcactcttctggaatgtcactcaagaccaagcggtcagaaggcctgaggacccaaggccccactggagcagtctgtccttatgccgaatcaaggcggaacatgggtgaaagacgagtaaggggcaaatcacagcaatattccacagcgccctccagagttacctggggaggaccgaggccacacgccactgcccccgaggccagagtgtaagtaaaggataaccaggactcgctgggagagatggactctgtcctcagcaacactccacagcagaaaggggtagcaggtaccccttcttatcagcggtaaaaatgcatttacaacctttcatttaaccgaaaaacacagaccgctttaacctctttatttctgtcccccactgcatgaacatctatacaattttaaaaatacttcctcataggatgctttggcccttcatctatttaatcatagctacatacctattttttataagtagcagtacacattcaaaggggtattcctagctcaatgcttggtgttctagttcaacttttatcctgcagcaagtaagcctagataactctacacgatttggctgagtggctttgtgtgaccgtggccccaggccaaggggatcatggccctggctggctttcccgggggtctcagctcctgttgtcagtgataggcggctcaaaggagcatcagtttcttttgatccaagaagtgcttactgaatgcctgccctgtgcgtggccttaaacattgagaagtgctgctctccgtttatttgggatttgattctcattttaccatagcttatattctcaatttcaatgccagtctcagaactcttgttttctgtgttctgttctcaaaattacattgtccctcatgtcatttcaaactgttttccaaagggatttgagcatatacaactacaaatccaagcagattgactctcaaaaataatcttaaatactgcaaatagtcccaactaagattcagtcagtatgtttgttttgcaagtttgggagagtaagttggctttgagtcacacatcgaagctttaagaggtgagacgctggcttcattctggactagacaggaacttggcctcagcgtgagatcctgccatgcagtgttgcggtggcactgaagaagtgtgaatgtgaaggcggcgtcggcgcggggccagagcaccactctgctgccccaccacgcggcctgtgaggagccactaaacctttccgtgcctagacctccccatctgtggaatggggtcaataccacctacctcacaggggtgttgtgaggactgagaagaacaatgtcaaatgtttttaatactcagatgtgggagcgacatcaatgaaatctgtactgtatgaaagctacacaaaaatgggcagacatttggttaattgtgccagatacctaaaatgtatgttcagaaaagcattttatcaactcagaaatatgacttatttctagatttcatggcttaatgaattttttcattgttatatataccaaagaggcttacgggttcattgattggtttgaaaaccagacagacggagccaccacgcccagccaagatgaactccttaaggacaggatttggtaagtgattgacttctttttagttccatgatcttgagattatttttagctttataaatttagcagtggcagggcccgtggagaatcaggttaatgaggtaaaggctttctgggtatttgctgccaaggccacatcaccaattttctcgatttaaaaaactgtcaagagatttatttttccattgcaggttttaaagtggagattctgaagtggaaaataggtactgtcagaacaaagctacctggaaacagcatagagtgaagcctttcgtgagggcttgcaggccgctgctgagtggcagtttacagaagaggtcgcggggtgagcctcttagcaggacagaaaacaaggcagcagcgcacctgccaccccttcacgagctgctccttgagcctaaaaagtaggctttattcatcccttctgttcatttaccaacctgggggattgatacgaccggggaaaatgttcctaaaccaggaagctgcgttagccgatcaggctttgtaagatctcgccaacagctagctgcttaggagtacccccacgatacgcacagcacaccactgtcccttcactgcactttcttcctgccttaggtagttgggcttgcccaccctagtttgcttttgtagtggtttggcaaggttagaaggcctcggcctctctgtcatgctgggaagtgcctactctctgggccactgctgcagaggccgtggcacttgtcatgggtttggaagacccagccatctgcagcagaggcagcctatcccattgcaaggagaggaactgaacggagtaattattctactcttctttttacataaatgtttatttaaatattctaaattggattttctttcacagatactgattattctttccagttcttaaataaaactgcacttgatttcactcaa

SEQ ID NO: 320856 - DNA, 4859 bp, Homo sapiens
  misc_feature (2906)..(2906): n is a, c, g, or t
gcagccggcgcgtttctccgggctacagccggcgccgccgcccgctagtccgccgcccggcgccatggcgggctgcgcggcgcgggctccgccgggctctgaggcgcgtctcagcctcgccaccttcctgctgggcgcctcggtgctcgcgctgccgctgctcacgcgcgccggcctgcagggccgcaccgggctggcgctctacgtggccgggctcaacgcgctgctgctgctgctctatcggccgcctcgctaccagatagccatccgagcttgtttcctggggtttgtgttcggctgcggcacgctgctaagttttagccagtcttcttggagtcactttggctggtcacatctagtgcatccccacagccactgtaggatttttccctacactatgatttcagtcccttgagccttctagtctgacctggatatgaaccagtggcttcaaggtacatgtgctccctgtcattgttccactattctgaatacttggtgacagcagtcaataatcccaaaagtctgtccttggattcctttctcctgaatcacagcctggagtatacagtagctgctctttcttcttggttagagttcacacttgaaaatatcttttggccagaactgaagcagattacctggctcagtgtcacagggctgctgatggtggtcttcggagaatgtctgaggaaggcggccatgtttacagctggctccaatttcaaccacgtggtacagaatgaaaaatcagatacacatactctggtgaccagtggagtgtacgcttggtttcggcatccttcttacgtcgggtggttttactggagtattggaactcaggtgatgctgtgtaaccccatctgcggcgtcagctatgccctgacagtgtggcgattcttccgcgatcgaacagaagaagaagaaatctcactaattcacttttttggagaggagtacctggagtataagaagagggtgcccacgggcctgcctttcataaagggggtcaaggtggacctgtgacgggcagtggccccggtgaccttggggcctccgaccctgtgcagcctgggacaaaactgtttccggttggccgctgccacatggattttcttaatcgttttatgtcattagtcactcttctggaatgtcactcaagaccaagcggtcagaaggcctgaggacccaaggccccactggagcagtctgtccttatgccgaatcaaggcggaacatgggtgaaagacgagtaaggggcaaatcacagcaatattccacagcgccctccagagttacctggggaggaccgaggccacacgccactgcccccgaggccagagtgtaagtaaaggataaccaggactcgctgggagagatggactctgtcctcagcaacactccacagcagaaaggggtagcaggtaccccttcttatcagcggtaaaaatgcatttacaacctttcatttaaccgaaaaacacagaccgctttaacctctttatttctgtcccccactgcatgaacatctatacaattttaaaaatacttcctcataggatgctttggcccttcatctatttaatcatagctacatacctattttttataagtagcagtacacattcaaaggggtattcctagctcaatgcttggtgttctagttcaacttttatcctgcagcaagtaagcctagataactctacacgatttggctgagtggctttgtgtgaccgtggccccaggccaaggggatcatggccctggctggctttcccgggggtctcagctcctgttgtcagtgataggcggctcaaaggagcatcagtttcttttgatccaagaagtgcttactgaatgcctgccctgtgcgtggccttaaacattgagaagtgctgctctccgtttatttgggatttgattctcattttaccatagcttatattctcaatttcaatgccagtctcagaactcttgttttctgtgttctgttctcaaaattacattgtccctcatgtcatttcaaactgttttccaaagggatttgagcatatacaactacaaatccaagcagattgactctcaaaaataatcttaaatactgcaaatagtcccaactaagattcagtcagtatgtttgttttgcaagtttgggagagtaagttggctttgagtcacacatcgaagctttaagaggtgagacgctggcttcattctggactagacaggaacttggcctcagcgtgagatcctgccatgcagtgttgcggtggcactgaagaagtgtgaatgtgaaggcggcgtcggcgcggggccagagcaccactctgctgccccaccacgcggcctgtgaggagccactaaacctttccgtgcctagacctccccatctgtggaatggggtcaataccacctacctcacaggggtgttgtgaggactgagaagaacaatgtcaaatgtttttaatactcagatgtgggagcgacatcaatgaaatctgtactgtatgaaagctacacaaaaatgggcagacatttggttaattgtgccagatacctaaaatgtatgttcagaaaagcattttatcaactcagaaatatgacttatttctagatttcatggcttaatgaattttttcattgttatatataccaaagaggcttacgggttcattgattggtttgaaaaccagacagacggccgggcgcggtggctcacgcctgtaatcccagcaatttgggaggccaaggcgggtggatcatgaggtcaggcgttcgagaccagcctggccaacatgataaaaccccgtctctactaaaaatacaaaaaaatagctgggcgtgctggcgggtgcctgtaatcccagctactcaggaggctgagacaggagaatcctttgaacccnggaggcggaggttgcagtgagttgagatcgggcctttgcacttcagtctgggcaacagggcgagactccatctcaaaaaacaacaacaacaacaaaaaaaaccggacggacttgcccatcggccctcacgacacgcgtgcagtgggactctagccaaggcggtggccgagccatcattacaatttttctggagtaaatgatccacggtgggacatcaactggcacttactctgtttaggaacttgagttgaatcatttctaaacttgtcctttagaccacgcctagggcagcaaattccacttcctagaactgcaaaccgggagaggatgtagttagattctggcatcctgccccggctctttgagggaaaagttctttcccctgctctaagtagggcgggcccagcctccattcccattgggagccatgaagttgtcttgttgataggtctagggcagctgttggcagctgctggccttgtggatggtaagctgactgtgttggcatttaatgccatcctccatctgccagaggcccaggaagcccaccttcacaccaggcccaccagctggaaggagcccaggaggcaggtcttagggtttcatggtgaaatgctgtctgacaccagggaaaaattcccaccctgtttataatcccagagcagaagtcagcaattacttagggataaaagatgaactccattttttttattttcttaagacagtcttgctctgtggcccaggctggaggctggagtgcagtggcaccatttcggctcaccgcaacctctgcctcccgggttcaagcgattctcctgcctcagcctcctgagtagctgggattacaggcttgggccaccatgcccagctaatttttttgtatttttagtagagacggggtttcaccatgatggccaggctggtctcgaactcctgacctcaagtgatccacgcgcctcggcctcccaaagtgctgggattgcaggcgtgagccaccacgcccagccaagatgaactccttaaggacaggatttggtaagtgattgacttctttttagttccatgatcttgagattatttttagctttataaatttagcagtggcagggcccgtggagaatcaggttaatgaggtaaaggctttctgggtatttgctgccaaggccacatcaccaattttctcgatttaaaaaactgtcaagagatttatttttccattgcaggttttaaagtggagattctgaagtggaaaataggtactgtcagaacaaagctacctggaaacagcatagagtgaagcctttcgtgagggcttgcaggccgctgctgagtggcagtttacagaagaggtcgcggggtgagcctcttagcaggacagaaaacaaggcagcagcgcacctgccaccccttcacgagctgctccttgagcctaaaaagtaggctttattcatcccttctgttcatttaccaacctgggggattgatacgaccggggaaaatgttcctaaaccaggaagctgcgttagccgatcaggctttgtaagatctcgccaacagctagctgcttaggagtacccccacgatacgcacagcacaccactgtcccttcactgcactttcttcctgccttaggtagttgggcttgcccaccctagtttgcttttgtagtggtttggcaaggttagaaggcctcggcctctctgtcatgctgggaagtgcctactctctgggccactgctgcagaggccgtggcacttgtcatgggtttggaagacccagccatctgcagcagaggcagcctatcccattgcaaggagaggaactgaacggagtaattattctactcttctttttacataaatgtttatttaaatattctaaattggattttctttcacagatactgattattctttccagttcttaaataaaactgcacttgatttcactcaa

SEQ ID NO: 320857 - DNA, 4582 bp, Homo sapiens
  misc_feature (2629)..(2629): n is a, c, g, or t
gcagccggcgcgtttctccgggctacagccggcgccgccgcccgctagtccgccgcccggcgccatggcgggctgcgcggcgcgggctccgccgggctctgaggcgcgtctcagcctcgccaccttcctgctgggcgcctcggtgctcgcgctgccgctgctcacgcgcgccggcctgcagggccgcaccgggctggcgctctacgtggccgggctcaacgcgctgctgctgctgctctatcggccgcctcgctaccagatagccatccgagcttgtttcctggggtttgtgttcggctgcggcacgctgctaagttttagccagtcttcttggagtcactttggctgaactgaagcagattacctggctcagtgtcacagggctgctgatggtggtcttcggagaatgtctgaggaaggcggccatgtttacagctggctccaatttcaaccacgtggtacagaatgaaaaatcagatacacatactctggtgaccagtggagtgtacgcttggtttcggcatccttcttacgtcgggtggttttactggagtattggaactcaggtgatgctgtgtaaccccatctgcggcgtcagctatgccctgacagtgtggcgattcttccgcgatcgaacagaagaagaagaaatctcactaattcacttttttggagaggagtacctggagtataagaagagggtgcccacgggcctgcctttcataaagggggtcaaggtggacctgtgacgggcagtggccccggtgaccttggggcctccgaccctgtgcagcctgggacaaaactgtttccggttggccgctgccacatggattttcttaatcgttttatgtcattagtcactcttctggaatgtcactcaagaccaagcggtcagaaggcctgaggacccaaggccccactggagcagtctgtccttatgccgaatcaaggcggaacatgggtgaaagacgagtaaggggcaaatcacagcaatattccacagcgccctccagagttacctggggaggaccgaggccacacgccactgcccccgaggccagagtgtaagtaaaggataaccaggactcgctgggagagatggactctgtcctcagcaacactccacagcagaaaggggtagcaggtaccccttcttatcagcggtaaaaatgcatttacaacctttcatttaaccgaaaaacacagaccgctttaacctctttatttctgtcccccactgcatgaacatctatacaattttaaaaatacttcctcataggatgctttggcccttcatctatttaatcatagctacatacctattttttataagtagcagtacacattcaaaggggtattcctagctcaatgcttggtgttctagttcaacttttatcctgcagcaagtaagcctagataactctacacgatttggctgagtggctttgtgtgaccgtggccccaggccaaggggatcatggccctggctggctttcccgggggtctcagctcctgttgtcagtgataggcggctcaaaggagcatcagtttcttttgatccaagaagtgcttactgaatgcctgccctgtgcgtggccttaaacattgagaagtgctgctctccgtttatttgggatttgattctcattttaccatagcttatattctcaatttcaatgccagtctcagaactcttgttttctgtgttctgttctcaaaattacattgtccctcatgtcatttcaaactgttttccaaagggatttgagcatatacaactacaaatccaagcagattgactctcaaaaataatcttaaatactgcaaatagtcccaactaagattcagtcagtatgtttgttttgcaagtttgggagagtaagttggctttgagtcacacatcgaagctttaagaggtgagacgctggcttcattctggactagacaggaacttggcctcagcgtgagatcctgccatgcagtgttgcggtggcactgaagaagtgtgaatgtgaaggcggcgtcggcgcggggccagagcaccactctgctgccccaccacgcggcctgtgaggagccactaaacctttccgtgcctagacctccccatctgtggaatggggtcaataccacctacctcacaggggtgttgtgaggactgagaagaacaatgtcaaatgtttttaatactcagatgtgggagcgacatcaatgaaatctgtactgtatgaaagctacacaaaaatgggcagacatttggttaattgtgccagatacctaaaatgtatgttcagaaaagcattttatcaactcagaaatatgacttatttctagatttcatggcttaatgaattttttcattgttatatataccaaagaggcttacgggttcattgattggtttgaaaaccagacagacggccgggcgcggtggctcacgcctgtaatcccagcaatttgggaggccaaggcgggtggatcatgaggtcaggcgttcgagaccagcctggccaacatgataaaaccccgtctctactaaaaatacaaaaaaatagctgggcgtgctggcgggtgcctgtaatcccagctactcaggaggctgagacaggagaatcctttgaacccnggaggcggaggttgcagtgagttgagatcgggcctttgcacttcagtctgggcaacagggcgagactccatctcaaaaaacaacaacaacaacaaaaaaaaccggacggacttgcccatcggccctcacgacacgcgtgcagtgggactctagccaaggcggtggccgagccatcattacaatttttctggagtaaatgatccacggtgggacatcaactggcacttactctgtttaggaacttgagttgaatcatttctaaacttgtcctttagaccacgcctagggcagcaaattccacttcctagaactgcaaaccgggagaggatgtagttagattctggcatcctgccccggctctttgagggaaaagttctttcccctgctctaagtagggcgggcccagcctccattcccattgggagccatgaagttgtcttgttgataggtctagggcagctgttggcagctgctggccttgtggatggtaagctgactgtgttggcatttaatgccatcctccatctgccagaggcccaggaagcccaccttcacaccaggcccaccagctggaaggagcccaggaggcaggtcttagggtttcatggtgaaatgctgtctgacaccagggaaaaattcccaccctgtttataatcccagagcagaagtcagcaattacttagggataaaagatgaactccattttttttattttcttaagacagtcttgctctgtggcccaggctggaggctggagtgcagtggcaccatttcggctcaccgcaacctctgcctcccgggttcaagcgattctcctgcctcagcctcctgagtagctgggattacaggcttgggccaccatgcccagctaatttttttgtatttttagtagagacggggtttcaccatgatggccaggctggtctcgaactcctgacctcaagtgatccacgcgcctcggcctcccaaagtgctgggattgcaggcgtgagccaccacgcccagccaagatgaactccttaaggacaggatttggtaagtgattgacttctttttagttccatgatcttgagattatttttagctttataaatttagcagtggcagggcccgtggagaatcaggttaatgaggtaaaggctttctgggtatttgctgccaaggccacatcaccaattttctcgatttaaaaaactgtcaagagatttatttttccattgcaggttttaaagtggagattctgaagtggaaaataggtactgtcagaacaaagctacctggaaacagcatagagtgaagcctttcgtgagggcttgcaggccgctgctgagtggcagtttacagaagaggtcgcggggtgagcctcttagcaggacagaaaacaaggcagcagcgcacctgccaccccttcacgagctgctccttgagcctaaaaagtaggctttattcatcccttctgttcatttaccaacctgggggattgatacgaccggggaaaatgttcctaaaccaggaagctgcgttagccgatcaggctttgtaagatctcgccaacagctagctgcttaggagtacccccacgatacgcacagcacaccactgtcccttcactgcactttcttcctgccttaggtagttgggcttgcccaccctagtttgcttttgtagtggtttggcaaggttagaaggcctcggcctctctgtcatgctgggaagtgcctactctctgggccactgctgcagaggccgtggcacttgtcatgggtttggaagacccagccatctgcagcagaggcagcctatcccattgcaaggagaggaactgaacggagtaattattctactcttctttttacataaatgtttatttaaatattctaaattggattttctttcacagatactgattattctttccagttcttaaataaaactgcacttgatttcactcaa

SEQ ID NO: 320858 - DNA, 4698 bp, Homo sapiens
  misc_feature (2745)..(2745): n is a, c, g, or t
gcagccggcgcgtttctccgggctacagccggcgccgccgcccgctagtccgccgcccggcgccatggcgggctgcgcggcgcgggctccgccgggctctgaggcgcgtctcagcctcgccaccttcctgctgggcgcctcggtgctcgcgctgccgctgctcacgcgcgccggcctgcagggccgcaccgggctggcgctctacgtggccgggctcaacgcgctgctgctgctgctctatcggccgcctcgctaccagatagccatccgagcttgtttcctggggtttgtgttcggctgcggcacgctgctaagttttagccagtcttcttggagtcactttggctggtacatgtgctccctgtcattgttccactattctgaatacttggtgacagcagtcaataatcccaaaagtctgtccttggattcctttctcctgaatcacagcctggagtatacagtagctgctctttcttcttggttagagttcacacttgaaaatatcttttggccagaactgaagcagattacctggctcagtgtcacagggctgctgatggtggtcttcggagaatgtctgaggaaggcggccatgtttacagctggctccaatttcaaccacgtggtacagaatgatccttcttacgtcgggtggttttactggagtattggaactcaggtgatgctgtgtaaccccatctgcggcgtcagctatgccctgacagtgtggcgattcttccgcgatcgaacagaagaagaagaaatctcactaattcacttttttggagaggagtacctggagtataagaagagggtgcccacgggcctgcctttcataaagggggtcaaggtggacctgtgacgggcagtggccccggtgaccttggggcctccgaccctgtgcagcctgggacaaaactgtttccggttggccgctgccacatggattttcttaatcgttttatgtcattagtcactcttctggaatgtcactcaagaccaagcggtcagaaggcctgaggacccaaggccccactggagcagtctgtccttatgccgaatcaaggcggaacatgggtgaaagacgagtaaggggcaaatcacagcaatattccacagcgccctccagagttacctggggaggaccgaggccacacgccactgcccccgaggccagagtgtaagtaaaggataaccaggactcgctgggagagatggactctgtcctcagcaacactccacagcagaaaggggtagcaggtaccccttcttatcagcggtaaaaatgcatttacaacctttcatttaaccgaaaaacacagaccgctttaacctctttatttctgtcccccactgcatgaacatctatacaattttaaaaatacttcctcataggatgctttggcccttcatctatttaatcatagctacatacctattttttataagtagcagtacacattcaaaggggtattcctagctcaatgcttggtgttctagttcaacttttatcctgcagcaagtaagcctagataactctacacgatttggctgagtggctttgtgtgaccgtggccccaggccaaggggatcatggccctggctggctttcccgggggtctcagctcctgttgtcagtgataggcggctcaaaggagcatcagtttcttttgatccaagaagtgcttactgaatgcctgccctgtgcgtggccttaaacattgagaagtgctgctctccgtttatttgggatttgattctcattttaccatagcttatattctcaatttcaatgccagtctcagaactcttgttttctgtgttctgttctcaaaattacattgtccctcatgtcatttcaaactgttttccaaagggatttgagcatatacaactacaaatccaagcagattgactctcaaaaataatcttaaatactgcaaatagtcccaactaagattcagtcagtatgtttgttttgcaagtttgggagagtaagttggctttgagtcacacatcgaagctttaagaggtgagacgctggcttcattctggactagacaggaacttggcctcagcgtgagatcctgccatgcagtgttgcggtggcactgaagaagtgtgaatgtgaaggcggcgtcggcgcggggccagagcaccactctgctgccccaccacgcggcctgtgaggagccactaaacctttccgtgcctagacctccccatctgtggaatggggtcaataccacctacctcacaggggtgttgtgaggactgagaagaacaatgtcaaatgtttttaatactcagatgtgggagcgacatcaatgaaatctgtactgtatgaaagctacacaaaaatgggcagacatttggttaattgtgccagatacctaaaatgtatgttcagaaaagcattttatcaactcagaaatatgacttatttctagatttcatggcttaatgaattttttcattgttatatataccaaagaggcttacgggttcattgattggtttgaaaaccagacagacggccgggcgcggtggctcacgcctgtaatcccagcaatttgggaggccaaggcgggtggatcatgaggtcaggcgttcgagaccagcctggccaacatgataaaaccccgtctctactaaaaatacaaaaaaatagctgggcgtgctggcgggtgcctgtaatcccagctactcaggaggctgagacaggagaatcctttgaacccnggaggcggaggttgcagtgagttgagatcgggcctttgcacttcagtctgggcaacagggcgagactccatctcaaaaaacaacaacaacaacaaaaaaaaccggacggacttgcccatcggccctcacgacacgcgtgcagtgggactctagccaaggcggtggccgagccatcattacaatttttctggagtaaatgatccacggtgggacatcaactggcacttactctgtttaggaacttgagttgaatcatttctaaacttgtcctttagaccacgcctagggcagcaaattccacttcctagaactgcaaaccgggagaggatgtagttagattctggcatcctgccccggctctttgagggaaaagttctttcccctgctctaagtagggcgggcccagcctccattcccattgggagccatgaagttgtcttgttgataggtctagggcagctgttggcagctgctggccttgtggatggtaagctgactgtgttggcatttaatgccatcctccatctgccagaggcccaggaagcccaccttcacaccaggcccaccagctggaaggagcccaggaggcaggtcttagggtttcatggtgaaatgctgtctgacaccagggaaaaattcccaccctgtttataatcccagagcagaagtcagcaattacttagggataaaagatgaactccattttttttattttcttaagacagtcttgctctgtggcccaggctggaggctggagtgcagtggcaccatttcggctcaccgcaacctctgcctcccgggttcaagcgattctcctgcctcagcctcctgagtagctgggattacaggcttgggccaccatgcccagctaatttttttgtatttttagtagagacggggtttcaccatgatggccaggctggtctcgaactcctgacctcaagtgatccacgcgcctcggcctcccaaagtgctgggattgcaggcgtgagccaccacgcccagccaagatgaactccttaaggacaggatttggtaagtgattgacttctttttagttccatgatcttgagattatttttagctttataaatttagcagtggcagggcccgtggagaatcaggttaatgaggtaaaggctttctgggtatttgctgccaaggccacatcaccaattttctcgatttaaaaaactgtcaagagatttatttttccattgcaggttttaaagtggagattctgaagtggaaaataggtactgtcagaacaaagctacctggaaacagcatagagtgaagcctttcgtgagggcttgcaggccgctgctgagtggcagtttacagaagaggtcgcggggtgagcctcttagcaggacagaaaacaaggcagcagcgcacctgccaccccttcacgagctgctccttgagcctaaaaagtaggctttattcatcccttctgttcatttaccaacctgggggattgatacgaccggggaaaatgttcctaaaccaggaagctgcgttagccgatcaggctttgtaagatctcgccaacagctagctgcttaggagtacccccacgatacgcacagcacaccactgtcccttcactgcactttcttcctgccttaggtagttgggcttgcccaccctagtttgcttttgtagtggtttggcaaggttagaaggcctcggcctctctgtcatgctgggaagtgcctactctctgggccactgctgcagaggccgtggcacttgtcatgggtttggaagacccagccatctgcagcagaggcagcctatcccattgcaaggagaggaactgaacggagtaattattctactcttctttttacataaatgtttatttaaatattctaaattggattttctttcacagatactgattattctttccagttcttaaataaaactgcacttgatttcactcaa

SEQ ID NO: 320859 - DNA, 4551 bp, Homo sapiens
  misc_feature (2799)..(2799): n is a, c, g, or t
gcagccggcgcgtttctccgggctacagccggcgccgccgcccgctagtccgccgcccggcgccatggcgggctgcgcggcgcgggctccgccgggctctgaggcgcgtctcagcctcgccaccttcctgctgggcgcctcggtgctcgcgctgccgctgctcacgcgcgccggcctgcagggccgcaccgggctggcgctctacgtggccgggctcaacgcgctgctgctgctgctctatcggccgcctcgctaccagatagccatccgagcttgtttcctggggtttgtgttcggctgcggcacgctgctaagttttagccagtcttcttggagtcactttggctggtacatgtgctccctgtcattgttccactattctgaatacttggtgacagcagtcaataatcccaaaagtctgtccttggattcctttctcctgaatcacagcctggagtatacagtagctgctctttcttcttggttagagttcacacttgaaaatatcttttggccagaactgaagcagattacctggctcagtgtcacagggctgctgatggtggtcttcggagaatgtctgaggaaggcggccatgtttacagctggctccaatttcaaccacgtggtacagaatgaaaaatcagatacacatactctggtgaccagtggagtgtacgcttggtttcggcatccttcttacgtcgggtggttttactggagtattggaactcaggtgatgctgtgtaaccccatctgcggcgtcagctatgccctgacagtgtggcgattcttccgcgatcgaacagaagaagaagaaatctcactaattcacttttttggagaggagtacctggagtataagaagagggtgcccacgggcctgcctttcataaagggggtcaaggtggacctgtgacgggcagtggccccggtgaccttggggcctccgaccctgtgcagcctgggacaaaactgtttccggttggccgctgccacatggattttcttaatcgttttatgtcattagtcactcttctggaatgtcactcaagaccaagcggtcagaaggcctgaggacccaaggccccactggagcagtctgtccttatgccgaatcaaggcggaacatgggtgaaagacgagtaaggggcaaatcacagcaatattccacagcgccctccagagttacctggggaggaccgaggccacacgccactgcccccgaggccagagtgtaagtaaaggataaccaggactcgctgggagagatggactctgtcctcagcaacactccacagcagaaaggggtagcaggtaccccttcttatcagcggtaaaaatgcatttacaacctttcatttaaccgaaaaacacagaccgctttaacctctttatttctgtcccccactgcatgaacatctatacaattttaaaaatacttcctcataggatgctttggcccttcatctatttaatcatagctacatacctattttttataagtagcagtacacattcaaaggggtattcctagctcaatgcttggtgttctagttcaacttttatcctgcagcaagtaagcctagataactctacacgatttggctgagtggctttgtgtgaccgtggccccaggccaaggggatcatggccctggctggctttcccgggggtctcagctcctgttgtcagtgataggcggctcaaaggagcatcagtttcttttgatccaagaagtgcttactgaatgcctgccctgtgcgtggccttaaacattgagaagtgctgctctccgtttatttgggatttgattctcattttaccatagcttatattctcaatttcaatgccagtctcagaactcttgttttctgtgttctgttctcaaaattacattgtccctcatgtcatttcaaactgttttccaaagggatttgagcatatacaactacaaatccaagcagattgactctcaaaaataatcttaaatactgcaaatagtcccaactaagattcagtcagtatgtttgttttgcaagtttgggagagtaagttggctttgagtcacacatcgaagctttaagaggtgagacgctggcttcattctggactagacaggaacttggcctcagcgtgagatcctgccatgcagtgttgcggtggcactgaagaagtgtgaatgtgaaggcggcgtcggcgcggggccagagcaccactctgctgccccaccacgcggcctgtgaggagccactaaacctttccgtgcctagacctccccatctgtggaatggggtcaataccacctacctcacaggggtgttgtgaggactgagaagaacaatgtcaaatgtttttaatactcagatgtgggagcgacatcaatgaaatctgtactgtatgaaagctacacaaaaatgggcagacatttggttaattgtgccagatacctaaaatgtatgttcagaaaagcattttatcaactcagaaatatgacttatttctagatttcatggcttaatgaattttttcattgttatatataccaaagaggcttacgggttcattgattggtttgaaaaccagacagacggccgggcgcggtggctcacgcctgtaatcccagcaatttgggaggccaaggcgggtggatcatgaggtcaggcgttcgagaccagcctggccaacatgataaaaccccgtctctactaaaaatacaaaaaaatagctgggcgtgctggcgggtgcctgtaatcccagctactcaggaggctgagacaggagaatcctttgaacccnggaggcggaggttgcagtgagttgagatcgggcctttgcacttcagtctgggcaacagggcgagactccatctcaaaaaacaacaacaacaacaaaaaaaaccggacggacttgcccatcggccctcacgacacgcgtgcagtgggactctagccaaggcggtggccgagccatcattacaatttttctggagtaaatgatccacggtgggacatcaactggcacttactctgtttaggaacttgagttgaatcatttctaaacttgtcctttagaccacgcctagggcagcaaattccacttcctagaactgcaaaccgggagaggatgtagttagattctggcatcctgccccggctctttgagggaaaagttctttcccctgctctaagcttgggccaccatgcccagctaatttttttgtatttttagtagagacggggtttcaccatgatggccaggctggtctcgaactcctgacctcaagtgatccacgcgcctcggcctcccaaagtgctgggattgcaggcgtgagccaccacgcccagccaagatgaactccttaaggacaggatttggtaagtgattgacttctttttagttccatgatcttgagattatttttagctttataaatttagcagtggcagggcccgtggagaatcaggttaatgaggtaaaggctttctgggtatttgctgccaaggccacatcaccaattttctcgatttaaaaaactgtcaagagatttatttttccattgcaggttttaaagtggagattctgaagtggaaaataggtactgtcagaacaaagctacctggaaacagcatagagtgaagcctttcgtgagggcttgcaggccgctgctgagtggcagtttacagaagaggtcgcggggtgagcctcttagcaggacagaaaacaaggcagcagcgcacctgccaccccttcacgagctgctccttgagcctaaaaagtaggctttattcatcccttctgttcatttaccaacctgggggattgatacgaccggggaaaatgttcctaaaccaggaagctgcgttagccgatcaggctttgtaagatctcgccaacagctagctgcttaggagtacccccacgatacgcacagcacaccactgtcccttcactgcactttcttcctgccttaggtagttgggcttgcccaccctagtttgcttttgtagtggtttggcaaggttagaaggcctcggcctctctgtcatgctgggaagtgcctactctctgggccactgctgcagaggccgtggcacttgtcatgggtttggaagacccagccatctgcagcagaggcagcctatcccattgcaaggagaggaactgaacggagtaattattctactcttctttttacataaatgtttatttaaatattctaaattggattttctttcacagatactgattattctttccagttcttaaataaaactgcacttgatttcactcaaaaaaaaaaaacacaacacaaaaaaacccttgtgtggggccggcctgggcccaagaaaaagtcttcaaacaccctctcgtgggggcgcgcgggcccaagaggtaaggacacctggccaaccgcgggcccaaagggaaccgggccggacacgcgctgggtcccaccattaaaaacgggggcgaccccgggcttctggacgaccgaggcgtcggacgcctacggtcccacaggggccacgggcgatatcgcggcagagg

SEQ ID NO: 320860 - DNA, 4669 bp, Homo sapiens
  misc_feature (2799)..(2799): n is a, c, g, or t
gcagccggcgcgtttctccgggctacagccggcgccgccgcccgctagtccgccgcccggcgccatggcgggctgcgcggcgcgggctccgccgggctctgaggcgcgtctcagcctcgccaccttcctgctgggcgcctcggtgctcgcgctgccgctgctcacgcgcgccggcctgcagggccgcaccgggctggcgctctacgtggccgggctcaacgcgctgctgctgctgctctatcggccgcctcgctaccagatagccatccgagcttgtttcctggggtttgtgttcggctgcggcacgctgctaagttttagccagtcttcttggagtcactttggctggtacatgtgctccctgtcattgttccactattctgaatacttggtgacagcagtcaataatcccaaaagtctgtccttggattcctttctcctgaatcacagcctggagtatacagtagctgctctttcttcttggttagagttcacacttgaaaatatcttttggccagaactgaagcagattacctggctcagtgtcacagggctgctgatggtggtcttcggagaatgtctgaggaaggcggccatgtttacagctggctccaatttcaaccacgtggtacagaatgaaaaatcagatacacatactctggtgaccagtggagtgtacgcttggtttcggcatccttcttacgtcgggtggttttactggagtattggaactcaggtgatgctgtgtaaccccatctgcggcgtcagctatgccctgacagtgtggcgattcttccgcgatcgaacagaagaagaagaaatctcactaattcacttttttggagaggagtacctggagtataagaagagggtgcccacgggcctgcctttcataaagggggtcaaggtggacctgtgacgggcagtggccccggtgaccttggggcctccgaccctgtgcagcctgggacaaaactgtttccggttggccgctgccacatggattttcttaatcgttttatgtcattagtcactcttctggaatgtcactcaagaccaagcggtcagaaggcctgaggacccaaggccccactggagcagtctgtccttatgccgaatcaaggcggaacatgggtgaaagacgagtaaggggcaaatcacagcaatattccacagcgccctccagagttacctggggaggaccgaggccacacgccactgcccccgaggccagagtgtaagtaaaggataaccaggactcgctgggagagatggactctgtcctcagcaacactccacagcagaaaggggtagcaggtaccccttcttatcagcggtaaaaatgcatttacaacctttcatttaaccgaaaaacacagaccgctttaacctctttatttctgtcccccactgcatgaacatctatacaattttaaaaatacttcctcataggatgctttggcccttcatctatttaatcatagctacatacctattttttataagtagcagtacacattcaaaggggtattcctagctcaatgcttggtgttctagttcaacttttatcctgcagcaagtaagcctagataactctacacgatttggctgagtggctttgtgtgaccgtggccccaggccaaggggatcatggccctggctggctttcccgggggtctcagctcctgttgtcagtgataggcggctcaaaggagcatcagtttcttttgatccaagaagtgcttactgaatgcctgccctgtgcgtggccttaaacattgagaagtgctgctctccgtttatttgggatttgattctcattttaccatagcttatattctcaatttcaatgccagtctcagaactcttgttttctgtgttctgttctcaaaattacattgtccctcatgtcatttcaaactgttttccaaagggatttgagcatatacaactacaaatccaagcagattgactctcaaaaataatcttaaatactgcaaatagtcccaactaagattcagtcagtatgtttgttttgcaagtttgggagagtaagttggctttgagtcacacatcgaagctttaagaggtgagacgctggcttcattctggactagacaggaacttggcctcagcgtgagatcctgccatgcagtgttgcggtggcactgaagaagtgtgaatgtgaaggcggcgtcggcgcggggccagagcaccactctgctgccccaccacgcggcctgtgaggagccactaaacctttccgtgcctagacctccccatctgtggaatggggtcaataccacctacctcacaggggtgttgtgaggactgagaagaacaatgtcaaatgtttttaatactcagatgtgggagcgacatcaatgaaatctgtactgtatgaaagctacacaaaaatgggcagacatttggttaattgtgccagatacctaaaatgtatgttcagaaaagcattttatcaactcagaaatatgacttatttctagatttcatggcttaatgaattttttcattgttatatataccaaagaggcttacgggttcattgattggtttgaaaaccagacagacggccgggcgcggtggctcacgcctgtaatcccagcaatttgggaggccaaggcgggtggatcatgaggtcaggcgttcgagaccagcctggccaacatgataaaaccccgtctctactaaaaatacaaaaaaatagctgggcgtgctggcgggtgcctgtaatcccagctactcaggaggctgagacaggagaatcctttgaacccnggaggcggaggttgcagtgagttgagatcgggcctttgcacttcagtctgggcaacagggcgagactccatctcaaaaaacaacaacaacaacaaaaaaaaccggacggacttgcccatcggccctcacgacacgcgtgcagtgggactctagccaaggcggtggccgagccatcattacaatttttctggagtaaatgatccacggtgggacatcaactggcacttactctgtttaggaacttgagttgaatcatttctaaacttgtcctttagaccacgcctagggcagcaaattccacttcctagaactgcaaaccgggagaggatgtagttagattctggcatcctgccccggctctttgagggaaaagttctttcccctgctctaagtagggcgggcccagcctccattcccattgggagccatgaagttgtcttgttgataggtctagggcagctgttggcagctgctggccttgtggatggtaagctgactgtgttggcatttaatgccatcctccatctgccagaggcccaggaagcccaccttcacaccaggcccaccagctggaaggagcccaggaggcaggtcttagggtttcatggtgaaatgctgtctgacaccagggaaaaattcccaccctgtttataatcccagagcagaagtcagcaattacttagggataaaagatgaactccattttttttattttcttaagacagtcttgctctgtggcccaggctggaggctggagtgcagtggcaccatttcggctcaccgcaacctctgcctcccgggttcaagcgattctcctgcctcagcctcctgagtagctgggattacaggcttgggccaccatgcccagctaatttttttgtatttttagtagagacggggtttcaccatgatggccaggctggtctcgaactcctgacctcaagtgatccacgcgcctcggcctcccaaagtgctgggattgcaggcgtgagccaccacgcccagccaagatgaactccttaaggacaggatttggtaagtgattgacttctttttagttccatgatcttgagattatttttagctttataaatttagcagtggcagggcccgtggagaatcaggttaatgaggtaaaggctttctgggtatttgctgccaaggccacatcaccaattttctcgatttaaaaaactgtcaagagatttatttttccattgcaggttttaaagtggagattctgaagtggaaaataggtactgtcagaacaaagctacctggaaacagcatagagtgaagcctttcgtgagggcttgcaggccgctgctgagtggcagtttacagaagaggtcgcggggtgagcctcttagcaggacagaaaacaaggcagcagcgcacctgccaccccttcacgagctgctccttgagcctaaaaagtaggctttattcatcccttctgttcatttaccaacctgggggattgatacgaccggggaaaatgttcctaaaccaggaagctgcgttagccgatcaggctttgtaagatctcgccaacagctagctgcttaggagtacccccacgatacgcacagcacaccactgtcccttcactgcactttcttcctgccttaggtagttgggcttgcccaccctagtttgcttttgtagtggccctataccaccatcccggttggcaatcttgttgttgatgaggttgttcagggcgaccacggaacggatcagcgagccaagtacactaccaccatctggtcattggtcttcaggtaaaaggccttgacgaactcctgcaggctgacatctggcagcaggttgaagacgtcctgcagctggtagatgatctggtgtatca

SEQ ID NO: 320861 - DNA, 3664 bp, Homo sapiens
  misc_feature (1711)..(1711): n is a, c, g, or t
gcagccggcgcgtttctccgggctacagccggcgccgccgcccgctagtccgccgcccggcgccatggcgggctgcgcggcgcgggctccgccgggctctgaggcgcgtctcagcctcgccaccttcctgctgggcgcctcggtgctcgcgctgccgctgctcacgcgcgccggcctgcagggccgcaccgggctggcgctctacgtggccgggctcaacgcgctgctgctgctgctctatcggccgcctcgctaccagatagccatccgagcttgtttcctggggtttgtgttcggctgcggcacgctgctaagttttagccagtcttcttggagtcactttggctggtacatgtgctccctgtcattgttccactattctgaatacttggtgacagcagtcaataatcccaaaagtctgtccttggattcctttctcctgaatcacagcctggagtatacagtagctgctctttcttcttggttagagttcacacttgaaaatatcttttggccagaactgaagcagattacctggctcagtgtcacagggctgctgatggtggtcttcggagaatgtctgaggaaggcggccatgtttacagctggctccaatttcaaccacgtggtacagaatgaaaaatcagatacacatactctggtgaccagtggagtgtacgcttggtttcggcatccttcttacgtcgggtggttttactggagtattggaactcaggtgatgctgtgtaaccccatctgcggcgtcagctatgccctgacagtgtggcgattcttccgcgatcgaacagaagaagaagaaatctcactaattcacttttttggagaggagtacctggagtataagaagagggtgcccacgggcctgcctttcataaagggggtcaaggtggacctgtgacgggcagtggccccggtgaccttggggcctccgaccctgtgcagcctgggacaaaactgtttccggttggccgctgccacatggattttcttaatcgttttatgtcattagtcactcttctggaatgtcactcaagaccaagcggtcagaaggcctgaggacccaaggccccactggagcagtctgtccttatgccgaatcaaggcggaacatgggtgaaagacgagtaaggggcaaatcacagcaatattccacagcgccctccagagttacctggggaggaccgaggccacacgccactacctcacaggggtgttgtgaggactgagaagaacaatgtcaaatgtttttaatactcagatgtgggagcgacatcaatgaaatctgtactgtatgaaagctacacaaaaatgggcagacatttggttaattgtgccagatacctaaaatgtatgttcagaaaagcattttatcaactcagaaatatgacttatttctagatttcatggcttaatgaattttttcattgttatatataccaaagaggcttacgggttcattgattggtttgaaaaccagacagacggccgggcgcggtggctcacgcctgtaatcccagcaatttgggaggccaaggcgggtggatcatgaggtcaggcgttcgagaccagcctggccaacatgataaaaccccgtctctactaaaaatacaaaaaaatagctgggcgtgctggcgggtgcctgtaatcccagctactcaggaggctgagacaggagaatcctttgaacccnggaggcggaggttgcagtgagttgagatcgggcctttgcacttcagtctgggcaacagggcgagactccatctcaaaaaacaacaacaacaacaaaaaaaaccggacggacttgcccatcggccctcacgacacgcgtgcagtgggactctagccaaggcggtggccgagccatcattacaatttttctggagtaaatgatccacggtgggacatcaactggcacttactctgtttaggaacttgagttgaatcatttctaaacttgtcctttagaccacgcctagggcagcaaattccacttcctagaactgcaaaccgggagaggatgtagttagattctggcatcctgccccggctctttgagggaaaagttctttcccctgctctaagtagggcgggcccagcctccattcccattgggagccatgaagttgtcttgttgataggtctagggcagctgttggcagctgctggccttgtggatggtaagctgactgtgttggcatttaatgccatcctccatctgccagaggcccaggaagcccaccttcacaccaggcccaccagctggaaggagcccaggaggcaggtcttagggtttcatggtgaaatgctgtctgacaccagggaaaaattcccaccctgtttataatcccagagcagaagtcagcaattacttagggataaaagatgaactccattttttttattttcttaagacagtcttgctctgtggcccaggctggaggctggagtgcagtggcaccatttcggctcaccgcaacctctgcctcccgggttcaagcgattctcctgcctcagcctcctgagtagctgggattacaggcttgggccaccatgcccagctaatttttttgtatttttagtagagacggggtttcaccatgatggccaggctggtctcgaactcctgacctcaagtgatccacgcgcctcggcctcccaaagtgctgggattgcaggcgtgagccaccacgcccagccaagatgaactccttaaggacaggatttggtaagtgattgacttctttttagttccatgatcttgagattatttttagctttataaatttagcagtggcagggcccgtggagaatcaggttaatgaggtaaaggctttctgggtatttgctgccaaggccacatcaccaattttctcgatttaaaaaactgtcaagagatttatttttccattgcaggttttaaagtggagattctgaagtggaaaataggtactgtcagaacaaagctacctggaaacagcatagagtgaagcctttcgtgagggcttgcaggccgctgctgagtggcagtttacagaagaggtcgcggggtgagcctcttagcaggacagaaaacaaggcagcagcgcacctgccaccccttcacgagctgctccttgagcctaaaaagtaggctttattcatcccttctgttcatttaccaacctgggggattgatacgaccggggaaaatgttcctaaaccaggaagctgcgttagccgatcaggctttgtaagatctcgccaacagctagctgcttaggagtacccccacgatacgcacagcacaccactgtcccttcactgcactttcttcctgccttaggtagttgggcttgcccaccctagtttgcttttgtagtggtttggcaaggttagaaggcctcggcctctctgtcatgctgggaagtgcctactctctgggccactgctgcagaggccgtggcacttgtcatgggtttggaagacccagccatctgcagcagaggcagcctatcccattgcaaggagaggaactgaacggagtaattattctactcttctttttacataaatgtttatttaaatattctaaattggattttctttcacagatactgattattctttccagttcttaaataaaactgcacttgatttcactcaa

SEQ ID NO: 320862 - DNA, 390 bp, Homo sapiens
tacacctccgttgacgtctgcttcgttgcatttgagggaaatgttggcatcgatttgacttaaaccttctccccagagtgatttcctccctttcctttgtcaacagaagaatggtttattattgccagttttggcctcctcagtgccctcacactctgctacatgatcatcagagccacagctagcttgaatgctaatgaggtagaatggttttgaagaagaaaaaacctgctttctgactgattttgccttgaaggaaaaaagaacctatttttgtgcatcatttaccaatcatgccacacaagcatttatttttagtacattttattttttcataaaattgctaatgccaaagctttgtattaaaagaaataaataataaaataaaaa

SEQ ID NO: 320863 - DNA, 1132 bp, Homo sapiens
gtacagaactttatgtgaagttgtgaatatcctttataccagaggtttttcaaaaaagttgacaacgccccctcattcattgagatgctgtttcccaagtaggctcccgggcttgtgccaagcacggggctcgcagtgctgaaggtaatggagacctggtctggccccgccagagctcagggctatgccctcatgtgcgtactgatgtggctggagagtgagggagtacgcaaaggcccttctgggtcatgcctgcggagctgccgccttacctttgggggagctgaaaaggctgcatggaagagtgacttaggaaccagcctgggcataattagggcacacagtgaggaccgcacagagcaggatcagcgagttgtgtggtttggtgtgtctgctgtaggtggtggtgacggtaggcaggagacagattttggacttgattcttataaagagctggtaatgggctctaaggcctttcagcagagagatattcctagtggctgcgaagttgcttgctgtggtagggcatgaaggcaggaagatagattaggtaaaaatagggagttgaaggagcaagtcagggtggcgagcaggagctgaaatcaggagttgctagagagttgtgtaataaccaaagcttatatggtttgaagcagagatctggagctcagcagaaagaaaaagatcaacgctaacagcttgatttggggaccctggaaatgagcaggaatccaaggcatcagaaagccaggacagccccacagcacagggctgcagagagggcagcaggagctcgggcagcgcaggggcttgtcaaaaggtcataggctgtttttacacctgatgcaaggacagaaacacacacaaggtctggaggattcctgtgagacagccatacatccctatcacttcaaaataagtgaggacattcttgtttgagagggtagaatggttttgaagaagaaaaaacctgctttctgactgattttgccttgaaggaaaaaagaacctatttttgtgcatcatttaccaatcatgccacacaagcatttatttttagtacattttattttttcataaaattgctaatgccaaagctttgtattaaaagaaataaataataaaataaaaa

SEQ ID NO: 320864 - DNA, 239 bp, Homo sapiens
  misc_feature (61)..(61): n is a, c, g, or t
tattcctaatcataacttaaagattgtgagaagaaatgtagagaactttaggtgaaacggntttagaattaaaaaacctgctttctgactgattttgccttgaaggaaaaaagaacctatttttgtgcatcatttaccaatcatgccacacaagcatttatttttagtacattttattttttcataaaattgctaatgccaaagctttgtattaaaagaaataaataataaaataaaaa

SEQ ID NO: 320865 - DNA, 1779 bp, Homo sapiens
ggactttgtgttccgctgaccctcctcggggcgcttcctcccgtgccgcccttcccctcccccgccgcgtccttgcgaggcgcctcccattcggtgggaccgacccggggggatggagggggcacgcttctacaaccctcctgggaccccgaagagacgcccgcgtgcgacctgagacgccgccctcgccgagggcccatgggcgcgtccccacaggcgggcagtggacgtgagggcggcgagcggcggggccgcggcgtccaggagggccgcgctcgggctcggccccgcgcaggccgcgcgcgcgcgctcccgccgccgcccgggccgcgcccgccccgcctctaggcgccggccccggagcccggtccgcgagcagcggcggctgccggagggacgatgagctgcgcggggcgggcgggccctgcccggctcgccgcgctagccctgctgacctgcagcctgtggccggcacgggcagacaacgcgagccaggagtactacacagcgctcatcaacgtgacggtgcaggagcccggccgcggcgccccgctcacgtttcgcatcgaccgcgggcgctacgggcttgactcccccaaggccgaggtccgcggccaggtgctggcgccgctgcccctccacggagttgctgatcatctgggctgtgatccacaaacccggttctttgtccctcctaatatcaaacagtggattgccttgctgcagaggggaaactgcacgtttaaagagaaaatatcacgggccgctttccacaatgcagttgctgtagtcatctacaataataaatccaaagaggagccagttaccatgactcatccaggcactggagatattattgctgtcatgataacagaattgaggggtaaggatattttgagttatctggagaacttcagccgtggctctctagtcttcgtgtcaatatcctttattgttttgatgattatttcttcagcatggctcatattctacttcattcagaagatcaggtacacaaatgcacgcgacaggaaccagcgtcgtctcggagatgcagccaagaaagccatcagtaaattgacaaccaggacagtaaagaagggtgacaaggaaactgacccagactttgatcattgtgcagtctgcatagagagctataagcagaatgatgtcgtccgaattctcccctgcaagcatgttttccacaaatcctgcgtggatccctggcttagtgaacattgtacctgtcctatgtgcaaacttaatatattgaaggccctgggaattgtgccgaatttgccatgtactgataacgtagcattcgatatggaaaggctcaccagaacccaagctgttaaccgaagatcagccctcggcgacctcgccggcgacaactcccttggccttgagccacttcgaacttcggggatctcacctcttcctcaggatggggagctcactccgagaacaggagaaatcaacattgcagtaacaaaagaatggtttattattgccagttttggcctcctcagtgccctcacactctgctacatgatcatcagagccacagctagcttgaatgctaatgaggtagaatggttttgaagaagaaaaaacctgctttctgactgattttgccttgaaggaaaaaagaacctatttttgtgcatcatttaccaatcatgccacacaagcatttatttttagtacattttattttttcataaaattgctaatgccaaagctttgtattaaaagaaataaataataaaataaaaa

SEQ ID NO: 320866 - DNA, 970 bp, Homo sapiens
ggacgcgtgggcgaccacgcgtccggatattttgagttatctggagaaaaacatctctgtacaaatgacaatagctgttggaactcgaatgccaccgaagaacttcagccgtggctctctagtcttcgtgtcaatatcctttattgttttgatgattatttcttcagcatggctcatattctacttcattcagaagatcaggtacacaaatgcacgcgacaggaaccagcgtcgtctcggagatgcagccaagaaagccatcagtaaattgacaaccaggacagtaaagaagggtgacaaggaaactgacccagactttgatcattgtgcagtctgcatagagagctataagcagaatgatgtcgtccgaattctcccctgcaagcatgttttccacaaatcctgcgtggatccctggcttagtgaacattgtacctgtcctatgtgcaaacttaatatattgaaggccctgggaattgtgccgaatttgccatgtactgataacgtagcattcgatatggaaaggctcaccagaacccaagctgttaaccgaagatcagccctcggcgacctcgccggcgacaactcccttggccttgagccacttcgaacttcggggatctcacctcttcctcaggatggggagctcactccgagaacaggagaaatcaacattgcagtaacaaaagaatggtttattattgccagttttggcctcctcagtgccctcacactctgctacatgatcatcagagccacagctagcttgaatgctaatgaggtagaatggttttgaagaagaaaaaacctgctttctgactgattttgccttgaaggaaaaaagaacctatttttgtgcatcatttaccaatcatgccacacaagcatttatttttagtacattttattttttcataaaattgctaatgccaaagctttgtattaaaagaaataaataataaaataaaaa

SEQ ID NO: 320867 - DNA, 765 bp, Homo sapiens
ggagatcccataaacggaaatcggcgtcgtctcggagatgcagccaagaaagccatcagtaaattgacaaccaggacagtaaagaagggtgacaaggaaactgacccagactttgatcattgtgcagtctgcatagagagctataagcagaatgatgtcgtccgaattctcccctgcaagcatgttttccacaaatcctgcgtggatccctggcttagtgaacattgtacctgtcctatgtgcaaacttaatatattgaaggccctgggaattgtgccgaatttgccatgtactgataacgtagcattcgatatggaaaggctcaccagaacccaagctgttaaccgaagatcagccctcggcgacctcgccggcgacaactcccttggccttgagccacttcgaacttcggggatctcacctcttcctcaggatggggagctcactccgagaacaggagaaatcaacattgcagtaacaaaagaatggtttattattgccagttttggcctcctcagtgccctcacactctgctacatgatcatcagagccacagctagcttgaatgctaatgaggtagaatggttttgaagaagaaaaaacctgctttctgactgattttgccttgaaggaaaaaagaacctatttttgtgcatcatttaccaatcatgccacacaagcatttatttttagtacattttattttttcataaaattgctaatgccaaagctttgtattaaaagaaataaataataaaataaaaa

SEQ ID NO: 320868 - DNA, 2154 bp, Homo sapiens
ggactttgtgttccgctgaccctcctcggggcgcttcctcccgtgccgcccttcccctcccccgccgcgtccttgcgaggcgcctcccattcggtgggaccgacccggggggatggagggggcacgcttctacaaccctcctgggaccccgaagagacgcccgcgtgcgacctgagacgccgccctcgccgagggcccatgggcgcgtccccacaggcgggcagtggacgtgagggcggcgagcggcggggccgcggcgtccaggagggccgcgctcgggctcggccccgcgcaggccgcgcgcgcgcgctcccgccgccgcccgggccgcgcccgccccgcctctaggcgccggccccggagcccggtccgcgagcagcggcggctgccggagggacgatgagctgcgcggggcgggcgggccctgcccggctcgccgcgctagccctgctgacctgcagcctgtggccggcacgggcagacaacgcgagccaggagtactacacagcgctcatcaacgtgacggtgcaggagcccggccgcggcgccccgctcacgtttcgcatcgaccgcgggcgctacgggcttgactcccccaaggccgaggtccgcggccaggtgctggcgccgctgcccctccacggagttgctgatcatctgggctgtgatccacaaacccggttctttgtccctcctaatatcaaacagtggattgccttgctgcagaggggaaactgcacgtttaaagagaaaatatcacgggccgctttccacaatgcagttgctgtagtcatctacaataataaatccaaagaggagccagttaccatgactcatccaggcactggagatattattgctgtcatgataacagaattgaggggtaaggatattttgagttatctggagaaaaacatctctgtacaaatgacaatagctgttggaactcgaatgccaccgaagaacttcagccgtggctctctagtcttcgtgtcaatatcctttattgttttgatgattatttcttcagcatggctcatattctacttcattcagaagatcaggtacacaaatgcacgcgacaggaaccagcgtcgtctcggagatgcagccaagaaagccatcagtaaattgacaaccaggacagtaaagaagggtgacaaggaaactgacccagactttgatcattgtgcagtctgcatagagagctataagcagaatgatgtcgtccgaattctcccctgcaagcatgttttccacaaatcctgcgtggatccctggcttagtgaacattgtacctgtcctatgtgcaaacttaatatattgaaggccctgggaattgtgccgaatttgccatgtactgataacgtagcattcgatatggaaaggctcaccagaacccaagctgttaaccgaagatcagccctcggcgacctcgccggcgacaactcccttggccttgagccacttcgaacttcggggatctcacctcttcctcaggatggggagctcactccgagaacaggagaaatcaacattgcagtaacaaaagaatggtttattattgccagttttggcctcctcagtgccctcacactctgctacatgatcatcagagccacagctagcttgaatgctaatgaggtagaatggttttgaagaagaaaaaacctgctttctgactgattttgccttgaaggaaaaaagaacctatttttgtgcatcatttaccaatcatgccacacaagcatttatttttagtacattttattttttcataaaattgctaatgccaaagctttgtattaaaagaaataaataataaaataaaaaataaaaagtctgatgctgttcgagtcttattaaccagacctgtgttttgagggctgatttgaagctcgcagacccagattgcatttgtttgtgtttcagagacagaatgtgctcctggctcccgtgagaggaacagggattgacacttactattggtgtcttcacattggctcctacccacatagggcgcaagagcggggacatcctgctggtgatgccgcttaggatggtcagttgatttactcattcttcaagggggacattcactctgtgataatttcttctctgtggttgatcagcctccaccagagctgcagcacc

SEQ ID NO: 320869 - DNA, 2257 bp, Homo sapiens
ggactttgtgttccgctgaccctcctcggggcgcttcctcccgtgccgcccttcccctcccccgccgcgtccttgcgaggcgcctcccattcggtgggaccgacccggggggatggagggggcacgcttctacaaccctcctgggaccccgaagagacgcccgcgtgcgacctgagacgccgccctcgccgagggcccatgggcgcgtccccacaggcgggcagtggacgtgagggcggcgagcggcggggccgcggcgtccaggagggccgcgctcgggctcggccccgcgcaggccgcgcgcgcgcgctcccgccgccgcccgggccgcgcccgccccgcctctaggcgccggccccggagcccggtccgcgagcagcggcggctgccggagggacgatgagctgcgcggggcgggcgggccctgcccggctcgccgcgctagccctgctgacctgcagcctgtggccggcacgggcagacaacgcgagccaggagtactacacagcgctcatcaacgtgacggtgcaggagcccggccgcggcgccccgctcacgtttcgcatcgaccgcgggcgctacgggcttgactcccccaaggccgaggtccgcggccaggtgctggcgccgctgcccctccacggagttgctgatcatctgggctgtgatccacaaacccggttctttgtccctcctaatatcaaacagtggattgccttgctgcagaggggaaactgcacgtttaaagagaaaatatcacgggccgctttccacaatgcagttgctgtagtcatctacaataataaatccaaagaggagccagttaccatgactcatccaggcactggagatattattgctgtcatgataacagaattgaggggtaaggatattttgagttatctggagaaaaacatctctgtacaaatgacaatagctgttggaactcgaatgccaccgaagaacttcagccgtggctctctagtcttcgtgtcaatatcctttattgttttgatgattatttcttcagcatggctcatattctacttcattcagaagatcaggtacacaaatgcacgcgacaggaaccagcgtcgtctcggagatgcagccaagaaagccatcagtaaattgacaaccaggacagtaaagaagggtgacaaggaaactgacccagactttgatcattgtgcagtctgcatagagagctataagcagaatgatgtcgtccgaattctcccctgcaagcatgttttccacaaatcctgcgtggatccctggcttagtgaacattgtacctgtcctatgtgcaaacttaatatattgaaggccctgggaattgtgccgaatttgccatgtactgataacgtagcattcgatatggaaaggctcaccagaacccaagctgttaaccgaagatcagccctcggcgacctcgccggcgacaactcccttggccttgagccacttcgaacttcggggatctcacctcttcctcaggatggggagctcactccgagaacaggagaaatcaacattgcagtaacaaaagaatggtttattattgccagttttggcctcctcagtgccctcacactctgctacatgatcatcagagccacagctagcttgaatgctaatgaggtagaatggttttgaagaagaaaaaacctgctttctgactgattttgccttgaaggaaaaaagaacctatttttgtgcatcatttaccaatcatgccacacaagcatttatttttagtacattttattttttcataaaattgctaatgccaaagctttgtattaaaagaaataaataataaaataaaaagtgaaaaaaaaaaaaaaaaaaaaaaaaaaaaaaaaaaaaaaaaaaaaaaaaaaaaaaaaaaaaaaaaaaaaaaaaaaaattttaagaaaaaaaaaaaaaaaaaaaaaaaaaaattttttgggcccctttggcccaattattttttaatttaaaaaattttttttttgggggccaaattggggcccatttggcaaattcccccttttggggggggttttaaaaataatgggccgggtttttaaaaagggggggggggaaaaacccgggggttccccaaattaatcgcttgtgagaaaaaccccttttcccaagtgggggaaatagcaaaaaagggcccaccgattccccttttaaaaatattggcccccctttttgggggaagggaaattgaagccttttatttttgtaatccgggttttttttg

SEQ ID NO: 320870 - DNA, 1739 bp, Homo sapiens
ggactttgtgttccgctgaccctcctcggggcgcttcctcccgtgccgcccttcccctcccccgccgcgtccttgcgaggcgcctcccattcggtgggaccgacccggggggatggagggggcacgcttctacaaccctcctgggaccccgaagagacgcccgcgtgcgacctgagacgccgccctcgccgagggcccatgggcgcgtccccacaggcgggcagtggacgtgagggcggcgagcggcggggccgcggcgtccaggagggccgcgctcgggctcggccccgcgcaggccgcgcgcgcgcgctcccgccgccgcccgggccgcgcccgccccgcctctaggcgccggccccggagcccggtccgcgagcagcggcggctgccggagggacgatgagctgcgcggggcgggcgggccctgcccggctcgccgcgctagccctgctgacctgcagcctgtggccggcacgggcagacaacgcgagccaggagtactacacagcgctcatcaacgtgacggtgcaggagcccggccgcggcgccccgctcacgtttcgcatcgaccgcgggcgctacgggcttgactcccccaaggccgaggtccgcggccaggtgctggcgccgctgcccctccacggagttgctgatcatctgggctgtgatccacaaacccggttctttgtccctcctaatatcaaacagtggattgccttgctgcagaggggaaactgcacgtttaaagagaaaatatcacgggccgctttccacaatgcagttgctgtagtcatctacaataataaatccaaagaggagccagttaccatgactcatccaggcactggagatattattgctgtcatgataacagaattgaggggtaaggatattttgagttatctggagaaaaacatctctgtacaaatgacaatagctgttggaactcgaatgccaccgaagaacttcagccgtggctctctagtcttcgtgtcaatatcctttattgttttgatgattatttcttcagcatggctcatattctacttcattcagaagatcaggtacacaaatgcacgcgacaggaaccagcgtcgtctcggagatgcagccaagaaagccatcagtaaattgacaaccaggacagtaaagaagggtgacaaggaaactgacccagactttgatcattgtgcagtctgcatagagagctataagcagaatgatgtcgtccgaattctcccctgcaagcatgttttccacaaatcctgcgtggatccctggcttagtgaacattgtacctgtcctatgtgcaaacttaatatattgaaggccctgggaattgtgccgaatttgccatgtactgataacgtagcattcgatatggaaaggctcaccagaacccaagctgttaaccgaagatcagccctcggcgacctcgccggcgacaactcccttggccttgagccacttcgaacttcggggatctcacctcttcctcaggatggggagctcactccgagaacaggagaaatcaacattgcagtaacaaggtagaatggttttgaagaagaaaaaacctgctttctgactgattttgccttgaaggaaaaaagaacctatttttgtgcatcatttaccaatcatgccacacaagcatttatttttagtacattttattttttcataaaattgctaatgccaaagctttgtattaaaagaaataaataataaaataaaaa

SEQ ID NO: 320871 - DNA, 1475 bp, Homo sapiens
ggactttgtgttccgctgaccctcctcggggcgcttcctcccgtgccgcccttcccctcccccgccgcgtccttgcgaggcgcctcccattcggtgggaccgacccggggggatggagggggcacgcttctacaaccctcctgggaccccgaagagacgcccgcgtgcgacctgagacgccgccctcgccgagggcccatgggcgcgtccccacaggcgggcagtggacgtgagggcggcgagcggcggggccgcggcgtccaggagggccgcgctcgggctcggccccgcgcaggccgcgcgcgcgcgctcccgccgccgcccgggccgcgcccgccccgcctctaggcgccggccccggagcccggtccgcgagcagcggcggctgccggagggacgatgagctgcgcggggcgggcgggccctgcccggctcgccgcgctagccctgctgacctgcagcctgtggccggcacgggcagacaacgcgagccaggagtactacacagcgctcatcaacgtgacggtgcaggagcccggccgcggcgccccgctcacgtttcgcatcgaccgcgggcgctacgggcttgactcccccaaggccgaggtccgcggccaggtgctggcgccgctgcccctccacggagttgctgatcatctgggctgtgatccacaaacccggttctttgtccctcctaatatcaaacagtggattgccttgctgcagaggggaaactgcacgtttaaagagaaaatatcacgggccgctttccacaatgcagttgctgtagtcatctacaataataaatccaaagaggagccagttaccatgactcatccaggcactggagatattattgctgtcatgataacagaattgaggggtaaggatattttgagttatctggagaaaaacatctctgtacaaatgacaatagctgttggaactcgaatgccaccgaagaacttcagccgtggctctctagtcttcgtgtcaatatcctttattgttttgatgattatttcttcagcatggctcatattctacttcattcagaagatcaggtacacaaatgcacgcgacaggaaccagcgtcgtctcggagatgcagccaagaaagccatcagtaaattgacaaccaggatggggagctcactccgagaacaggagaaatcaacattgcagtaacaaaagaatggtttattattgccagttttggcctcctcagtgccctcacactctgctacatgatcatcagagccacagctagcttgaatgctaatgaggtagaatggttttgaagaagaaaaaacctgctttctgactgattttgccttgaaggaaaaaagaacctatttttgtgcatcatttaccaatcatgccacacaagcatttatttttagtacattttattttttcataaaattgctaatgccaaagctttgtattaaaagaaataaataataaaataaaaa

SEQ ID NO: 320872 - DNA, 1146 bp, Homo sapiens
agctggtaccggtcggagatttatggacccggagcccggtccgcgagcagcggcggctgccggagggacgatgagctgcgcggggcgggcgggccctgcccggctcgccgcgctagccctgctgacctgcagcctgtggccggcacgggcagacaacgcgagccaggagtactacacagcgctcatcaacgtgacggtgcaggagcccggccgcggcgccccgctcacgtttcgcatcgaccgcgggcgctacgggcttgactcccccaaggccgaggtccgcggccaggtgctggcgccgctgcccctccacggagttgctgatcatctgggctgtgatccacaaacccggttctttgtccctcctaatatcaaacagtggattgccttgctgcagaggggaaactgcacgtttaaagagaaaatatcacgggccgctttccacaatgcagttgctgtagtcatctacaataataaatccaaagaggagccagttaccatgactcatccaggcactggagatattattgctgtcatgataacagaattgaggggtaaggatattttgagttatctggagaaaaacatctctgtacaaatgacaatagctgttggaactcgaatgccaccgaagaacttcagccgtggctctctagtcttcgtgtcaatatcctttattgttttgatgattatttcttcagcatggctcatattctacttcattcagaagatcaggtacacaaatgcacgcgacaggaaccagcgtcgtctcggagatgcagccaagaaagccatcagtaaattgacaaccaggatggggagctcactccgagaacaggagaaatcaacattgcagtaacaaaagaatggtttattattgccagttttggcctcctcagtgccctcacactctgctacatgatcatcagagccacagctagcttgaatgctaatgaggtagaatggttttgaagaagaaaaaacctgctttctgactgattttgccttgaaggaaaaaagaacctatttttgtgcatcatttaccaatcatgccacacaagcatttatttttagtacattttattttttcataaaattgctaatgccaaagctttgtattaaaagaaataaataataaaataaaaa

SEQ ID NO: 320873 - DNA, 1507 bp, Homo sapiens
gtacagaactttatgtgaagttgtgaatatcctttataccagaggtttttcaaaaaagttgacaacgccccctcattcattgagatgctgtttcccaagtaggctcccgggcttgtgccaagcacggggctcgcagtgctgaaggtaatggagacctggtctggccccgccagagctcagggctatgccctcatgtgcgtactgatgtggctggagagtgagggagtacgcaaaggcccttctgggtcatgcctgcggagctgccgccttacctttgggggagctgaaaaggctgcatggaagagtgacttaggaaccagcctgggcataattagggcacacagtgaggaccgcacagagcaggatcagcgagttgtgtggtttggtgtgtctgctgtaggtggtggtgacggtaggcaggagacagattttggacttgattcttataaagagctggtaatgggctctaaggcctttcagcagagagatattcctagtggctgcgaagttgcttgctgtggtagggcatgaaggcaggaagatagattaggtaaaaatagggagttgaaggagcaagtcagggtggcgagcaggagctgaaatcaggagttgctagagagttgtgtaataaccaaagcttatatggtttgaagcagagatctggagctcagcagaaagaaaaagatcaacgctaacagcttgatttggggaccctggaaatgagcaggaatccaaggcatcagaaagccaggacagccccacagcacagggctgcagagagggcagcaggagctcgggcagcgcaggggcttgtcaaaaggtcataggctgtttttacacctgatgcaaggacagaaacacacacaaggtctggaggattcctgtgagacagccatacatccctatcacttcaaaataagtgaggacattcttgtttgagaggtaagaggagcattttttaaagacaacagcggcagatttcagcaccctcagcattcagaacatgtgtttaaaccaggaaaaattgtaaattgtatgataattgtccctgtgtatttaaacaacacgccatgggcctgaccttttccttcatccttttgggagtattaaagcacctctaagatggatgagtcagtcaactgcagatctgaaactgctgattttgggaaaacacttaatggcttcctggccttaccagaggggttgggaactagctggggacagccaggccacccttcagttagggtcacttctctgttattttaaacatttgactactctttaatttatgacctcttttttccttttattccatagggtagaatggttttgaagaagaaaaaacctgctttctgactgattttgccttgaaggaaaaaagaacctatttttgtgcatcatttaccaatcatgccacacaagcatttatttttagtacattttattttttcataaaattgctaatgccaaagctttgtattaaaagaaataaataataaaataaaaa

SEQ ID NO: 320874 - DNA, 1725 bp, Homo sapiens
ggactttgtgttccgctgaccctcctcggggcgcttcctcccgtgccgcccttcccctcccccgccgcgtccttgcgaggcgcctcccattcggtgggaccgacccggggggatggagggggcacgcttctacaaccctcctgggaccccgaagagacgcccgcgtgcgacctgagacgccgccctcgccgagggcccatgggcgcgtccccacaggcgggcagtggacgtgagggcggcgagcggcggggccgcggcgtccaggagggccgcgctcgggctcggccccgcgcaggccgcgcgcgcgcgctcccgccgccgcccgggccgcgcccgccccgcctctaggcgccggccccggagcccggtccgcgagcagcggcggctgccggagggacgatgagctgcgcggggcgggcgggccctgcccggctcgccgcgctagccctgctgacctgcagcctgtggccggcacgggcagacaacgcgagccaggagtactacacagcgctcatcaacgtgacggtgcaggagcccggccgcggcgccccgctcacgtttcgcatcgaccgcgggcgctacgggcttgactcccccaaggccgaggtccgcggccaggtgctggcgccgctgcccctccacggagttgctgatcatctgggctgtgatccacaaacccggttctttgtccctcctaatatcaaacagtggattgccttgctgcagaggggaaactgcacgtttaaagagaaaatatcacgggccgctttccacaatgcagttgctgtagtcatctacaataataaatccaaagaggagccagttaccatgactcatccaggcactggagatattattgctgtcatgataacagaattgaggggtaaggatattttgagttatctggagaaaaacatctctgtacaaatgacaatagctgttggaactcgaatgccaccgaagaacttcagccgtggctctctagtcttcgtgtcaatatcctttattgttttgatgattatttcttcagcatggctcatattctattcggggatctcacctcttcctcaggatggggagctcactccgagaacaggagaaatcaacattgcagtaacaaaagaatggtttattattgccagttttggcctcctcagtgccctcacactctgctacatgatcatcagagccacagctagcttgaatgctaatgaggtagaatggttttgaagaagaaaaaacctgctttctgactgattttgccttgaaggaaaaaagaacctatttttgtgcatcatttaccaatcatgccacacaagcatttatttttagtacattttattttttcataaaattgctaatgccaaagctttgtattaaaagaaataaataataaaataaaaaataaaaagtctgatgctgttcgagtcttattaaccagacctgtgttttgagggctgatttgaagctcgcagacccagattgcatttgtttgtgtttcagagacagaatgtgctcctggctcccgtgagaggaacagggattgacacttactattggtgtcttcacattggctcctacccacatagggcgcaagagcggggacatcctgctggtgatgccgcttaggatggtcagttgatttactcattcttcaagggggacattcactctgtgataatttcttctctgtggttgatcagcctccaccagagctgcagcacc

SEQ ID NO: 320875 - DNA, 1453 bp, Homo sapiens
gtacagaactttatgtgaagttgtgaatatcctttataccagaggtttttcaaaaaagttgacaacgccccctcattcattgagatgctgtttcccaagtaggctcccgggcttgtgccaagcacggggctcgcagtgctgaaggtaatggagacctggtctggccccgccagagctcagggctatgccctcatgtgcgtactgatgtggctggagagtgagggagtacgcaaaggcccttctgggtcatgcctgcggagctgccgccttacctttgggggagctgaaaaggctgcatggaagagtgacttaggaaccagcctgggcataattagggcacacagtgaggaccgcacagagcaggatcagcgagttgtgtggtttggtgtgtctgctgtaggtggtggtgacggtaggcaggagacagattttggacttgattcttataaagagctggtaatgggctctaaggcctttcagcagagagatattcctagtggctgcgaagttgcttgctgtggtagggcatgaaggcaggaagatagattaggtaaaaatagggagttgaaggagcaagtcagggtggcgagcaggagctgaaatcaggagttgctagagagttgtgtaataaccaaagcttatatggtttgaagcagagatctggagctcagcagaaagaaaaagatcaacgctaacagcttgatttggggaccctggaaatgagcaggaatccaaggcatcagaaagccaggacagccccacagcacagggctgcagagagggcagcaggagctcgggcagcgcaggggcttgtcaaaaggtcataggctgtttttacacctgatgcaaggacagaaacacacacaaggtctggaggattcctgtgagacagccatacatccctatcacttcaaaataagtgaggacattcttgtttgagagggtagaatggttttgaagaagaaaaaacctgctttctgactgattttgccttgaaggaaaaaagaacctatttttgtgcatcatttaccaatcatgccacacaagcatttatttttagtacattttattttttcataaaattgctaatgccaaagctttgtattaaaagaaataaataataaaataaaaaataaaaagtctgatgctgttcgagtcttattaaccagacctgtgttttgagggctgatttgaagctcgcagacccagattgcatttgtttgtgtttcagagacagaatgtgctcctggctcccgtgagaggaacagggattgacacttactattggtgtcttcacattggctcctacccacatagggcgcaagagcggggacatcctgctggtgatgccgcttaggatggtcagttgatttactcattcttcaagggggacattcactctgtgataatttcttctctgtggttgatcagcctccaccagagctgcagcacc

SEQ ID NO: 320876 - DNA, 1833 bp, Homo sapiens
ggactttgtgttccgctgaccctcctcggggcgcttcctcccgtgccgcccttcccctcccccgccgcgtccttgcgaggcgcctcccattcggtgggaccgacccggggggatggagggggcacgcttctacaaccctcctgggaccccgaagagacgcccgcgtgcgacctgagacgccgccctcgccgagggcccatgggcgcgtccccacaggcgggcagtggacgtgagggcggcgagcggcggggccgcggcgtccaggagggccgcgctcgggctcggccccgcgcaggccgcgcgcgcgcgctcccgccgccgcccgggccgcgcccgccccgcctctaggcgccggccccggagcccggtccgcgagcagcggcggctgccggagggacgatgagctgcgcggggcgggcgggccctgcccggctcgccgcgctagccctgctgacctgcagcctgtggccggcacgggcagacaacgcgagccaggagtactacacagcgctcatcaacgtgacggtgcaggagcccggccgcggcgccccgctcacgtttcgcatcgaccgcgggcgctacgggcttgactcccccaaggccgaggtccgcggccaggtgctggcgccgctgcccctccacggagttgctgatcatctgggctgtgatccacaaacccggttctttgtccctcctaatatcaaacagtggattgccttgctgcagaggggaaactgcacgtttaaagagaaaatatcacgggccgctttccacaatgcagttgctgtagtcatctacaataataaatccaaagaggagccagttaccatgactcatccaggcactggagatattattgctgtcatgataacagaattgaggggtaaggatattttgagttatctggagaaaaacatctctgtacaaatgacaatagctgttggaactcgaatgccaccgaagaacttcagccgtggctctctagtcttcgtgtcaatatcctttattgttttgatgattatttcttcagcatggctcatattctacttcattcagaagatcaggtacacaaatgcacgcgacaggaaccagcgtcgtctcggagatgcagccaagaaagccatcagtaaattgacaaccaggacagtaaagaagggtgacaaggaaactgacccagactttgatcattgtgcagtctgcatagagagctataagcagaatgatgtcgtccgaattctcccctgcaagcatgttttccacaaatcctgcgtggatccctggcttagtgaacattgtacctgtcctatgtgcaaacttaatatattgaaggccctgggaattgtgccgaatttgccatgtactgataacgtagcattcgatatggaaaggctcaccagaacccaagctgttaaccgaagatcagccctcggcgacctcgccggcgacaactcccttggccttgagccacttcgaacttcggggatctcacctcttcctcaggatggggagctcactccgagaacaggagaaatcaacattgcagtaacaaaagaatggtttattattgccagttttggcctcctcagtgccctcacactctgctacatgatcatcagagccacagctagcttgaatgctaatgaggtagaatggttttgaagaagaaaaaacctgctttctgactgattttgccttgaaggaaaaaagaacctatttttgtgcatcatttaccaatcatgccacacaagcatttatttttagtacattttattttttcataaaattgctaatgccaaagctttgtattaaaagaaataaataataaaataaaaa

SEQ ID NO: 320877 - DNA, 1885 bp, Homo sapiens
ggactttgtgttccgctgaccctcctcggggcgcttcctcccgtgccgcccttcccctcccccgccgcgtccttgcgaggcgcctcccattcggtgggaccgacccggggggatggagggggcacgcttctacaaccctcctgggaccccgaagagacgcccgcgtgcgacctgagacgccgccctcgccgagggcccatgggcgcgtccccacaggcgggcagtggacgtgagggcggcgagcggcggggccgcggcgtccaggagggccgcgctcgggctcggccccgcgcaggccgcgcgcgcgcgctcccgccgccgcccgggccgcgcccgccccgcctctaggcgccggccccggagcccggtccgcgagcagcggcggctgccggagggacgatgagctgcgcggggcgggcgggccctgcccggctcgccgcgctagccctgctgacctgcagcctgtggccggcacgggcagacaacgcgagccaggagtactacacagcgctcatcaacgtgacggtgcaggagcccggccgcggcgccccgctcacgtttcgcatcgaccgcgggcgctacgggcttgactcccccaaggccgaggtccgcggccaggtgctggcgccgctgcccctccacggagttgctgatcatctgggctgtgatccacaaacccggttctttgtccctcctaatatcaaacagtggattgccttgctgcagaggggaaactgcacgtttaaagagaaaatatcacgggccgctttccacaatgcagttgctgtagtcatctacaataataaatccaaagaggagccagttaccatgactcatccaggcactggagatattattgctgtcatgataacagaattgaggggtaaggatattttgagttatctggagaaaaacatctctgtacaaatgacaatagctgttggaactcgaatgccaccgaagaacttcagccgtggctctctagtcttcgtgtcaatatcctttattgttttgatgattatttcttcagcatggctcatattctacttcattcagaagatcaggtacacaaatgcacgcgacaggaaccagcgtcgtctcggagatgcagccaagaaagccatcagtaaattgacaaccaggacagtaaagaagggtgacaaggaaactgacccagactttgatcattgtgcagtctgcatagagagctataagcagaatgatgtcgtccgaattctcccctgcaagcatgttttccacaaatcctgcgtggatccctggcttagtgaacattgtacctgtcctatgtgcaaacttaatatattgaaggccctgggaattgtgccgaatttgccatgtactgataacgtagcattcgatatggaaaggctcaccagaacccaagctgttaaccgaagatcagccctcggcgacctcgccggcgacaactcccttggccttgagccacttcgaacttcggggatctcacctcttcctcaggatggggagctcactccgagaacaggagaaatcaacattgcagtaacaaaagaatggtttattattgccagttttggcctcctcagtgccctcacactctgctacatgatcatcagagccacagctagcttgaatgctaatgaggtagaatggttttgaagaagaaaaaacctgctttctgactgattttgccttgaaggaaaaaagaacctatttttgtgcatcatttaccaatcatgccacacaagcatttatttttagtacattttattttttcataaaattgctaatgccaaagctttgtattaaaagaaataaataataaaataaaaacgatgcggcaagttttaaaaattttgtataaacaaaagtgttagactcggta

SEQ ID NO: 320878 - DNA, 1618 bp, Homo sapiens
ggactttgtgttccgctgaccctcctcggggcgcttcctcccgtgccgcccttcccctcccccgccgcgtccttgcgaggcgcctcccattcggtgggaccgacccggggggatggagggggcacgcttctacaaccctcctgggaccccgaagagacgcccgcgtgcgacctgagacgccgccctcgccgagggcccatgggcgcgtccccacaggcgggcagtggacgtgagggcggcgagcggcggggccgcggcgtccaggagggccgcgctcgggctcggccccgcgcaggccgcgcgcgcgcgctcccgccgccgcccgggccgcgcccgccccgcctctaggcgccggccccggagcccggtccgcgagcagcggcggctgccggagggacgatgagctgcgcggggcgggcgggccctgcccggctcgccgcgctagccctgctgacctgcagcctgtggccggcacgggcagacaacgcgagccaggagtactacacagcgctcatcaacgtgacggtgcaggagcccggccgcggcgccccgctcacgtttcgcatcgaccgcgggcgctacgggcttgactcccccaaggccgaggtccgcggccaggtgctggcgccgctgcccctccacggagttgctgatcatctgggctgtgatccacaaacccggttctttgtccctcctaatatcaaacagtggattgccttgctgcagaggggaaactgcacgtttaaagagaaaatatcacgggccgctttccacaatgcagttgctgtagtcatctacaataataaatccaaagaggagccagttaccatgactcatccaggcactggagatattattgctgtcatgataacagaattgaggggtaaggatattttgagttatctggagaaaaacatctctgtacaaatgacaatagctgttggaactcgaatgccaccgaagaacttcagccgtggctctctagtcttcgtgtcaatatcctttattgttttgatgattatttcttcagcatggctcatattctacttcattcagaagatcaggtacacaaatgcacgcgacaggaaccagcgtcgtctcggagatgcagccaagaaagccatcagtaaattgacaaccaggacagtaaagaagggtgacaaggaaactgacccagactttgatcattgtgcagtctgcatagagagctataagcagaatgatgtcgtccgaattctcccctgcaagcatgttttccacaaatcctgcgtggatccctggcttagtgaacattgtacctgtcctatgtgcaaacttaatatattgaaggccctgggaattgtgccgaatttgccatgtactgataacgtagcattcgatatggaaaggctcaccagaacccaagctgttaaccgaagatcagccctcggcgacctcgccggcgacaactcccttggccttgagccacttcgaacttcggggatctcacctcttcctcaggatggggagctcactccgagaacaggagaaatcaacattgcagtaacaaaagaatggtttattattgccagttttgctacctcagggcctatccgctatccaataaagatcctgtaga

SEQ ID NO: 320879 - DNA, 1796 bp, Homo sapiens
ggactttgtgttccgctgaccctcctcggggcgcttcctcccgtgccgcccttcccctcccccgccgcgtccttgcgaggcgcctcccattcggtgggaccgacccggggggatggagggggcacgcttctacaaccctcctgggaccccgaagagacgcccgcgtgcgacctgagacgccgccctcgccgagggcccatgggcgcgtccccacaggcgggcagtggacgtgagggcggcgagcggcggggccgcggcgtccaggagggccgcgctcgggctcggccccgcgcaggccgcgcgcgcgcgctcccgccgccgcccgggccgcgcccgccccgcctctaggcgccggccccggagcccggtccgcgagcagcggcggctgccggagggacgatgagctgcgcggggcgggcgggccctgcccggctcgccgcgctagccctgctgacctgcagcctgtggccggcacgggcagacaacgcgagccaggagtactacacagcgctcatcaacgtgacggtgcaggagcccggccgcggcgccccgctcacgtttcgcatcgaccgcgggcgctacgggcttgactcccccaaggccgaggtccgcggccaggtgctggcgccgctgcccctccacggagttgctgatcatctgggctgtgatccacaaacccggttctttgtccctcctaatatcaaacagtggattgccttgctgcagaggggaaactgcacgtttaaagagaaaatatcacgggccgctttccacaatgcagttgctgtagtcatctacaataataaatccaaagaggagccagttaccatgactcatccaggcactggagatattattgctgtcatgataacagaattgaggggtaaggatattttgagttatctggagaaaaacatctctgtacaaatgacaatagctgttggaactcgaatgccaccgaagaacttcagccgtggctctctagtcttcgtgtcaatatcctttattgttttgatgattatttcttcagcatggctcatattctacttcattcagaagatcaggtacacaaatgcacgcgacaggaaccagcgtcgtctcggagatgcagccaagaaagccatcagtaaattgacaaccaggatggggagctcactccgagaacaggagaaatcaacattgcagtaacaaaagaatggtttattattgccagttttggcctcctcagtgccctcacactctgctacatgatcatcagagccacagctagcttgaatgctaatgaggtagaatggttttgaagaagaaaaaacctgctttctgactgattttgccttgaaggaaaaaagaacctatttttgtgcatcatttaccaatcatgccacacaagcatttatttttagtacattttattttttcataaaattgctaatgccaaagctttgtattaaaagaaataaataataaaataaaaaataaaaagtctgatgctgttcgagtcttattaaccagacctgtgttttgagggctgatttgaagctcgcagacccagattgcatttgtttgtgtttcagagacagaatgtgctcctggctcccgtgagaggaacagggattgacacttactattggtgtcttcacattggctcctacccacatagggcgcaagagcggggacatcctgctggtgatgccgcttaggatggtcagttgatttactcattcttcaagggggacattcactctgtgataatttcttctctgtggttgatcagcctccaccagagctgcagcacc

SEQ ID NO: 320880 - DNA, 1548 bp, Homo sapiens
ggactttgtgttccgctgaccctcctcggggcgcttcctcccgtgccgcccttcccctcccccgccgcgtccttgcgaggcgcctcccattcggtgggaccgacccggggggatggagggggcacgcttctacaaccctcctgggaccccgaagagacgcccgcgtgcgacctgagacgccgccctcgccgagggcccatgggcgcgtccccacaggcgggcagtggacgtgagggcggcgagcggcggggccgcggcgtccaggagggccgcgctcgggctcggccccgcgcaggccgcgcgcgcgcgctcccgccgccgcccgggccgcgcccgccccgcctctaggcgccggccccggagcccggtccgcgagcagcggcggctgccggagggacgatgagctgcgcggggcgggcgggccctgcccggctcgccgcgctagccctgctgacctgcagcctgtggccggcacgggcagacaacgcgagccaggagtactacacagcgctcatcaacgtgacggtgcaggagcccggccgcggcgccccgctcacgtttcgcatcgaccgcgggcgctacgggcttgactcccccaaggccgaggtccgcggccaggtgctggcgccgctgcccctccacggagttgctgatcatctgggctgtgatccacaaacccggttctttgtccctcctaatatcaaacagtggattgccttgctgcagaggggaaactgcacgtttaaagagaaaatatcacgggccgctttccacaatgcagttgctgtagtcatctacaataataaatccaaagaggagccagttaccatgactcatccaggcactggagatattattgctgtcatgataacagaattgaggggtaaggatattttgagttatctggagaaaaacatctctgtacaaatgacaatagctgttggaactcgaatgccaccgaagaacttcagccgtggctctctagtcttcgtgtcaatatcctttattgttttgatgattatttcttcagcatggctcatattctacttcattcagaagatcaggtacacaaatgcacgcgacaggaaccaggtgagctcagtactcaacagtgattggttcgtaacagccagagttcacagtcatctgtcgtgaccatgcatcttactaacatgttttttcttttaaaaaatgttgttaccctcactcagtcattttaatatattggattttgcattcagttgtctcttcttacttggttttatgacatggacgtttctgaaaagtacagatcaattattttgtatttgagtttatccgacgtgttgtgttccttcgtgattagtttcaggttatatgcgttttgtgaaaatgtagatttgcttgcatttgtaagagataatacaaatacaaagatgtctcttatccccttcactcatttctccttgtggtaacaacatgtataactgtggtcagtatcataacctggaaattggcatggatgcaatccactgatcttcctaaatacactgaaatctccccacctct

SEQ ID NO: 320881 - DNA, 411 bp, Homo sapiens
acccaaagtagtcatttttatattctcattcaatggtgtgtgttggggggctggtagagaagaacaggaaagaataagagtttggatttgcccatttttttagctatgtgaaagctgggaattttgatttaattgatcataggccatggtaagggacccttacattgtgggttgtgatgaacataagaagatatgagatttgccagacatagtcaagagaattactttggttccctgagcaactcgtctcatttgataccttacctctgtggtgcataggctatcagttaacattgactcatcttttagtcaccagctctttgaattctattatgagggacctgcagccttgattatcactctttggttcagcatatatataaaaactgctttagaaaattgtgaggcatt

SEQ ID NO: 320882 - DNA, 111 bp, Homo sapiens
gctcagagcctccagaaagaatgcagcctgataacaccttgatttcaatcttgtaaaactcagagcagagaaccagctgagccgcaccgtacccagctgtcttacctacaa

SEQ ID NO: 320883 - DNA, 771 bp, Homo sapiens
cccctgggtaaaagttctaaaagttccatgatatcacaagctggtttgcacaacatcatcaaaacaaagaggattctcttcaggttcgtagccagcttcctaaactgcattcctcttagggggctgttctgcttcttactattggttaggcacttgtgattgctagaaacagattctctgttgagctcacataatgacaggttatttgcaggccacctgtggggaaataatggtgacttggatcacgtgcagtttcacatacaggtgatcttttgtatctgtgtgtttcacatctgtggattcagccatctgtggatcaaaaatatttggctaaaaaatatggatggttgtgtctatactgaacatatacagactttttttagttgttattccccaaacaatagagtataaccactatttacatagcatttatatcgtattaggtattataagtaatctagagatgatttaaagtatatgagaggatgtgtataggctgtatgcatttactagaatattttatataaaagatttgaatatctgcgggggattctggaaccagttcctctgtggataccaagggacacctgtttagggggaccttaatgtgattatgcctgttagggatgggaactggattcagagaagctctagaaaactcagcagccagagcttgtacatctttccattagcattgcgccatttatttaactgagctactttgtctctctgcgtatctttttttttttctttgagatggagttttgctct

SEQ ID NO: 320884 - DNA, 459 bp, Homo sapiens
ttagtagtttccaaaagcctcccatgtaaatgtcatgctctcccctcttcctcactctcccgttttcttgagaaacagccatgttttcgttcattgctaagtgacagatgcctgtccagatttagttgccttcccgcttccatagagatgcaaatgtgatcactgattaaggcaacctggatctcgaacctctctacaacgcgaaggactgagctaaaaataaaggtatgggttcaattccactttcagatctgcgttcaaggctagttgatgtgtacagctccaagccaggttcccagttgtaagttattatataccatgtaccacggttttagggcaattcagatgaaatcatctcttatccccctacctccttctctgtcaccaataccctgccagaaaaactacactatccagtaagctttgttattgcaatactttcaaagcaactacaaaatc

SEQ ID NO: 320885 - DNA, 2057 bp, Homo sapiens
ctctggctggacgccgccgccgccgctgccaccgcctctgatccaagccacctcccgccagagaggtgtcatgggcttccaaaagttctcccccttcctggctctcagcatcttggtcctgttgcaggcaggcagcctccatgcagcaccattcaggtctgccctggagagcagcccagcagacccggccacgctcagtgaggacgaagcgcgcctcctgctggctgcactggtgcaggactatgtgcagatgaaggccagtgagctggagcaggagcaagagagagagggctccagcctggacagccccagatctaagcggtgcggtaatctgagtacttgcatgctgggcacatacacgcaggacttcaacaagtttcacacgttcccccaaactgcaattggggttggagcacctggaaagaaaagggatatgtccagcgacttggagagagaccatcgccctcatgttagcatgccccagaatgccaactaaactcctccctttccttcctaatttcccttcttgcatccttcctataacttgatgcatgtggtttggttcctctctggtggctctttgggctggtattggtggctttccttgtggcagaggatgtctcaaacttcagatgggaggaaagagagcaggactcacaggttggaagagaatcacctgggaaaataccagaaaatgagggccgctttgagtcccccagagatgtcatcagagctcctctgtcctgcttctgaatgtgctgatcatttgaggaataaaattatttttccccaaagatctgagctgtggtggtcattgctctgatctatgtcccaggcttcatagtgtctaagacctatgcttagaaatagccttaaccctaggctagctggacagaggatatggtgggtggtccctttgaccaagctcaagcaggaagaacaggggtcctaaggagcaggtaagcacctctaggacttgatgctgcaaactccgctcctcttccaggtaagactgaggaattttttattttcctaagaaagggtatttggtgcccgtgactggggtgtagattttatagtcctttgtgaatggggctgggtgtgggaccataattcactccagtgtcataaacctccgctttgatttttagttaatttatacaggaaagattggctgttactgctccacattccatagccagtcatccagagtcaccttgggttttctgacacccctgggaatatctatggggagtgatcatggcattttccctaatggccttgtgattttctgctctgataattgtgtttaggagaaacacttaaagttaattggtgcctttcagcacagcaactttaccatgaaggtcccatggggctgacctctctcccagcctctcactcacagatcttctcttctttctccatcctgcaaatcagaatcattgcccagaagagagcctgtgacactgccacctgtgtgactcatcggctggcaggcttgctgagcagatcagggggtgtggtgaagaacaactttgtgcccaccaatgtgggttccaaagcctttggcaggcgccgcagggaccttcaagcctgagcagctgaatgactcaagaaggtcacaataaagctgaactccttttaatgtgtaatgaaagcaatttgtaggaaaggctccatggaagacatacatataggcatccttcttgatactgaaaactatcttctttgtttgaaaggaactattgctaaatgcagaacaagctcattgcagttacctattgtgcatctttttaaatacttgattatgtaaccataaatctgacagcatgtctcattggcttatctggtagcaaatctaggccccgtcagccaccctattgacattggtggctctgctaaacctcagggggacatgaaatcactgcctcttgggcatctggggacacatggtaatgctgtgccttgacagaagtatttgtttaaagaaatgtcaatgctgtcatttgtgaactctatcaaaattaaaaatgtattttctatacccttcaatg

SEQ ID NO: 320886 - DNA, 2081 bp, Homo sapiens
ctctggctggacgccgccgccgccgctgccaccgcctctgatccaagccacctcccgccaggtgagccccgagattctggctcagagaggtgtcatgggcttccaaaagttctcccccttcctggctctcagcatcttggtcctgttgcaggcaggcagcctccatgcagcaccattcaggtctgccctggagagcagcccagcagacccggccacgctcagtgaggacgaagcgcgcctcctgctggctgcactggtgcaggactatgtgcagatgaaggccagtgagctggagcaggagcaagagagagagggctccagcctggacagccccagatctaagcggtgcggtaatctgagtacttgcatgctgggcacatacacgcaggacttcaacaagtttcacacgttcccccaaactgcaattggggttggagcacctggaaagaaaagggatatgtccagcgacttggagagagaccatcgccctcatgttagcatgccccagaatgccaactaaactcctccctttccttcctaatttcccttcttgcatccttcctataacttgatgcatgtggtttggttcctctctggtggctctttgggctggtattggtggctttccttgtggcagaggatgtctcaaacttcagatgggaggaaagagagcaggactcacaggttggaagagaatcacctgggaaaataccagaaaatgagggccgctttgagtcccccagagatgtcatcagagctcctctgtcctgcttctgaatgtgctgatcatttgaggaataaaattatttttccccaaagatctgagctgtggtggtcattgctctgatctatgtcccaggcttcatagtgtctaagacctatgcttagaaatagccttaaccctaggctagctggacagaggatatggtgggtggtccctttgaccaagctcaagcaggaagaacaggggtcctaaggagcaggtaagcacctctaggacttgatgctgcaaactccgctcctcttccaggtaagactgaggaattttttattttcctaagaaagggtatttggtgcccgtgactggggtgtagattttatagtcctttgtgaatggggctgggtgtgggaccataattcactccagtgtcataaacctccgctttgatttttagttaatttatacaggaaagattggctgttactgctccacattccatagccagtcatccagagtcaccttgggttttctgacacccctgggaatatctatggggagtgatcatggcattttccctaatggccttgtgattttctgctctgataattgtgtttaggagaaacacttaaagttaattggtgcctttcagcacagcaactttaccatgaaggtcccatggggctgacctctctcccagcctctcactcacagatcttctcttctttctccatcctgcaaatcagaatcattgcccagaagagagcctgtgacactgccacctgtgtgactcatcggctggcaggcttgctgagcagatcagggggtgtggtgaagaacaactttgtgcccaccaatgtgggttccaaagcctttggcaggcgccgcagggaccttcaagcctgagcagctgaatgactcaagaaggtcacaataaagctgaactccttttaatgtgtaatgaaagcaatttgtaggaaaggctccatggaagacatacatataggcatccttcttgatactgaaaactatcttctttgtttgaaaggaactattgctaaatgcagaacaagctcattgcagttacctattgtgcatctttttaaatacttgattatgtaaccataaatctgacagcatgtctcattggcttatctggtagcaaatctaggccccgtcagccaccctattgacattggtggctctgctaaacctcagggggacatgaaatcactgcctcttgggcatctggggacacatggtaatgctgtgccttgacagaagtatttgtttaaagaaatgtcaatgctgtcatttgtgaactctatcaaaattaaaaatgtattttctatacccttcaatg

SEQ ID NO: 320887 - DNA, 1743 bp, Homo sapiens
ctctagagcggccgcctactactactaaattcgcggccgcgtcgacgcaggacttcaacaagtttcacacgttcccccaaactgcaattggggttggagcacctggaaagaaaagggatatgtccagcgacttggagagagaccatcgccctcatgttagcatgccccagaatgccaactaaactcctccctttccttcctaatttcccttcttgcatccttcctataacttgatgcatgtggtttggttcctctctggtggctctttgggctggtattggtggctttccttgtggcagaggatgtctcaaacttcagatgggaggaaagagagcaggactcacaggttggaagagaatcacctgggaaaataccagaaaatgagggccgctttgagtcccccagagatgtcatcagagctcctctgtcctgcttctgaatgtgctgatcatttgaggaataaaattatttttccccaaagatctgagctgtggtggtcattgctctgatctatgtcccaggcttcatagtgtctaagacctatgcttagaaatagccttaaccctaggctagctggacagaggatatggtgggtggtccctttgaccaagctcaagcaggaagaacaggggtcctaaggagcaggtaagcacctctaggacttgatgctgcaaactccgctcctcttccaggtaagactgaggaattttttattttcctaagaaagggtatttggtgcccgtgactggggtgtagattttatagtcctttgtgaatggggctgggtgtgggaccataattcactccagtgtcataaacctccgctttgatttttagttaatttatacaggaaagattggctgttactgctccacattccatagccagtcatccagagtcaccttgggttttctgacacccctgggaatatctatggggagtgatcatggcattttccctaatggccttgtgattttctgctctgataattgtgtttaggagaaacacttaaagttaattggtgcctttcagcacagcaactttaccatgaaggtcccatggggctgacctctctcccagcctctcactcacagatcttctcttctttctccatcctgcaaatcagaatcattgcccagaagagagcctgtgacactgccacctgtgtgactcatcggctggcaggcttgctgagcagatcagggggtgtggtgaagaacaactttgtgcccaccaatgtgggttccaaagcctttggcaggcgccgcagggaccttcaagcctgagcagctgaatgactcaagaaggtcacaataaagctgaactccttttaatgtgtaatgaaagcaatttgtaggaaaggctccatggaagacatacatataggcatccttcttgatactgaaaactatcttctttgtttgaaaggaactattgctaaatgcagaacaagctcattgcagttacctattgtgcatctttttaaatacttgattatgtaaccataaatctgacagcatgtctcattggcttatctggtagcaaatctaggccccgtcagccaccctattgacattggtggctctgctaaacctcagggggacatgaaatcactgcctcttgggcatctggggacacatggtaatgctgtgccttgacagaagtatttgtttaaagaaatgtcaatgctgtcatttgtgaactctatcaaaattaaaaatgtattttctatacccttcaatg

SEQ ID NO: 320888 - DNA, 1638 bp, Homo sapiens
ctctagagcggccgcctactactactaaattcgcggccgcgtcgcctcatgttagcatgccccagaatgccaactaaactcctccctttccttcctaatttcccttcttgcatccttcctataacttgatgcatgtggtttggttcctctctggtggctctttgggctggtattggtggctttccttgtggcagaggatgtctcaaacttcagatgggaggaaagagagcaggactcacaggttggaagagaatcacctgggaaaataccagaaaatgagggccgctttgagtcccccagagatgtcatcagagctcctctgtcctgcttctgaatgtgctgatcatttgaggaataaaattatttttccccaaagatctgagctgtggtggtcattgctctgatctatgtcccaggcttcatagtgtctaagacctatgcttagaaatagccttaaccctaggctagctggacagaggatatggtgggtggtccctttgaccaagctcaagcaggaagaacaggggtcctaaggagcaggtaagcacctctaggacttgatgctgcaaactccgctcctcttccaggtaagactgaggaattttttattttcctaagaaagggtatttggtgcccgtgactggggtgtagattttatagtcctttgtgaatggggctgggtgtgggaccataattcactccagtgtcataaacctccgctttgatttttagttaatttatacaggaaagattggctgttactgctccacattccatagccagtcatccagagtcaccttgggttttctgacacccctgggaatatctatggggagtgatcatggcattttccctaatggccttgtgattttctgctctgataattgtgtttaggagaaacacttaaagttaattggtgcctttcagcacagcaactttaccatgaaggtcccatggggctgacctctctcccagcctctcactcacagatcttctcttctttctccatcctgcaaatcagaatcattgcccagaagagagcctgtgacactgccacctgtgtgactcatcggctggcaggcttgctgagcagatcagggggtgtggtgaagaacaactttgtgcccaccaatgtgggttccaaagcctttggcaggcgccgcagggaccttcaagcctgagcagctgaatgactcaagaaggtcacaataaagctgaactccttttaatgtgtaatgaaagcaatttgtaggaaaggctccatggaagacatacatataggcatccttcttgatactgaaaactatcttctttgtttgaaaggaactattgctaaatgcagaacaagctcattgcagttacctattgtgcatctttttaaatacttgattatgtaaccataaatctgacagcatgtctcattggcttatctggtagcaaatctaggccccgtcagccaccctattgacattggtggctctgctaaacctcagggggacatgaaatcactgcctcttgggcatctggggacacatggtaatgctgtgccttgacagaagtatttgtttaaagaaatgtcaatgctgtcatttgtgaactctatcaaaattaaaaatgtattttctatacccttcaatg

SEQ ID NO: 320889 - DNA, 774 bp, Homo sapiens
ctctagagcggccgcctactactactaaattcgcggccgcgtcgccggccacgctcagtgaggacgaagcgcgcctcctgctggctgcactggtgcaggactatgtgcagatgaaggccagtgagctggagcaggagcaagagagagagggctccagaatcattgcccagaagagagcctgtgacactgccacctgtgtgactcatcggctggcaggcttgctgagcagatcagggggtgtggtgaagaacaactttgtgcccaccaatgtgggttccaaagcctttggcaggcgccgcagggaccttcaagcctgagcagctgaatgactcaagaaggtcacaataaagctgaactccttttaatgtgtaatgaaagcaatttgtaggaaaggctccatggaagacatacatataggcatccttcttgatactgaaaactatcttctttgtttgaaaggaactattgctaaatgcagaacaagctcattgcagttacctattgtgcatctttttaaatacttgattatgtaaccataaatctgacagcatgtctcattggcttatctggtagcaaatctaggccccgtcagccaccctattgacattggtggctctgctaaacctcagggggacatgaaatcactgcctcttgggcatctggggacacatggtaatgctgtgccttgacagaagtatttgtttaaagaaatgtcaatgctgtcatttgtgaactctatcaaaattaaaaatgtattttctatacccttcaatg

SEQ ID NO: 320890 - DNA, 1080 bp, Homo sapiens
ctctggctggacgccgccgccgccgctgccaccgcctctgatccaagccacctcccgccagagaggtgtcatgggcttccaaaagttctcccccttcctggctctcagcatcttggtcctgttgcaggcaggcagcctccatgcagcaccattcaggtctgccctggagagcagcccagcagacccggccacgctcagtgaggacgaagcgcgcctcctgctggctgcactggtgcaggactatgtgcagatgaaggccagtgagctggagcaggagcaagagagagagggctccagcctggacagccccagatctaagcggtgcggtaatctgagtacttgcatgctgggcacatacacgcaggacttcaacaagtttcacacgttcccccaaactgcaattggggttggagcacctggaaagaaaagggatatgtccagcgacttggagagagaccatcgcaatcattgcccagaagagagcctgtgacactgccacctgtgtgactcatcggctggcaggcttgctgagcagatcagggggtgtggtgaagaacaactttgtgcccaccaatgtgggttccaaagcctttggcaggcgccgcagggaccttcaagcctgagcagctgaatgactcaagaaggtcacaataaagctgaactccttttaatgtgtaatgaaagcaatttgtaggaaaggctccatggaagacatacatataggcatccttcttgatactgaaaactatcttctttgtttgaaaggaactattgctaaatgcagaacaagctcattgcagttacctattgtgcatctttttaaatacttgattatgtaaccataaatctgacagcatgtctcattggcttatctggtagcaaatctaggccccgtcagccaccctattgacattggtggctctgctaaacctcagggggacatgaaatcactgcctcttgggcatctggggacacatggtaatgctgtgccttgacagaagtatttgtttaaagaaatgtcaatgctgtcatttgtgaactctatcaaaattaaaaatgtattttctatacccttcaatg

SEQ ID NO: 320891 - DNA, 1917 bp, Homo sapiens
ctctagagcggccgcctactactactaaattcgcggccgcgtcgccggccacgctcagtgaggacgaagcgcgcctcctgctggctgcactggtgcaggactatgtgcagatgaaggccagtgagctggagcaggagcaagagagagagggctccagcctggacagccccagatctaagcggtgcggtaatctgagtacttgcatgctgggcacatacacgcaggacttcaacaagtttcacacgttcccccaaactgcaattggggttggagcacctggaaagaaaagggatatgtccagcgacttggagagagaccatcgccctcatgttagcatgccccagaatgccaactaaactcctccctttccttcctaatttcccttcttgcatccttcctataacttgatgcatgtggtttggttcctctctggtggctctttgggctggtattggtggctttccttgtggcagaggatgtctcaaacttcagatgggaggaaagagagcaggactcacaggttggaagagaatcacctgggaaaataccagaaaatgagggccgctttgagtcccccagagatgtcatcagagctcctctgtcctgcttctgaatgtgctgatcatttgaggaataaaattatttttccccaaagatctgagctgtggtggtcattgctctgatctatgtcccaggcttcatagtgtctaagacctatgcttagaaatagccttaaccctaggctagctggacagaggatatggtgggtggtccctttgaccaagctcaagcaggaagaacaggggtcctaaggagcaggtaagcacctctaggacttgatgctgcaaactccgctcctcttccaggtaagactgaggaattttttattttcctaagaaagggtatttggtgcccgtgactggggtgtagattttatagtcctttgtgaatggggctgggtgtgggaccataattcactccagtgtcataaacctccgctttgatttttagttaatttatacaggaaagattggctgttactgctccacattccatagccagtcatccagagtcaccttgggttttctgacacccctgggaatatctatggggagtgatcatggcattttccctaatggccttgtgattttctgctctgataattgtgtttaggagaaacacttaaagttaattggtgcctttcagcacagcaactttaccatgaaggtcccatggggctgacctctctcccagcctctcactcacagatcttctcttctttctccatcctgcaaatcagaatcattgcccagaagagagcctgtgacactgccacctgtgtgactcatcggctggcaggcttgctgagcagatcagggggtgtggtgaagaacaactttgtgcccaccaatgtgggttccaaagcctttggcaggcgccgcagggaccttcaagcctgagcagctgaatgactcaagaaggtcacaataaagctgaactccttttaatgtgtaatgaaagcaatttgtaggaaaggctccatggaagacatacatataggcatccttcttgatactgaaaactatcttctttgtttgaaaggaactattgctaaatgcagaacaagctcattgcagttacctattgtgcatctttttaaatacttgattatgtaaccataaatctgacagcatgtctcattggcttatctggtagcaaatctaggccccgtcagccaccctattgacattggtggctctgctaaacctcagggggacatgaaatcactgcctcttgggcatctggggacacatggtaatgctgtgccttgacagaagtatttgtttaaagaaatgtcaatgctgtcatttgtgaactctatcaaaattaaaaatgtattttctatacccttcaatg

SEQ ID NO: 320892 - DNA, 238 bp, Homo sapiens
accacaatggaataaaatgagagatcaataacaagaggaacttttagaactatacaaatatatggaaattaagtaacatgcttctgaacaaccaatgggtcaattaagaaattaaaaaagggctgggcgcggtggctcatgcctgtaatcccagcactttgggaggctgaggcaggcagatcacgaggtcaggagatcgagaccatcctggctaacacagtgaaaccctgtctctact

SEQ ID NO: 320893 - DNA, 505 bp, Homo sapiens
tgttacatacacaagaatgcatttctaactaacatatcatgttacttagaagtgtgaggtagcaacagaagaagctgctaagagaattgaaaatgattatctttgagagtgggatgagaggctgtggggtggaggtaagacagtaaacagctgttttaattccaagtattctctgacattttaacaatttatacatgcattcctttaattgaaatccttttcaatcatgctcagtgtcagtttgggtcttctaagaagcagatggcaagatagtactagccatgtgagagatttgtgggggagatgtgaaagatgatgaagaagggagcaggagtaggtggggagagcttttaaactatgatgctagtctgaacatgtgaaaggagagagaaggaaggagggttggatagaaagaggtgcaggctgaagcatggtgctgagaaagtttcagccaggccaaatgttattcattagaggaatcccctgttggacaggattgggctgg

SEQ ID NO: 320894 - DNA, 489 bp, Homo sapiens
gatctcaaactcctgacctcagatgatccgcccacctcgacctcccaaagtgctgggattacaggcgtgagccaccactcctggcaagaggcttttaaagaggctttactgttagataggggacccgaagtttgttccttcgtgaaagagcaacatttgatttatcccacatactatgatttctctacatccaataaaaactattactatgttaaatctgaacaaataaagcagaaatatgaggattccatgttaacccttttgacttagctttatttacattgtgatgaaaaacaatctttttgaagaatttgatgatgtcaacatatacgcatttgatagaaaggttaactagtatcaaaattcacaaaattctaattcataaaatttaaccatgtacaaattccccttatcccaaaataaatatttttcaaagtcctgtttctaaatatatcttgttacattcatgtgaacaagaaacaagcaaac

SEQ ID NO: 320895 - DNA, 932 bp, Homo sapiens
aagaaagaaaaaaatgtacattaaaaaataatggagataggtcagtgaaaaatgtgtctaaaaggggaagttatcagagattttaatactgtttttttaaaaactttctacagatgaaatcaatctcctcaaccccgtgcaatcttgtaacaggtaaacctcttgccctacttttgtatacagattctggaacacgtgtacaaaatatatttaaaaaatacttatacaatgtacacacaaaacatctgtataaaaatatgggactgccatatgaatcaactcactacatttcctttgaaagagacatccatctatcatttctgagaaacagtcttctccaaatcaactgtatcaccagtttaacctaaaacaactgaacatttccaaaaacaaaaacccaccaatggagtgtgtgtgtgtgtacaatctacaagctctaaggagccttttattttcttttggtgttacttaagataaaaagttctggccgggcacagtggctcaggcctataatcccagcactttggcaagaggcttttaaagaggctttactgttagataggggacccgaagtttgttccttcgtgaaagagcaacatttgatttatcccacatactatgatttctctacatccaataaaaactattactatgttaaatctgaacaaataaagcagaaatatgaggattccatgttaacccttttgacttagctttatttacattgtgatgaaaaacaatctttttgaagaatttgatgatgtcaacatatacgcatttgatagaaaggttaactagtatcaaaattcacaaaattctaattcataaaatttaaccatgtacaaattccccttatcccaaaataaatatttttcaaagtcctgtttctaaatatatcttgttacattcatgtgaacaagaaacaagcaaac

SEQ ID NO: 320896 - DNA, 436 bp, Homo sapiens
gaaaccaggaagaatacattatatcagcctaaaagggaattcatttaaaaagaggagttcagaatatacatgtctttacaatttacactaacccatactgtttcacagtaataatatttttaaaaattaagtggaattttctctttttcttttcagtttcttctttcagtggtgggcggggggcatgggagcctcccttctacctctaagaattcctttgtgagcttgagtatgagaataaaagtaagtactgcttttgaaagggcattttaaaatttaatttgtcttacatttatatggtgattttgtaagtaaaaggaagaagatatcttgaaataataatagctttttgtgccaacatgaattttggctcaagagattcaattttccaagtgttgatcttgcattaaaagtgaaataaaaacaatttaggagt

SEQ ID NO: 320897 - DNA, 331 bp, Homo sapiens
ccatgatgggacccaccgtcccacagacaaagggttcttgcgaagccacgactaatttagtgcaaaccgaaataaatatcggcccacagagatcctttacagaacggtttgccttcatttcttctttcagtggtgggcggggggcatgggagcctcccttctacctctaagaattcctttgtgagcttgagtatgagaataaaatcatgtctacattgttacatcgcatccagactcttcttcctagaccgcaattttctctgtactgaacacaaatcactaacttttatagagctctaaaactttttccagtatcgtcaaagtcatcagg

SEQ ID NO: 320898 - DNA, 487 bp, Homo sapiens
ctcttatctatttctatttatcttttagtaaagaaaaacaatatattctgtatctatttttcttttagtgaaactatcatgtcatatactttcccactaaacatgggcttcttcattgctttgtcttttcccttcacttctataatcatattttctttcaaaatgtcttatattcatcatttcttctttatctcctttgcaatcaactaccaaaatgcagatcctcataattctagtttagactgttacaaatgcttcctctgttaatgatagatttttttctctcagatccgcactgcttaatgctgcctgtttacacctttattaaacaacactttcctcatgtcattctgtttacagtcatgtctacattgttacatcgcatccagactcttcttcctagaccgcaattttctctgtactgaacacaaatcactaacttttatagagctctaaaactttttccagtatcgtcaaagtcatcagg

SEQ ID NO: 320899 - DNA, 1965 bp, Homo sapiens
  misc_feature (1469)..(1469): n is a, c, g, or t
gacttccggcgcactgatcccgcctggggccggctgagtggcacttaagcgggccatgccatgcaaccttgggcgctgccaaccgtgggcgagctctgggtgtgcgggcggcctggcgcggcgctccgctgtgtcagcgtgttatgatgccgtcccgtaccaacctggctactggaatccccagtagtaaagtgaaatattcaaggctctccagcacagacgatggctacattgaccttcagtttaagaaaacccctcctaagatcccttataaggccatcgcacttgccactgtgctgtttttgattggcgcctttctcattattataggctccctcctgctgtcaggctacatcagcaaagggggggcagaccgggccgttccagtgctgatcattggcattctggtgttcctacccggattttaccacctgcgcatcgcttactatgcatccaaaggctaccgtggttactcctatgatgacattccagactttgatgactagcacccaccccatagctgaggaggagtcacagtggaactgtcccagctttaagatatctagcagaaactatagctgaggactaaggaattctgcagcttgcagatgtttaagaaaataatggccagattttttgggtccttcccaaagatgttaagtgaacctacagttagctaattaggacaagctctatttttcatccctgggccctgacaagtttttccacaggaatatgtatcatggaagaatagaggttattctgtaatggaaaagtgttgcctgccaccaccctctgtagagctgagcatttcttttaaatagtcttcattgccaatttgttcttgtagcaaatggaacaatgtggtatggctaatttcttattattaagtagtttattttaaaaatatctgagtatattatcctgtacacttatccctaccttcatgttccagtggaagaccttagtaaaatcaaagatcagtgagttcatctgtaatattttttttacttgctttcttactgacagcaaccaggaatttttttatcctgcagagcaagttttcaaaatgtaaatacttcctctgtttaacagtccttggaccattctgatccagttcaccagtaggttggacagcatataatttgcatcattttgtcccttgtaaatcaagatgttctgcagattattcctttaacggccggacttttggctgtttcctaatgaaacatgtagtggttattatttagagtttatagccgtattgctagcaccttgtagtatgtcatcattctgctcatgattccaaggatcagcctggatgcctagaggactagatcaccttagtttgattctattttttagcttgcaaaaagtgacttatattccaaagaaattaaaatgttgaaatccaaatcctagaaataaaatgagttaacttcaaacatttcagaaaacaaaaaaaagantttatgatatctttaatcccagtacctagatctaccttagtttctaggtagctggcattgtgggtcacactcaactttccctaactctgaggtttatggacttgggcaactggaagcctggacatgccatcagctgagttgcaaggctgtgggaagagcaagttttagatgtctactcaatatccaagtggagctgttgaggaggcagttgcgatgcatgtgtgtgtctagagtttaagagtgggtcttggatggaaatagaaatttgggagtcagcatttggacagtatcttaaaagctagagggctgtttgagatcaccagtagagtgagtatagttggaggaaaaaaaaaaaactcaggaagtgagggacaaagagagggtgacctgaagcagcctccaagattagggacttttggtaatgggaatgttgactggggagtccagtaatctagagtgcctgagccttgacagtgaatatgtgaggtgatacata

SEQ ID NO: 320900 - DNA, 274 bp, Homo sapiens
tgtccagtgttcgagatcaggcattagagcctgtgtacattttaaacatctcacaacttatgctccctcctgctgtcaggctacatcagcaaaggggtaagctgacgggcatgtgggaataagttgtgagatttttaaaatgttagccaaggctctagtgtgcgtgtgtgtgtgtgtgtgtgtgtgtgtgtgtgtgtgtgtgtgtttgtccgtcccagtggtctgttttttttgagacagggtcttgctctgtcatccaagctagagtgcagtg

SEQ ID NO: 320901 - DNA, 1772 bp, Homo sapiens
  misc_feature (1497)..(1497): n is a, c, g, or t
gacttccggcgcactgatcccgcctggggccggctgagtggcacttaagcgggccatgccatgcaaccttgggcgctgccaaccgtgggcgagctctgggtgtgcgggcggcctggcgcggcgctccgctgtgtcagcgtgttatgatgccgtcccgtaccaacctggctactggaatccccagtagtaaagtgaaatattcaaggctctccagcacagacgatggctacattgaccttcagtttaagaaaacccctcctaagatcccttataaggccatcgcacttgccactgtgctgtttttgattggcgcctttctcattattataggctccctcctgctgtcaggctacatcagcaaagggggggcagaccgggccgttccagtgctgatcattggcattctggtgttcctacccggattttaccacctgcgcatcgcttactatgcatccaaaggctaccgtggttactcctatgatgacattccagactttgatgactagcacccaccccatagctgaggaggagtcacagtggaactgtcccagctttaagatatctagcagaaactatagctgaggactaaggaattctgcagcttgcagatgtttaagaaaataatggccagattttttgggtccttcccaaagatgttaagtgaacctacagttagctaattaggacaagctctatttttcatccctgggccctgacaagtttttccacaggaatatgtatcatggaagaatagaggttattctgtaatggaaaagtgttgcctgccaccaccctctgtagagctgagcatttcttttaaatagtcttcattgccaatttgttcttgtagcaaatggaacaatgtggtatggctaatttcttattattaagtagtttattttaaaaatatctgagtatattatcctgtacacttatccctaccttcatgttccagtggaagaccttagtaaaatcaaagatcagtgagttcatctgtaatattttttttacttgctttcttactgacagcaaccaggaatttttttatcctgcagagcaagttttcaaaatgtaaatacttcctctgtttaacagtccttggaccattctgatccagttcaccagtaggttggacagcatataatttgcatcattttgtcccttgtaaatcaagatgttctgcagattattcctttaacggccggacttttggctgtttcctaatgaaacatgtagtggttattatttagagtttatagccgtattgctagcaccttgtagtatgtcatcattctgctcatgattccaaggatcagcctggatgcctagaggactagatcaccttagtttgattctattttttagcttgcaaaaagtgacttatattccaaagaaattaaaatgttgaaatccaaatcctagaaataaaatgagttaacttcaaaaaaaaaaaagaaaaaaaaaaaaaaaaaaaaaaaaaaaaaaaacaaaaaaaanaaaaaaaaaaaaaaaaaaaaaaaaacagagacaaaaaaagaagggggggggcggaggagcataaatacacccgggggggcggcacacgagcagacacaaaaaaaatgaaaaaaagagaaggcacaaagaaagaagagaaaaaaaaacagaacacacgacgcggagcaaaaagaaacaacaaaagaaaagaggaaaaaaaaagacaaaggaacaaaaaaggagacgaaccaacgaaaaagaagagagagaagaagcaggggcaaaaaaaacaagaa

SEQ ID NO: 320902 - DNA, 2118 bp, Homo sapiens
  misc_feature (1468)..(1468): n is a, c, g, or t
gacttccggcgcactgatcccgcctggggccggctgagtggcacttaagcgggccatgccatgcaaccttgggcgctgccaaccgtgggcgagctctgggtgtgcgggcggcctggcgcggcgctccgctgtgtcagcgtgttatgatgccgtcccgtaccaacctggctactggaatccccagtagtaaagtgaaatattcaaggctctccagcacagacgatggctacattgaccttcagtttaagaaaacccctcctaagatcccttataaggccatcgcacttgccactgtgctgtttttgattggcgcctttctcattattataggctccctcctgctgtcaggctacatcagcaaagggggggcagaccgggccgttccagtgctgatcattggcattctggtgttcctacccggattttaccacctgcgcatcgcttactatgcatccaaaggctaccgtggttactcctatgatgacattccagactttgatgactagcacccaccccatagctgaggaggagtcacagtggaactgtcccagctttaagatatctagcagaaactatagctgaggactaaggaattctgcagcttgcagatgtttaagaaaataatggccagattttttgggtccttcccaaagatgttaagtgaacctacagttagctaattaggacaagctctatttttcatccctgggccctgacaagtttttccacaggaatatgtatcatggaagaatagaggttattctgtaatggaaaagtgttgcctgccaccaccctctgtagagctgagcatttcttttaaatagtcttcattgccaatttgttcttgtagcaaatggaacaatgtggtatggctaatttcttattattaagtagtttattttaaaaatatctgagtatattatcctgtacacttatccctaccttcatgttccagtggaagaccttagtaaaatcaaagatcagtgagttcatctgtaatattttttttacttgctttcttactgacagcaaccaggaatttttttatcctgcagagcaagttttcaaaatgtaaatacttcctctgtttaacagtccttggaccattctgatccagttcaccagtaggttggacagcatataatttgcatcattttgtcccttgtaaatcaagatgttctgcagattattcctttaacggccggacttttggctgtttcctaatgaaacatgtagtggttattatttagagtttatagccgtattgctagcaccttgtagtatgtcatcattctgctcatgattccaaggatcagcctggatgcctagaggactagatcaccttagtttgattctattttttagcttgcaaaaagtgacttatattccaaagaaattaaaatgttgaaatccaaaaaaaaaaaagaaaaaaaaaaaaaaaaaaaaaaaaaaaaaaaacaaaaaaaanaaaaaaaaaaaaaaaaaaaaaaaaagggggggggcccccatccccccgcggggggcccccccccgcccccccgtcttcttctaacaaaaagggggccccctaatgagatgcggagcgatcttatctatataacgcagcagcagaccgcgcgcggccgtgactaacaacagactgcatccgccggggaaaaaagccgccgcaacgcggcgcacctctgcctgacgaagagcgaacacacaatctcttcggacgggaggacaacactacgtgacgagccacaaaccacctccgcagaactcttatacttcagccccgctccccgggagcgatcacactaatacaaccatctgtcccaaggccgcgcgtcctgataggcgcgcggcaaaccccgcccgccgcccatacgagccccgccgcgtcgcacgagcaacccaactcgcgccccaccccctcgcgaccgcgctcccctgacgcacaaccctcctctctcccccccgggggcgtcctccgaacaccaagggcgcgccccccgcccgctcgccagatacgacctcaccgctagccgcactctaatcccgcacccgcaacaaccgcagcgccgctcgcaccgcccgcaccaccacacccactagcgcaccgccgcaccccca

SEQ ID NO: 320903 - DNA, 1551 bp, Homo sapiens
gacttccggcgcactgatcccgcctggggccggctgagtggcacttaagcgggccatgccatgcaaccttgggcgctgccaaccgtgggcgagctctgggtgtgcgggcggcctggcgcggcgctccgatggagtctagttctgtcgcccaggctggagcccagtggtgtgatctcagctcactgcaatctccacctcctggcttcaagcgattcttctgcttcagcctcccgactgtgtcagcgtgttatgatgccgtcccgtaccaacctggctactggaatccccagtagtaaagtgaaatattcaaggctctccagcacagacgatggctacattgaccttcagtttaagaaaacccctcctaagatcccttataaggccatcgcacttgccactgtgctgtttttgattggcgcctttctcattattataggctccctcctgctgtcaggctacatcagcaaagggggggcagaccgggccgttccagtgctgatcattggcattctggtgttcctacccggattttaccacctgcgcatcgcttactatgcatccaaaggctaccgtggttactcctatgatgacattccagactttgatgactagcacccaccccatagctgaggaggagtcacagtggaactgtcccagctttaagatatctagcagaaactatagctgaggactaaggaattctgcagcttgcagatgtttaagaaaataatggccagattttttgggtccttcccaaagatgttaagtgaacctacagttagctaattaggacaagctctatttttcatccctgggccctgacaagtttttccacaggaatatgtatcatggaagaatagaggttattctgtaatggaaaagtgttgcctgccaccaccctctgtagagctgagcatttcttttaaatagtcttcattgccaatttgttcttgtagcaaatggaacaatgtggtatggctaatttcttattattaagtagtttattttaaaaatatctgagtatattatcctgtacacttatccctaccttcatgttccagtggaagaccttagtaaaatcaaagatcagtgagttcatctgtaatattttttttacttgctttcttactgacagcaaccaggaatttttttatcctgcagagcaagttttcaaaatgtaaatacttcctctgtttaacagtccttggaccattctgatccagttcaccagtaggttggacagcatataatttgcatcattttgtcccttgtaaatcaagatgttctgcagattattcctttaacggccggacttttggctgtttcctaatgaaacatgtagtggttattatttagagtttatagccgtattgctagcaccttgtagtatgtcatcattctgctcatgattccaaggatcagcctggatgcctagaggactagatcaccttagtttgattctattttttagcttgcaaaaagtgacttatattccaaagaaattaaaatgttgaaatccaaatcctagaaataaaatgagttaacttcaaa

SEQ ID NO: 320904 - DNA, 1782 bp, Homo sapiens
gacttccggcgcactgatcccgcctggggccggctgagtggcacttaagcgggccatgccatgcaaccttgggcgctgccaaccgtgggcgagctctgggtgtgcgggcggcctggcgcggcgctccggtaaggcgtgtgtgcggcagggcggggacagaaccgtcctctcgggctctgggcgtgtccgagaccgcgctccccgccgaaatcaagctccgagtcatccgtgtggggcattcgtcccccctggcacagttggcctctttccagaagcccgttttgtttgttttacgtctaaattcgcgtcggttcttatttctctccctggcaaggtctgaagacgggtaggagaataacatggagtctagttctgtcgcccaggctggagcccagtggtgtgatctcagctcactgcaatctccacctcctggcttcaagcgattcttctgcttcagcctcccgactgtgtcagcgtgttatgatgccgtcccgtaccaacctggctactggaatccccagtagtaaagtgaaatattcaaggctctccagcacagacgatggctacattgaccttcagtttaagaaaacccctcctaagatcccttataaggccatcgcacttgccactgtgctgtttttgattggcgcctttctcattattataggctccctcctgctgtcaggctacatcagcaaagggggggcagaccgggccgttccagtgctgatcattggcattctggtgttcctacccggattttaccacctgcgcatcgcttactatgcatccaaaggctaccgtggttactcctatgatgacattccagactttgatgactagcacccaccccatagctgaggaggagtcacagtggaactgtcccagctttaagatatctagcagaaactatagctgaggactaaggaattctgcagcttgcagatgtttaagaaaataatggccagattttttgggtccttcccaaagatgttaagtgaacctacagttagctaattaggacaagctctatttttcatccctgggccctgacaagtttttccacaggaatatgtatcatggaagaatagaggttattctgtaatggaaaagtgttgcctgccaccaccctctgtagagctgagcatttcttttaaatagtcttcattgccaatttgttcttgtagcaaatggaacaatgtggtatggctaatttcttattattaagtagtttattttaaaaatatctgagtatattatcctgtacacttatccctaccttcatgttccagtggaagaccttagtaaaatcaaagatcagtgagttcatctgtaatattttttttacttgctttcttactgacagcaaccaggaatttttttatcctgcagagcaagttttcaaaatgtaaatacttcctctgtttaacagtccttggaccattctgatccagttcaccagtaggttggacagcatataatttgcatcattttgtcccttgtaaatcaagatgttctgcagattattcctttaacggccggacttttggctgtttcctaatgaaacatgtagtggttattatttagagtttatagccgtattgctagcaccttgtagtatgtcatcattctgctcatgattccaaggatcagcctggatgcctagaggactagatcaccttagtttgattctattttttagcttgcaaaaagtgacttatattccaaagaaattaaaatgttgaaatccaaatcctagaaataaaatgagttaacttcaaa

SEQ ID NO: 320905 - DNA, 1345 bp, Homo sapiens
tgggaggccgaggcggacggatcaaaagctgtgtcagcgtgttatgatgccgtcccgtaccaacctggctactggaatccccagtagtaaagtgaaatattcaaggctctccagcacagacgatggctacattgaccttcagtttaagaaaacccctcctaagatcccttataaggccatcgcacttgccactgtgctgtttttgattggcgcctttctcattattataggctccctcctgctgtcaggctacatcagcaaagggggggcagaccgggccgttccagtgctgatcattggcattctggtgttcctacccggattttaccacctgcgcatcgcttactatgcatccaaaggctaccgtggttactcctatgatgacattccagactttgatgactagcacccaccccatagctgaggaggagtcacagtggaactgtcccagctttaagatatctagcagaaactatagctgaggactaaggaattctgcagcttgcagatgtttaagaaaataatggccagattttttgggtccttcccaaagatgttaagtgaacctacagttagctaattaggacaagctctatttttcatccctgggccctgacaagtttttccacaggaatatgtatcatggaagaatagaggttattctgtaatggaaaagtgttgcctgccaccaccctctgtagagctgagcatttcttttaaatagtcttcattgccaatttgttcttgtagcaaatggaacaatgtggtatggctaatttcttattattaagtagtttattttaaaaatatctgagtatattatcctgtacacttatccctaccttcatgttccagtggaagaccttagtaaaatcaaagatcagtgagttcatctgtaatattttttttacttgctttcttactgacagcaaccaggaatttttttatcctgcagagcaagttttcaaaatgtaaatacttcctctgtttaacagtccttggaccattctgatccagttcaccagtaggttggacagcatataatttgcatcattttgtcccttgtaaatcaagatgttctgcagattattcctttaacggccggacttttggctgtttcctaatgaaacatgtagtggttattatttagagtttatagccgtattgctagcaccttgtagtatgtcatcattctgctcatgattccaaggatcagcctggatgcctagaggactagatcaccttagtttgattctattttttagcttgcaaaaagtgacttatattccaaagaaattaaaatgttgaaatccaaatcctagaaataaaatgagttaacttcaaa

SEQ ID NO: 320906 - DNA, 1486 bp, Homo sapiens
tgcctctgacacaatgaaaatttagcagtgaagtgtaaattgcccattgctagtctgacatggcagcccagaactccagtgcacagcatctaataatcctgaactcattggctataatgcaccattgtcatctacagacaataacgggttttttgtttttaaactgtagctgtgtcagcgtgttatgatgccgtcccgtaccaacctggctactggaatccccagtagtaaagtgaaatattcaaggctctccagcacagacgatggctacattgaccttcagtttaagaaaacccctcctaagatcccttataaggccatcgcacttgccactgtgctgtttttgattggcgcctttctcattattataggctccctcctgctgtcaggctacatcagcaaagggggggcagaccgggccgttccagtgctgatcattggcattctggtgttcctacccggattttaccacctgcgcatcgcttactatgcatccaaaggctaccgtggttactcctatgatgacattccagactttgatgactagcacccaccccatagctgaggaggagtcacagtggaactgtcccagctttaagatatctagcagaaactatagctgaggactaaggaattctgcagcttgcagatgtttaagaaaataatggccagattttttgggtccttcccaaagatgttaagtgaacctacagttagctaattaggacaagctctatttttcatccctgggccctgacaagtttttccacaggaatatgtatcatggaagaatagaggttattctgtaatggaaaagtgttgcctgccaccaccctctgtagagctgagcatttcttttaaatagtcttcattgccaatttgttcttgtagcaaatggaacaatgtggtatggctaatttcttattattaagtagtttattttaaaaatatctgagtatattatcctgtacacttatccctaccttcatgttccagtggaagaccttagtaaaatcaaagatcagtgagttcatctgtaatattttttttacttgctttcttactgacagcaaccaggaatttttttatcctgcagagcaagttttcaaaatgtaaatacttcctctgtttaacagtccttggaccattctgatccagttcaccagtaggttggacagcatataatttgcatcattttgtcccttgtaaatcaagatgttctgcagattattcctttaacggccggacttttggctgtttcctaatgaaacatgtagtggttattatttagagtttatagccgtattgctagcaccttgtagtatgtcatcattctgctcatgattccaaggatcagcctggatgcctagaggactagatcaccttagtttgattctattttttagcttgcaaaaagtgacttatattccaaagaaattaaaatgttgaaatccaaatcctagaaataaaatgagttaacttcaaa

SEQ ID NO: 320907 - DNA, 1287 bp, Homo sapiens
ctcctaagatcccttataaggggttttcttaaactgaaggtcaatgtagccatcgtctgtgctggagagcctggaatatttcactttaagaaaacccctcctaagatcccttataaggccatcgcacttgccactgtgctgtttttgattggcgcctttctcattattataggctccctcctgctgtcaggctacatcagcaaagggggggcagaccgggccgttccagtgctgatcattggcattctggtgttcctacccggattttaccacctgcgcatcgcttactatgcatccaaaggctaccgtggttactcctatgatgacattccagactttgatgactagcacccaccccatagctgaggaggagtcacagtggaactgtcccagctttaagatatctagcagaaactatagctgaggactaaggaattctgcagcttgcagatgtttaagaaaataatggccagattttttgggtccttcccaaagatgttaagtgaacctacagttagctaattaggacaagctctatttttcatccctgggccctgacaagtttttccacaggaatatgtatcatggaagaatagaggttattctgtaatggaaaagtgttgcctgccaccaccctctgtagagctgagcatttcttttaaatagtcttcattgccaatttgttcttgtagcaaatggaacaatgtggtatggctaatttcttattattaagtagtttattttaaaaatatctgagtatattatcctgtacacttatccctaccttcatgttccagtggaagaccttagtaaaatcaaagatcagtgagttcatctgtaatattttttttacttgctttcttactgacagcaaccaggaatttttttatcctgcagagcaagttttcaaaatgtaaatacttcctctgtttaacagtccttggaccattctgatccagttcaccagtaggttggacagcatataatttgcatcattttgtcccttgtaaatcaagatgttctgcagattattcctttaacggccggacttttggctgtttcctaatgaaacatgtagtggttattatttagagtttatagccgtattgctagcaccttgtagtatgtcatcattctgctcatgattccaaggatcagcctggatgcctagaggactagatcaccttagtttgattctattttttagcttgcaaaaagtgacttatattccaaagaaattaaaatgttgaaatccaaatcctagaaataaaatgagttaacttcaaa

SEQ ID NO: 320908 - DNA, 1588 bp, Homo sapiens
gacttccggcgcactgatcccgcctggggccggctgagtggcacttaagcgggccatgccatgcaaccttgggcgctgccaaccgtgggcgagctctgggtgtgcgggcggcctggcgcggcgctccggtaaggcgtgtgtgcggcagggcggggacagaaccgtcctctcgggctctgggcgtgtccgagaccgcgctccccgccgaaatcaagctccgagtcatccgtgtggggcattcgtcccccctggcacagttggcctctttccagaagcccgttttgtttgttttacgtctaaattcgcgtcggttcttatttctctccctggcaaggtctgaagacgggtaggagaataacctgtgtcagcgtgttatgatgccgtcccgtaccaacctggctactggaatccccagtagtaaagtgaaatattcaaggctctccagcacagacgatggctacattgaccttcaggctccctcctgctgtcaggctacatcagcaaagggggggcagaccgggccgttccagtgctgatcattggcattctggtgttcctacccggattttaccacctgcgcatcgcttactatgcatccaaaggctaccgtggttactcctatgatgacattccagactttgatgactagcacccaccccatagctgaggaggagtcacagtggaactgtcccagctttaagatatctagcagaaactatagctgaggactaaggaattctgcagcttgcagatgtttaagaaaataatggccagattttttgggtccttcccaaagatgttaagtgaacctacagttagctaattaggacaagctctatttttcatccctgggccctgacaagtttttccacaggaatatgtatcatggaagaatagaggttattctgtaatggaaaagtgttgcctgccaccaccctctgtagagctgagcatttcttttaaatagtcttcattgccaatttgttcttgtagcaaatggaacaatgtggtatggctaatttcttattattaagtagtttattttaaaaatatctgagtatattatcctgtacacttatccctaccttcatgttccagtggaagaccttagtaaaatcaaagatcagtgagttcatctgtaatattttttttacttgctttcttactgacagcaaccaggaatttttttatcctgcagagcaagttttcaaaatgtaaatacttcctctgtttaacagtccttggaccattctgatccagttcaccagtaggttggacagcatataatttgcatcattttgtcccttgtaaatcaagatgttctgcagattattcctttaacggccggacttttggctgtttcctaatgaaacatgtagtggttattatttagagtttatagccgtattgctagcaccttgtagtatgtcatcattctgctcatgattccaaggatcagcctggatgcctagaggactagatcaccttagtttgattctattttttagcttgcaaaaagtgacttatattccaaagaaattaaaatgttgaaatccaaatcctagaaataaaatgagttaacttcaaa

SEQ ID NO: 320909 - DNA, 1357 bp, Homo sapiens
gacttccggcgcactgatcccgcctggggccggctgagtggcacttaagcgggccatgccatgcaaccttgggcgctgccaaccgtgggcgagctctgggtgtgcgggcggcctggcgcggcgctccgctgtgtcagcgtgttatgatgccgtcccgtaccaacctggctactggaatccccagtagtaaagtgaaatattcaaggctctccagcacagacgatggctacattgaccttcaggctccctcctgctgtcaggctacatcagcaaagggggggcagaccgggccgttccagtgctgatcattggcattctggtgttcctacccggattttaccacctgcgcatcgcttactatgcatccaaaggctaccgtggttactcctatgatgacattccagactttgatgactagcacccaccccatagctgaggaggagtcacagtggaactgtcccagctttaagatatctagcagaaactatagctgaggactaaggaattctgcagcttgcagatgtttaagaaaataatggccagattttttgggtccttcccaaagatgttaagtgaacctacagttagctaattaggacaagctctatttttcatccctgggccctgacaagtttttccacaggaatatgtatcatggaagaatagaggttattctgtaatggaaaagtgttgcctgccaccaccctctgtagagctgagcatttcttttaaatagtcttcattgccaatttgttcttgtagcaaatggaacaatgtggtatggctaatttcttattattaagtagtttattttaaaaatatctgagtatattatcctgtacacttatccctaccttcatgttccagtggaagaccttagtaaaatcaaagatcagtgagttcatctgtaatattttttttacttgctttcttactgacagcaaccaggaatttttttatcctgcagagcaagttttcaaaatgtaaatacttcctctgtttaacagtccttggaccattctgatccagttcaccagtaggttggacagcatataatttgcatcattttgtcccttgtaaatcaagatgttctgcagattattcctttaacggccggacttttggctgtttcctaatgaaacatgtagtggttattatttagagtttatagccgtattgctagcaccttgtagtatgtcatcattctgctcatgattccaaggatcagcctggatgcctagaggactagatcaccttagtttgattctattttttagcttgcaaaaagtgacttatattccaaagaaattaaaatgttgaaatccaaatcctagaaataaaatgagttaacttcaaa

SEQ ID NO: 320910 - DNA, 1392 bp, Homo sapiens
gacttccggcgcactgatcccgcctggggccggctgagtggcacttaagcgggccatgccatgcaaccttgggcgctgccaaccgtgggcgagctctgggtgtgcgggcggcctggcgcggcgctccgctgtgtcagcgtgttatgatgccgtcccgtaccaacctggctactggaatccccagtagtaaagtgaaatattcaaggctctccagcacagacgatggctacattgaccttcagtttaagaaaacccctcctaagatcccttataaggccatcgcacttgccactgtgctgtttttgattggcgcctttctcattattataggctccctcctgctgtcaggctacatcagcaaagggggggcagaccgggccgttccagtgctgatcattggcattctggtgttcctacccggattttaccacctgcgcatcgcttactatgcatccaaaggctaccgtggttactcctatgatgacattccagactttgatgactagcacccaccccatagctgaggaggagtcacagtggaactgtcccagctttaagatatctagcagaaactatagctgaggactaaggaattctgcagcttgcagatgtttaagaaaataatggccagattttttgggtccttcccaaagatgttaagtgaacctacagttagctaattaggacaagctctatttttcatccctgggccctgacaagtttttccacaggaatatgtatcatggaagaatagaggttattctgtaatggtcttcattgccaatttgttcttgtagcaaatggaacaatgtggtatggctaatttcttattattaagtagtttattttaaaaatatctgagtatattatcctgtacacttatccctaccttcatgttccagtggaagaccttagtaaaatcaaagatcagtgagttcatctgtaatattttttttacttgctttcttactgacagcaaccaggaatttttttatcctgcagagcaagttttcaaaatgtaaatacttcctctgtttaacagtccttggaccattctgatccagttcaccagtaggttggacagcatataatttgcatcattttgtcccttgtaaatcaagatgttctgcagattattcctttaacggccggacttttggctgtttcctaatgaaacatgtagtggttattatttagagtttatagccgtattgctagcaccttgtagtatgtcatcattctgctcatgattccaaggatcagcctggatgcctagaggactagatcaccttagtttgattctattttttagcttgcaaaaagtgacttatattccaaagaaattaaaatgttgaaatccaaatcctagaaataaaatgagttaacttcaaa

SEQ ID NO: 320911 - DNA, 1390 bp, Homo sapiens
gacttccggcgcactgatcccgcctggggccggctgagtggcacttaagcgggccatgccatgcaaccttgggcgctgccaaccgtgggcgagctctgggtgtgcgggcggcctggcgcggcgctccgctgtgtcagcgtgttatgatgccgtcccgtaccaacctggctactggaatccccagtagtaaagtgaaatattcaaggctctccagcacagacgatggctacattgaccttcagtgtttttgattggcgcctttctcattattataggctccctcctgctgtcaggctacatcagcaaagggggggcagaccgggccgttccagtgctgatcattggcattctggtgttcctacccggattttaccacctgcgcatcgcttactatgcatccaaaggctaccgtggttactcctatgatgacattccagactttgatgactagcacccaccccatagctgaggaggagtcacagtggaactgtcccagctttaagatatctagcagaaactatagctgaggactaaggaattctgcagcttgcagatgtttaagaaaataatggccagattttttgggtccttcccaaagatgttaagtgaacctacagttagctaattaggacaagctctatttttcatccctgggccctgacaagtttttccacaggaatatgtatcatggaagaatagaggttattctgtaatggaaaagtgttgcctgccaccaccctctgtagagctgagcatttcttttaaatagtcttcattgccaatttgttcttgtagcaaatggaacaatgtggtatggctaatttcttattattaagtagtttattttaaaaatatctgagtatattatcctgtacacttatccctaccttcatgttccagtggaagaccttagtaaaatcaaagatcagtgagttcatctgtaatattttttttacttgctttcttactgacagcaaccaggaatttttttatcctgcagagcaagttttcaaaatgtaaatacttcctctgtttaacagtccttggaccattctgatccagttcaccagtaggttggacagcatataatttgcatcattttgtcccttgtaaatcaagatgttctgcagattattcctttaacggccggacttttggctgtttcctaatgaaacatgtagtggttattatttagagtttatagccgtattgctagcaccttgtagtatgtcatcattctgctcatgattccaaggatcagcctggatgcctagaggactagatcaccttagtttgattctattttttagcttgcaaaaagtgacttatattccaaagaaattaaaatgttgaaatccaaatcctagaaataaaatgagttaacttcaaa

SEQ ID NO: 320912 - DNA, 1553 bp, Homo sapiens
gacttccggcgcactgatcccgcctggggccggctgagtggcacttaagcgggccatgccatgcaaccttgggcgctgccaaccgtgggcgagctctgggtgtgcgggcggcctggcgcggcgctccggtaaggcgtgtgtgcggcagggcggggacagaaccgtcctctcgggctctgggcgtgtccgagaccgcgctccccgccgaaatcaagctccgagtcatccgtgtggggcattcgtcccccctggcacagttggcctctttccagaagcccgttttgtttgttttacgtctaaattcgcgtcggttcttatttctctccctggcaaggtctgaagacgggtaggagaataacctgtgtcagcgtgttatgatgccgtcccgtaccaacctggctactggaatccccagtagtaaagtgaaatattcaaggctctccagcacagacgatggctacattgaccttcagggggcagaccgggccgttccagtgctgatcattggcattctggtgttcctacccggattttaccacctgcgcatcgcttactatgcatccaaaggctaccgtggttactcctatgatgacattccagactttgatgactagcacccaccccatagctgaggaggagtcacagtggaactgtcccagctttaagatatctagcagaaactatagctgaggactaaggaattctgcagcttgcagatgtttaagaaaataatggccagattttttgggtccttcccaaagatgttaagtgaacctacagttagctaattaggacaagctctatttttcatccctgggccctgacaagtttttccacaggaatatgtatcatggaagaatagaggttattctgtaatggaaaagtgttgcctgccaccaccctctgtagagctgagcatttcttttaaatagtcttcattgccaatttgttcttgtagcaaatggaacaatgtggtatggctaatttcttattattaagtagtttattttaaaaatatctgagtatattatcctgtacacttatccctaccttcatgttccagtggaagaccttagtaaaatcaaagatcagtgagttcatctgtaatattttttttacttgctttcttactgacagcaaccaggaatttttttatcctgcagagcaagttttcaaaatgtaaatacttcctctgtttaacagtccttggaccattctgatccagttcaccagtaggttggacagcatataatttgcatcattttgtcccttgtaaatcaagatgttctgcagattattcctttaacggccggacttttggctgtttcctaatgaaacatgtagtggttattatttagagtttatagccgtattgctagcaccttgtagtatgtcatcattctgctcatgattccaaggatcagcctggatgcctagaggactagatcaccttagtttgattctattttttagcttgcaaaaagtgacttatattccaaagaaattaaaatgttgaaatccaaatcctagaaataaaatgagttaacttcaaa

SEQ ID NO: 320913 - DNA, 1322 bp, Homo sapiens
gacttccggcgcactgatcccgcctggggccggctgagtggcacttaagcgggccatgccatgcaaccttgggcgctgccaaccgtgggcgagctctgggtgtgcgggcggcctggcgcggcgctccgctgtgtcagcgtgttatgatgccgtcccgtaccaacctggctactggaatccccagtagtaaagtgaaatattcaaggctctccagcacagacgatggctacattgaccttcagggggcagaccgggccgttccagtgctgatcattggcattctggtgttcctacccggattttaccacctgcgcatcgcttactatgcatccaaaggctaccgtggttactcctatgatgacattccagactttgatgactagcacccaccccatagctgaggaggagtcacagtggaactgtcccagctttaagatatctagcagaaactatagctgaggactaaggaattctgcagcttgcagatgtttaagaaaataatggccagattttttgggtccttcccaaagatgttaagtgaacctacagttagctaattaggacaagctctatttttcatccctgggccctgacaagtttttccacaggaatatgtatcatggaagaatagaggttattctgtaatggaaaagtgttgcctgccaccaccctctgtagagctgagcatttcttttaaatagtcttcattgccaatttgttcttgtagcaaatggaacaatgtggtatggctaatttcttattattaagtagtttattttaaaaatatctgagtatattatcctgtacacttatccctaccttcatgttccagtggaagaccttagtaaaatcaaagatcagtgagttcatctgtaatattttttttacttgctttcttactgacagcaaccaggaatttttttatcctgcagagcaagttttcaaaatgtaaatacttcctctgtttaacagtccttggaccattctgatccagttcaccagtaggttggacagcatataatttgcatcattttgtcccttgtaaatcaagatgttctgcagattattcctttaacggccggacttttggctgtttcctaatgaaacatgtagtggttattatttagagtttatagccgtattgctagcaccttgtagtatgtcatcattctgctcatgattccaaggatcagcctggatgcctagaggactagatcaccttagtttgattctattttttagcttgcaaaaagtgacttatattccaaagaaattaaaatgttgaaatccaaatcctagaaataaaatgagttaacttcaaa

SEQ ID NO: 320914 - DNA, 1696 bp, Homo sapiens
cttggaggctgaggtgggaggatcacttgagcctgggaagtcgaggttgcagtgagctgtaatcacaccactgtactccagcccgagcaacagagcaagactcttacctcaaaaaaaaagaaaaaagagaaagaaaagaaaacctgaaaggctgagaaaaacacagagtttattgtagtggtatctgtacaattacaaaaggtgaaaaacaaccaaagtgtccagcagctgtatgtggggcagttaggtaaaactgtagtatgtccatttcggtggaatgttacacatccttacagtttaaatgtatgaaaaggttttaataatattggccacaggacacagagtatggtgtgttcacaactaagagcttaaaaaaaggaaaagaagccaaaatatctggatgagaatgggtcatttttttctttataattgttaatattttgtagtttgtcttcaatttataatcaggaggaaaccttttcccttggtggtatacaactcaaagaaaaagtactgaagagtataaaatactgatctaaggattaggtctgtgacgttttattttaaaatgtgtaactcttacggtactaatgtgtttgcctccttctgccaccagggggcagaccgggccgttccagtgctgatcattggcattctggtgttcctacccggattttaccacctgcgcatcgcttactatgcatccaaaggctaccgtggttactcctatgatgacattccagactttgatgactagcacccaccccatagctgaggaggagtcacagtggaactgtcccagctttaagatatctagcagaaactatagctgaggactaaggaattctgcagcttgcagatgtttaagaaaataatggccagattttttgggtccttcccaaagatgttaagtgaacctacagttagctaattaggacaagctctatttttcatccctgggccctgacaagtttttccacaggaatatgtatcatggaagaatagaggttattctgtaatggaaaagtgttgcctgccaccaccctctgtagagctgagcatttcttttaaatagtcttcattgccaatttgttcttgtagcaaatggaacaatgtggtatggctaatttcttattattaagtagtttattttaaaaatatctgagtatattatcctgtacacttatccctaccttcatgttccagtggaagaccttagtaaaatcaaagatcagtgagttcatctgtaatattttttttacttgctttcttactgacagcaaccaggaatttttttatcctgcagagcaagttttcaaaatgtaaatacttcctctgtttaacagtccttggaccattctgatccagttcaccagtaggttggacagcatataatttgcatcattttgtcccttgtaaatcaagatgttctgcagattattcctttaacggccggacttttggctgtttcctaatgaaacatgtagtggttattatttagagtttatagccgtattgctagcaccttgtagtatgtcatcattctgctcatgattccaaggatcagcctggatgcctagaggactagatcaccttagtttgattctattttttagcttgcaaaaagtgacttatattccaaagaaattaaaatgttgaaatccaaatcctagaaataaaatgagttaacttcaaa

SEQ ID NO: 320915 - DNA, 1623 bp, Homo sapiens
gacttccggcgcactgatcccgcctggggccggctgagtggcacttaagcgggccatgccatgcaaccttgggcgctgccaaccgtgggcgagctctgggtgtgcgggcggcctggcgcggcgctccggtaaggcgtgtgtgcggcagggcggggacagaaccgtcctctcgggctctgggcgtgtccgagaccgcgctccccgccgaaatcaagctccgagtcatccgtgtggggcattcgtcccccctggcacagttggcctctttccagaagcccgttttgtttgttttacgtctaaattcgcgtcggttcttatttctctccctggcaaggtctgaagacgggtaggagaataacctgtgtcagcgtgttatgatgccgtcccgtaccaacctggctactggaatccccagtagtaaagtgaaatattcaaggctctccagcacagacgatggctacattgaccttcagtttaagaaaacccctcctaagatcccttataaggccatcgcacttgccactgtgctgtttttgattggcgcctttctcattattataggctccctcctgctgtcaggctacatcagcaaagggggggcagaccgggccgttccagtgctgatcattggcattctggtgttcctacccggattttaccacctgcgcatcgcttactatgcatccaaaggctaccgtggttactcctatgatgacattccagactttgatgactagcacccaccccatagctgaggaggagtcacagtggaactgtcccagctttaagatatctagcagaaactatagctgaggactaaggaattctgcagcttgcagatgtttaagaaaataatggccagattttttgggtccttcccaaagatgttaagtgaacctacagttagctaattaggacaagctctatttttcatccctgggccctgacaagtttttccacaggaatatgtatcatggaagaatagaggttattctgtaatggtcttcattgccaatttgttcttgtagcaaatggaacaatgtggtatggctaatttcttattattaagtagtttattttaaaaatatctgagtatattatcctgtacacttatccctaccttcatgttccagtggaagaccttagtaaaatcaaagatcagtgagttcatctgtaatattttttttacttgctttcttactgacagcaaccaggaatttttttatcctgcagagcaagttttcaaaatgtaaatacttcctctgtttaacagtccttggaccattctgatccagttcaccagtaggttggacagcatataatttgcatcattttgtcccttgtaaatcaagatgttctgcagattattcctttaacggccggacttttggctgtttcctaatgaaacatgtagtggttattatttagagtttatagccgtattgctagcaccttgtagtatgtcatcattctgctcatgattccaaggatcagcctggatgcctagaggactagatcaccttagtttgattctattttttagcttgcaaaaagtgacttatattccaaagaaattaaaatgttgaaatccaaatcctagaaataaaatgagttaacttcaaa

SEQ ID NO: 320916 - DNA, 1668 bp, Homo sapiens
gacttccggcgcactgatcccgcctggggccggctgagtggcacttaagcgggccatgccatgcaaccttgggcgctgccaaccgtgggcgagctctgggtgtgcgggcggcctggcgcggcgctccggtaaggcgtgtgtgcggcagggcggggacagaaccgtcctctcgggctctgggcgtgtccgagaccgcgctccccgccgaaatcaagctccgagtcatccgtgtggggcattcgtcccccctggcacagttggcctctttccagaagcccgttttgtttgttttacgtctaaattcgcgtcggttcttatttctctccctggcaaggtctgaagacgggtaggagaataacgtatgtacaaagtacttagaacagctggcatctaacaaagactagctgtgtcagcgtgttatgatgccgtcccgtaccaacctggctactggaatccccagtagtaaagtgaaatattcaaggctctccagcacagacgatggctacattgaccttcagtttaagaaaacccctcctaagatcccttataaggccatcgcacttgccactgtgctgtttttgattggcgcctttctcattattataggctccctcctgctgtcaggctacatcagcaaagggggggcagaccgggccgttccagtgctgatcattggcattctggtgttcctacccggattttaccacctgcgcatcgcttactatgcatccaaaggctaccgtggttactcctatgatgacattccagactttgatgactagcacccaccccatagctgaggaggagtcacagtggaactgtcccagctttaagatatctagcagaaactatagctgaggactaaggaattctgcagcttgcagatgtttaagagttagctaattaggacaagctctatttttcatccctgggccctgacaagtttttccacaggaatatgtatcatggaagaatagaggttattctgtaatggaaaagtgttgcctgccaccaccctctgtagagctgagcatttcttttaaatagtcttcattgccaatttgttcttgtagcaaatggaacaatgtggtatggctaatttcttattattaagtagtttattttaaaaatatctgagtatattatcctgtacacttatccctaccttcatgttccagtggaagaccttagtaaaatcaaagatcagtgagttcatctgtaatattttttttacttgctttcttactgacagcaaccaggaatttttttatcctgcagagcaagttttcaaaatgtaaatacttcctctgtttaacagtccttggaccattctgatccagttcaccagtaggttggacagcatataatttgcatcattttgtcccttgtaaatcaagatgttctgcagattattcctttaacggccggacttttggctgtttcctaatgaaacatgtagtggttattatttagagtttatagccgtattgctagcaccttgtagtatgtcatcattctgctcatgattccaaggatcagcctggatgcctagaggactagatcaccttagtttgattctattttttagcttgcaaaaagtgacttatattccaaagaaattaaaatgttgaaatccaaatcctagaaataaaatgagttaacttcaaa

SEQ ID NO: 320917 - DNA, 553 bp, Homo sapiens
ttcgcggtgatctagaggatcccgtagctcgatcaaccacttatccctaccttcatgttccagtggaagaccttagtaaaatcaaagatcagtgagttcatctgtaatattttttttacttgctttcttactgacagcaaccaggaatttttttatcctgcagagcaagttttcaaaatgtaaatacttcctctgtttaacagtccttggaccattctgatccagttcaccagtaggttggacagcatataatttgcatcattttgtcccttgtaaatcaagatgttctgcagattattcctttaacggccggacttttggctgtttcctaatgaaacatgtagtggttattatttagagtttatagccgtattgctagcaccttgtagtatgtcatcattctgctcatgattccaaggatcagcctggatgcctagaggactagatcaccttagtttgattctattttttagcttgcaaaaagtgacttatattccaaagaaattaaaatgttgaaatccaaatcctagaaataaaatgagttaacttcaaa

SEQ ID NO: 320918 - DNA, 984 bp, Homo sapiens
gacttccggcgcactgatcccgcctggggccggctgagtggcacttaagcgggccatgccatgcaaccttgggcgctgccaaccgtgggcgagctctgggtgtgcgggcggcctggcgcggcgctccggtaaggcgtgtgtgcggcagggcggggacagaaccgtcctctcgggctctgggcgtgtccgagaccgcgctccccgccgaaatcaagctccgagtcatccgtgtggggcattcgtcccccctggcacagttggcctctttccagaagcccgttttgtttgttttacgtctaaattcgcgtcggttcttatttctctccctggcaaggtctgaagacgggtaggagaataacctgtgtcagcgtgttatgatgccgtcccgtaccaacctggctactggaatccccagtagtaaagtgaaatattcaaggctctccagcacagacgatggctacattgaccttcagggtaaatgcagaagagaactgacaagactgactggctgtgtttctgttaagttagcaggaagaccttccagatggagattttgctaactgtccttggggattagaaggagcaacaagaagaaaactcagctctgagaccctttcagccataatcgcagaagagggccgtggcagggtagtttcaaaccaattccagtattgtccatttctaagaatttttagttgtaatgcgagagccttgtagttacaggttttatttactttattcagaaactaatcagattgtgttttgttaagtggagttttttgttgttgtttctttttttaaggaactttaaaatttttgttaggtggaattttttttatcactgtttatttacactttagtcaaagcccgttcaccttttaagggagaaacttattactaaagccagcagattgtgggaatcttccttctttcctgatgtcatgagatccaatttattaaaggtattctttgtgataaatagta

SEQ ID NO: 320919 - DNA, 600 bp, Homo sapiens
gacttccggcgcactgatcccgcctggggccggctgagtggcacttaagcgggccatgccatgcaaccttgggcgctgccaaccgtgggcgagctctgggtgtgcgggcggcctggcgcggcgctccggtaaggcgtgtgtgcggcagggcggggacagaaccgtcctctcgggctctgggcgtgtccgagaccgcgctccccgccgaaatcaagctccgagtcatccgtgtggggcattcgtcccccctggcacagttggcctctttccagaagcccgttttgtttgttttacgtctaaattcgcgtcggttcttatttctctccctggcaaggtctgaagacgggtaggagaataacctgtgtcagcgtgttatgatgccgtcccgtaccaacctggctactggaatccccagtagtaaagtgaaatattcaaggctctccagcacagacgatggctacattgaccttcagaagcgccccctgttaatttaagaaaacccctccaaagatccctttttagggctatagcgcttgccactgagctcggggctgtttggggcgggtgtcaattatcataaggttcctcctgcttgcaggc

SEQ ID NO: 320920 - DNA, 1445 bp, Homo sapiens
gacttccggcgcactgatcccgcctggggccggctgagtggcacttaagcgggccatgccatgcaaccttgggcgctgccaaccgtgggcgagctctgggtgtgcgggcggcctggcgcggcgctccgctgtgtcagcgtgttatgatgccgtcccgtaccaacctggctactggaatccccagtagtaaagtgaaatattcaaggctctccagcacagacgatggctacattgaccttcagtttaagaaaacccctcctaagatcccttataaggccatcgcacttgccactgtgctgtttttgattggcgcctttctcattattataggctccctcctgctgtcaggctacatcagcaaagggggggcagaccgggccgttccagtgctgatcattggcattctggtgttcctacccggattttaccacctgcgcatcgcttactatgcatccaaaggctaccgtggttactcctatgatgacattccagactttgatgactagcacccaccccatagctgaggaggagtcacagtggaactgtcccagctttaagatatctagcagaaactatagctgaggactaaggaattctgcagcttgcagatgtttaagaaaataatggccagattttttgggtccttcccaaagatgttaagtgaacctacagttagctaattaggacaagctctatttttcatccctgggccctgacaagtttttccacaggaatatgtatcatggaagaatagaggttattctgtaatggaaaagtgttgcctgccaccaccctctgtagagctgagcatttcttttaaatagtcttcattgccaatttgttcttgtagcaaatggaacaatgtggtatggctaatttcttattattaagtagtttattttaaaaatatctgagtatattatcctgtacacttatccctaccttcatgttccagtggaagaccttagtaaaatcaaagatcagtgagttcatctgtaatattttttttacttgctttcttactgacagcaaccaggaatttttttatcctgcagagcaagttttcaaaatgtaaatacttcctctgtttaacagtccttggaccattctgatccagttcaccagtaggttggacagcatataatttgcatcattttgtcccttgtaaatcaagatgttctgcagattattcctttaacggccggacttttggctgtttcctaatgaaacatgtagtggttattatttagagtttatagccgtattgctagcaccttgtagtatgtcatcattctgctcatgattccaaggatcagcctggatgcctagaggactagatcaccttagtttgattctattttttagcttgcaaaaagtgacttatattccaaagaaattaaaatgttgaaatccaaatcctagaaataaaatgagttaacttcaaa

SEQ ID NO: 320921 - DNA, 834 bp, Homo sapiens
  misc_feature (24)..(24): n is a, c, g, or t
  misc_feature (64)..(64): n is a, c, g, or t
  misc_feature (75)..(75): n is a, c, g, or t
  misc_feature (338)..(338): n is a, c, g, or t
ggtggtgtgttacccagtagctcntgggacatcgctcgggtacgctccacgccgtcgcagccantgctgtggtcnccggtcggccgaggggccgcgatactggttgcccgcggtgtaagcagaattcgacgtgtatcgctgccgtcaagatggaggggcctttgtccgtgttcggtgaccgcagcactggggaaacgatccgctcccaaaacgttatggctgcagcttcgattgccaatattgtaaaaattatattccaaagaaattaaaatgttgaaatccaaatcctagaaataaaatgagttaacttcaaacatttcagaaaacaaaaaaaagantttatgatatctttaatcccagtacctagatctaccttagtttctaggtagctggcattgtgggtcacactcaactttccctaactctgaggtttatggacttgggcaactggaagcctggacatgccatcagctgagttgcaaggctgtgggaagagcaagttttagatgtctactcaatatccaagtggagctgttgaggaggcagttgcgatgcatgtgtgtgtctagagtttaagagtgggtcttggatggaaatagaaatttgggagtcagcatttggacagtatcttaaaagctagagggctgtttgagatcaccagtagagtgagtatagttggaggaaaaaaaaaaaactcaggaagtgagggacaaagagagggtgacctgaagcagcctccaagattagggacttttggtaatgggaatgttgactggggagtccagtaatctagagtgcctgagccttgacagtgaatatgtgaggtgatacata

SEQ ID NO: 320922 - DNA, 1676 bp, Homo sapiens
gacttccggcgcactgatcccgcctggggccggctgagtggcacttaagcgggccatgccatgcaaccttgggcgctgccaaccgtgggcgagctctgggtgtgcgggcggcctggcgcggcgctccggtaaggcgtgtgtgcggcagggcggggacagaaccgtcctctcgggctctgggcgtgtccgagaccgcgctccccgccgaaatcaagctccgagtcatccgtgtggggcattcgtcccccctggcacagttggcctctttccagaagcccgttttgtttgttttacgtctaaattcgcgtcggttcttatttctctccctggcaaggtctgaagacgggtaggagaataacctgtgtcagcgtgttatgatgccgtcccgtaccaacctggctactggaatccccagtagtaaagtgaaatattcaaggctctccagcacagacgatggctacattgaccttcagtttaagaaaacccctcctaagatcccttataaggccatcgcacttgccactgtgctgtttttgattggcgcctttctcattattataggctccctcctgctgtcaggctacatcagcaaagggggggcagaccgggccgttccagtgctgatcattggcattctggtgttcctacccggattttaccacctgcgcatcgcttactatgcatccaaaggctaccgtggttactcctatgatgacattccagactttgatgactagcacccaccccatagctgaggaggagtcacagtggaactgtcccagctttaagatatctagcagaaactatagctgaggactaaggaattctgcagcttgcagatgtttaagaaaataatggccagattttttgggtccttcccaaagatgttaagtgaacctacagttagctaattaggacaagctctatttttcatccctgggccctgacaagtttttccacaggaatatgtatcatggaagaatagaggttattctgtaatggaaaagtgttgcctgccaccaccctctgtagagctgagcatttcttttaaatagtcttcattgccaatttgttcttgtagcaaatggaacaatgtggtatggctaatttcttattattaagtagtttattttaaaaatatctgagtatattatcctgtacacttatccctaccttcatgttccagtggaagaccttagtaaaatcaaagatcagtgagttcatctgtaatattttttttacttgctttcttactgacagcaaccaggaatttttttatcctgcagagcaagttttcaaaatgtaaatacttcctctgtttaacagtccttggaccattctgatccagttcaccagtaggttggacagcatataatttgcatcattttgtcccttgtaaatcaagatgttctgcagattattcctttaacggccggacttttggctgtttcctaatgaaacatgtagtggttattatttagagtttatagccgtattgctagcaccttgtagtatgtcatcattctgctcatgattccaaggatcagcctggatgcctagaggactagatcaccttagtttgattctattttttagcttgcaaaaagtgacttatattccaaagaaattaaaatgttgaaatccaaatcctagaaataaaatgagttaacttcaaa

SEQ ID NO: 320923 - DNA, 1721 bp, Homo sapiens
gacttccggcgcactgatcccgcctggggccggctgagtggcacttaagcgggccatgccatgcaaccttgggcgctgccaaccgtgggcgagctctgggtgtgcgggcggcctggcgcggcgctccggtaaggcgtgtgtgcggcagggcggggacagaaccgtcctctcgggctctgggcgtgtccgagaccgcgctccccgccgaaatcaagctccgagtcatccgtgtggggcattcgtcccccctggcacagttggcctctttccagaagcccgttttgtttgttttacgtctaaattcgcgtcggttcttatttctctccctggcaaggtctgaagacgggtaggagaataacgtatgtacaaagtacttagaacagctggcatctaacaaagactagctgtgtcagcgtgttatgatgccgtcccgtaccaacctggctactggaatccccagtagtaaagtgaaatattcaaggctctccagcacagacgatggctacattgaccttcagtttaagaaaacccctcctaagatcccttataaggccatcgcacttgccactgtgctgtttttgattggcgcctttctcattattataggctccctcctgctgtcaggctacatcagcaaagggggggcagaccgggccgttccagtgctgatcattggcattctggtgttcctacccggattttaccacctgcgcatcgcttactatgcatccaaaggctaccgtggttactcctatgatgacattccagactttgatgactagcacccaccccatagctgaggaggagtcacagtggaactgtcccagctttaagatatctagcagaaactatagctgaggactaaggaattctgcagcttgcagatgtttaagaaaataatggccagattttttgggtccttcccaaagatgttaagtgaacctacagttagctaattaggacaagctctatttttcatccctgggccctgacaagtttttccacaggaatatgtatcatggaagaatagaggttattctgtaatggaaaagtgttgcctgccaccaccctctgtagagctgagcatttcttttaaatagtcttcattgccaatttgttcttgtagcaaatggaacaatgtggtatggctaatttcttattattaagtagtttattttaaaaatatctgagtatattatcctgtacacttatccctaccttcatgttccagtggaagaccttagtaaaatcaaagatcagtgagttcatctgtaatattttttttacttgctttcttactgacagcaaccaggaatttttttatcctgcagagcaagttttcaaaatgtaaatacttcctctgtttaacagtccttggaccattctgatccagttcaccagtaggttggacagcatataatttgcatcattttgtcccttgtaaatcaagatgttctgcagattattcctttaacggccggacttttggctgtttcctaatgaaacatgtagtggttattatttagagtttatagccgtattgctagcaccttgtagtatgtcatcattctgctcatgattccaaggatcagcctggatgcctagaggactagatcaccttagtttgattctattttttagcttgcaaaaagtgacttatattccaaagaaattaaaatgttgaaatccaaatcctagaaataaaatgagttaacttcaaa

SEQ ID NO: 320924 - DNA, 1679 bp, Homo sapiens
atccgtgggctagctactggagtagttgcagtggcggtctggacgtcaggcagcatccgcgataagtgctgatgctggtgacaggaatcgacggggtatcacgaaaccgctgctctcgaggctcatgagtcgtgtgcgagaccgcgtctcctccgatcagaaattcaatgctccgagtcattcagtgtggtggcatattgtgccctcatgagacatcggctcttgccttcttttcccagtaagcaccgatttcgttatctagttattataactgatcttatgattaccgtcagtcaggtttcttttatattcctcttctccatgtgactcggttcatgcatgaacgggttaggagaatcatcctgtgtcagcgtgttatgatgccgtcccgtaccaacctggctactggaatccccagtagtaaagtgaaatattcaaggctctccagcacagacgatggctacattgaccttcagtttaagaaaacccctcctaagatcccttataaggccatcgcacttgccactgtgctgtttttgattggcgcctttctcattattataggctccctcctgctgtcaggctacatcagcaaagggggggcagaccgggccgttccagtgctgatcattggcattctggtgttcctacccggattttaccacctgcgcatcgcttactatgcatccaaaggctaccgtggttactcctatgatgacattccagactttgatgactagcacccaccccatagctgaggaggagtcacagtggaactgtcccagctttaagatatctagcagaaactatagctgaggactaaggaattctgcagcttgcagatgtttaagaaaataatggccagattttttgggtccttcccaaagatgttaagtgaacctacagttagctaattaggacaagctctatttttcatccctgggccctgacaagtttttccacaggaatatgtatcatggaagaatagaggttattctgtaatggaaaagtgttgcctgccaccaccctctgtagagctgagcatttcttttaaatagtcttcattgccaatttgttcttgtagcaaatggaacaatgtggtatggctaatttcttattattaagtagtttattttaaaaatatctgagtatattatcctgtacacttatccctaccttcatgttccagtggaagaccttagtaaaatcaaagatcagtgagttcatctgtaatattttttttacttgctttcttactgacagcaaccaggaatttttttatcctgcagagcaagttttcaaaatgtaaatacttcctctgtttaacagtccttggaccattctgatccagttcaccagtaggttggacagcatataatttgcatcattttgtcccttgtaaatcaagatgttctgcagattattcctttaacggccggacttttggctgtttcctaatgaaacatgtagtggttattatttagagtttatagccgtattgctagcaccttgtagtatgtcatcattctgctcatgattccaaggatcagcctggatgcctagaggactagatcaccttagtttgattctattttttagcttgcaaaaagtgacttatattccaaagaaattaaaatgttgaaatccaaatcctagaaataaaatgagttaacttcaaa

SEQ ID NO: 320925 - DNA, 1851 bp, Homo sapiens
gacttccggcgcactgatcccgcctggggccggctgagtggcacttaagcgggccatgccatgcaaccttgggcgctgccaaccgtgggcgagctctgggtgtgcgggcggcctggcgcggcgctccggtaaggcgtgtgtgcggcagggcggggacagaaccgtcctctcgggctctgggcgtgtccgagaccgcgctccccgccgaaatcaagctccgagtcatccgtgtggggcattcgtcccccctggcacagttggcctctttccagaagcccgttttgtttgttttacgtctaaattcgcgtcggttcttatttctctccctggcaaggtctgaagacgggtaggagaataacctgtgtcagcgtgttatgatgccgtcccgtaccaacctggctactggaatccccagtagtaaagtgaaatattcaaggctctccagcacagacgatggctacattgaccttcagggtaaatgcagaagagaactgacaagactgactggctgtgtttctgttaagttagcaggaagaccttccagatggagattttgctaactgtccttggggattagaaggagcaacaagaagaaaactcagctctgagaccctttcagccataatcgcagaagagggccgtggcaggtttaagaaaacccctcctaagatcccttataaggccatcgcacttgccactgtgctgtttttgattggcgcctttctcattattataggctccctcctgctgtcaggctacatcagcaaagggggggcagaccgggccgttccagtgctgatcattggcattctggtgttcctacccggattttaccacctgcgcatcgcttactatgcatccaaaggctaccgtggttactcctatgatgacattccagactttgatgactagcacccaccccatagctgaggaggagtcacagtggaactgtcccagctttaagatatctagcagaaactatagctgaggactaaggaattctgcagcttgcagatgtttaagaaaataatggccagattttttgggtccttcccaaagatgttaagtgaacctacagttagctaattaggacaagctctatttttcatccctgggccctgacaagtttttccacaggaatatgtatcatggaagaatagaggttattctgtaatggaaaagtgttgcctgccaccaccctctgtagagctgagcatttcttttaaatagtcttcattgccaatttgttcttgtagcaaatggaacaatgtggtatggctaatttcttattattaagtagtttattttaaaaatatctgagtatattatcctgtacacttatccctaccttcatgttccagtggaagaccttagtaaaatcaaagatcagtgagttcatctgtaatattttttttacttgctttcttactgacagcaaccaggaatttttttatcctgcagagcaagttttcaaaatgtaaatacttcctctgtttaacagtccttggaccattctgatccagttcaccagtaggttggacagcatataatttgcatcattttgtcccttgtaaatcaagatgttctgcagattattcctttaacggccggacttttggctgtttcctaatgaaacatgtagtggttattatttagagtttatagccgtattgctagcaccttgtagtatgtcatcattctgctcatgattccaaggatcagcctggatgcctagaggactagatcaccttagtttgattctattttttagcttgcaaaaagtgacttatattccaaagaaattaaaatgttgaaatccaaatcctagaaataaaatgagttaacttcaaa

SEQ ID NO: 320926 - DNA, 1451 bp, Homo sapiens
gacttccggcgcactgatcccgcctggggccggctgagtggcacttaagcgggccatgccatgcaaccttgggcgctgccaaccgtgggcgagctctgggtgtgcgggcggcctggcgcggcgctccgcaggaagaccttccagatggagattttgctaactgtccttggggattagaaggagcaacaagaagaaaactcagctctgagaccctttcagccataatcgcagaagagggccgtggcaggtttaagaaaacccctcctaagatcccttataaggccatcgcacttgccactgtgctgtttttgattggcgcctttctcattattataggctccctcctgctgtcaggctacatcagcaaagggggggcagaccgggccgttccagtgctgatcattggcattctggtgttcctacccggattttaccacctgcgcatcgcttactatgcatccaaaggctaccgtggttactcctatgatgacattccagactttgatgactagcacccaccccatagctgaggaggagtcacagtggaactgtcccagctttaagatatctagcagaaactatagctgaggactaaggaattctgcagcttgcagatgtttaagaaaataatggccagattttttgggtccttcccaaagatgttaagtgaacctacagttagctaattaggacaagctctatttttcatccctgggccctgacaagtttttccacaggaatatgtatcatggaagaatagaggttattctgtaatggaaaagtgttgcctgccaccaccctctgtagagctgagcatttcttttaaatagtcttcattgccaatttgttcttgtagcaaatggaacaatgtggtatggctaatttcttattattaagtagtttattttaaaaatatctgagtatattatcctgtacacttatccctaccttcatgttccagtggaagaccttagtaaaatcaaagatcagtgagttcatctgtaatattttttttacttgctttcttactgacagcaaccaggaatttttttatcctgcagagcaagttttcaaaatgtaaatacttcctctgtttaacagtccttggaccattctgatccagttcaccagtaggttggacagcatataatttgcatcattttgtcccttgtaaatcaagatgttctgcagattattcctttaacggccggacttttggctgtttcctaatgaaacatgtagtggttattatttagagtttatagccgtattgctagcaccttgtagtatgtcatcattctgctcatgattccaaggatcagcctggatgcctagaggactagatcaccttagtttgattctattttttagcttgcaaaaagtgacttatattccaaagaaattaaaatgttgaaatccaaatcctagaaataaaatgagttaacttcaaa

SEQ ID NO: 320927 - DNA, 1391 bp, Homo sapiens
gacttccggcgcactgatcccgcctggggccggctgagtggcacttaagcgggccatgccatgcaaccttgggcgctgccaaccgtgggcgagctctgggtgtgcgggcggcctggcgcggcgctccgctgtgtcagcgtgttatgatgccgtcccgtaccaacctggctactggaatccccagtagtaaagtgaaatattcaaggctctccagcacagacgatggctacattgaccttcagtttaagaaaacccctcctaagatcccttataaggccatcgcacttgccactgtgctgtttttgattggcgcctttctcattattataggctccctcctgctgtcaggctacatcagcaaagggggggcagaccgggccgttccagtgctgatcattggcattctggtgttcctacccggattttaccacctgcgcatcgcttactatgcatccaaaggctaccgtggttactcctatgatgacattccagactttgatgactagcacccaccccatagctgaggaggagtcacagtggaactgtcccagctttaagatatctagcagaaactatagctgaggactaaggaattctgcagcttgcagatgtttaagaaaataatggccagattttttgggtccttcccaaagatgttaagtgaacctacagttagctaattaggacaagctctatttttcatccctgggccctgacaagtttttccacaggaatatgtatcatggaagaatagaggttattctgtaatggaaaagtgttgcctgccaccaccctctgtagagctgagcatttcttttaaatagtcttcattgccaatttgttcttgtagcaaatggaacaatgtggtatggctaatttcttattattaagtagtttattttaaaaatatctgagtatattatcctgtacacttatccctaccttcatgttccagtggaagaccttagtaaaatcaaagatcagtgagttcatctgtaatattttttttacttgctttcttactgacagcaaccaggaatttttttatcctgcagagcaagttttcaccagtaggttggacagcatataatttgcatcattttgtcccttgtaaatcaagatgttctgcagattattcctttaacggccggacttttggctgtttcctaatgaaacatgtagtggttattatttagagtttatagccgtattgctagcaccttgtagtatgtcatcattctgctcatgattccaaggatcagcctggatgcctagaggactagatcaccttagtttgattctattttttagcttgcaaaaagtgacttatattccaaagaaattaaaatgttgaaatccaaatcctagaaataaaatgagttaacttcaaa

SEQ ID NO: 320928 - DNA, 1498 bp, Homo sapiens
gacttccggcgcactgatcccgcctggggccggctgagtggcacttaagcgggccatgccatgcaaccttgggcgctgccaaccgtgggcgagctctgggtgtgcgggcggcctggcgcggcgctccgatggagtctagttctgtcgcccaggctggagcccagtggtgtgatctcagctcactgcaatctccacctcctggcttcaagcgattcttctgcttcagcctcccgactgtgtcagcgtgttatgatgccgtcccgtaccaacctggctactggaatccccagtagtaaagtgaaatattcaaggctctccagcacagacgatggctacattgaccttcagtttaagaaaacccctcctaagatcccttataaggccatcgcacttgccactgtgctgtttttgattggcgcctttctcattattataggctccctcctgctgtcaggctacatcagcaaagggggggcagaccgggccgttccagtgctgatcattggcattctggtgttcctacccggattttaccacctgcgcatcgcttactatgcatccaaaggctaccgtggttactcctatgatgacattccagactttgatgactagcacccaccccatagctgaggaggagtcacagtggaactgtcccagctttaagatatctagcagaaactatagctgaggactaaggaattctgcagcttgcagatgtttaagagttagctaattaggacaagctctatttttcatccctgggccctgacaagtttttccacaggaatatgtatcatggaagaatagaggttattctgtaatggaaaagtgttgcctgccaccaccctctgtagagctgagcatttcttttaaatagtcttcattgccaatttgttcttgtagcaaatggaacaatgtggtatggctaatttcttattattaagtagtttattttaaaaatatctgagtatattatcctgtacacttatccctaccttcatgttccagtggaagaccttagtaaaatcaaagatcagtgagttcatctgtaatattttttttacttgctttcttactgacagcaaccaggaatttttttatcctgcagagcaagttttcaaaatgtaaatacttcctctgtttaacagtccttggaccattctgatccagttcaccagtaggttggacagcatataatttgcatcattttgtcccttgtaaatcaagatgttctgcagattattcctttaacggccggacttttggctgtttcctaatgaaacatgtagtggttattatttagagtttatagccgtattgctagcaccttgtagtatgtcatcattctgctcatgattccaaggatcagcctggatgcctagaggactagatcaccttagtttgattctattttttagcttgcaaaaagtgacttatattccaaagaaattaaaatgttgaaatccaaatcctagaaataaaatgagttaacttcaaa

SEQ ID NO: 320929 - DNA, 2081 bp, Homo sapiens
ttgccaaaacaactacatgaataaacatttacacacaaggaccccaaggcactgcttcccaccccccacgccctcccttcctgacgtgcccgacaaaccaccttcaattccagcagcctccttgagctagacctctcctacaaccagctgcagaagatccccccagtcaacaccaacctggagaacctctacctccaaggcaataggatcaatgagttctccatcagcagcttctgcaccgtggtggacgtcgtgaacttctccaagctgcaggtgctgcgcctggacgggaacgagatcaagcgcagcgccatgcctgccgacgcgcccctctgcctgcgccttgccagcctcatcgagatctgagcagccctggcaccgggtactgggcggagagcccccgtggcatttggcttgatggtttggtttggcttttgctggaaggtccaggatggaccatgtgacagaagtccacgggcaccctctgtagtcttctttcctgtaggtggggttagggggggcgatcagggacaggcagccttctgctgaggacataggcagaagctcactcttttccagggacagaagtggtggtagatggaaggatccctggatgttccaaccccataaatctcacggctcttaagttcttcccaatgatctgaggtcatggaacttcaaaagtggcatgggcaatagtatataaccatacttttctaacaatccctggctgtctgtgagcagcacttgacagctctccctctgtgctgggctggtcgtgcagttactctgggctcccatttgttgcttctcaaaatatacctcttgcccagctgcctcttctgaaatccacttcacccactccactttcctccacagatgcctcttctgtgccttaagcagagtcaggagaccccaaggcatgtgagcatctgcccagcaacctgtggagacaacccacactgtgtctgagggtgaaaggacaccaggagtcacttctatacctccctaacctcacccctggaaagccaccagattggaggtcaccagcatgatgataatattcatgacctgatgtgggaggagacagccaacctcaggcttagatcaatgtatagggctatattttggcagctgggtagctctttgaaggtggataagacttcagaagaggaaaggccagactttgcttaccatcagcatctgcaatgggccaaacacacctcaaattggctgagttgagaaagcagccccagtagttccattcttgcccagcactttctgcattccaaacagcatcctacctgggtttttatccacaaaggtagcggccacatggtttttaaagtatgagaaacacagtttgtcctctccttttatccaagcaggaagattctatatcctgatggtagagacagactccaggcagccctggacttgctagcccaaagaaggaggatgtggttaatctgtttcacctggtttgtcctaaggccatagttaaaaagtaccagctctggctggggtccgtgaagcccaggccaggcagccaaatcttgcctgtgctgggcatacaaccctctgctttcacatctctgagctatatcctcattagtgaaggtggcttttgctttatagtttggctggggagcacttaattcttcccatttcaaaaggtaatgttgcctggggcttaacccacctgccctttgggcaaggttgggacaaagccatctgggcagtcaggggcaaggactgttggaggagagttagcccaagtataggctctgcccagatgccatcacatccctgatactgtgtatgctttgaagcaccttccctgagaagggaagaggggatctttggactaggttcttggctccagacctggaatccacaaaagccaaaccagctcatttcaacaaaggagctccgatgtgaggggcaaggctgccccctgccccagggctcttcagaaagcatctgcatgtgaacaccatcatgcctttataaaggatccttattacaggaaaagcatgagtggtggctaacctgaccaataaagttattttatgattgca

SEQ ID NO: 320930 - DNA, 3459 bp, Homo sapiens
ctcttaccaaaccctggccctccccatccctgcatctgcctttgtggctttaatgagaaatccaggcgcttcataagagactgtacaaataacttctagggcgccactaactcattcagcagaaagggacccagggctgccaatgtttcagggaagataagtgagtggaaaaaaggtggtttttatagcgtcaggcggaccgaaggatttgcgtggttgagcgtgaactccgcccctgcagcagagctgaaaaaaaccaggatccgggttcctcagccccttttcacaatatttgattaggaatttggggcgggaccctggtctggcacaggcacgcacactctcagtagactctttcactcctctctctcttcctctctcacacgttctccaacccaaggaggccagacagagggacgtggtcactctctgaaaagttcaacttgagagacaaaatgcagtggacctccctcctgctgctggcagggctcttctccctctcccaggcccagtatgaagatgaccctcattggtggttccactacctccgcagccagcagtccacctactacgatccctatgacccttacccgtatgagacctacgagccttacccctatggggtggatgaagggccagcctacacctacggctctccatcccctccagatccccgcgactgcccccaggaatgcgactgcccacccaacttccccacggccatgtactgtgacaatcgcaacctcaagtacctgcccttcgttccctcccgcatgaagtatgtgtacttccagaacaaccagatcacctccatccaggaaggcgtctttgacaatgccacagggctgctctggattgctctccacggcaaccagatcaccagtgataaggtgggcaggaaggtcttctccaagctgaggcacctggagaggctgtacctggaccacaacaacctgacccggatgcccggtcccctgcctcgatccctgagagagctccatctcgaccacaaccagatctcacgggtccccaacaatgctctggaggggctggagaacctcacggccttgtacctccaacacaatgagatccaggaagtgggcagttccatgaggggcctccggtcactgatcttgctggacctgagttataaccaccttcggaaggtgcctgatgggctgccctcagctcttgagcagctgtacatggagcacaacaatgtctacaccgtccccgatagctacttccggggggcgcccaagctgctgtatgtgcggctgtcccacaacagtctaaccaacaatggcctggcctccaacaccttcaattccagcagcctccttgagctagacctctcctacaaccagctgcagaagatccccccagtcaacaccaacctggagaacctctacctccaaggcaataggatcaatgagttctccatcagcagcttctgcaccgtggtggacgtcgtgaacttctccaagctgcaggtgctgcgcctggacgggaacgagatcaagcgcagcgccatgcctgccgacgcgcccctctgcctgcgccttgccagcctcatcgagatctgagcagccctggcaccgggtactgggcggagagcccccgtggcatttggcttgatggtttggtttggcttttgctggaaggtccaggatggaccatgtgacagaagtccacgggcaccctctgtagtcttctttcctgtaggtggggttagggggggcgatcagggacaggcagccttctgctgaggacataggcagaagctcactcttttccagggacagaagtggtggtagatggaaggatccctggatgttccaaccccataaatctcacggctcttaagttcttcccaatgatctgaggtcatggaacttcaaaagtggcatgggcaatagtatataaccatacttttctaacaatccctggctgtctgtgagcagcacttgacagctctccctctgtgctgggctggtcgtgcagttactctgggctcccatttgttgcttctcaaaatatacctcttgcccagctgcctcttctgaaatccacttcacccactccactttcctccacagatgcctcttctgtgccttaagcagagtcaggagaccccaaggcatgtgagcatctgcccagcaacctgtggagacaacccacactgtgtctgagggtgaaaggacaccaggagtcacttctatacctccctaacctcacccctggaaagccaccagattggaggtcaccagcatgatgataatattcatgacctgatgtgggaggagacagccaacctcaggcttagatcaatgtatagggctatattttggcagctgggtagctctttgaaggtggataagacttcagaagaggaaaggccagactttgcttaccatcagcatctgcaatgggccaaacacacctcaaattggctgagttgagaaagcagccccagtagttccattcttgcccagcactttctgcattccaaacagcatcctacctgggtttttatccacaaaggtagcggccacatggtttttaaagtatgagaaacacagtttgtcctctccttttatccaagcaggaagattctatatcctgatggtagagacagactccaggcagccctggacttgctagcccaaagaaggaggatgtggttaatctgtttcacctggtttgtcctaaggccatagttaaaaagtaccagctctggctggggtccgtgaagcccaggccaggcagccaaatcttgcctgtgctgggcatacaaccctctgctttcacatctctgagctatatcctcattagtgaaggtggcttttgctttatagtttggctggggagcacttaattcttcccatttcaaaaggtaatgttgcctggggcttaacccacctgccctttgggcaaggttgggacaaagccatctgggcagtcaggggcaaggactgttggaggagagttagcccaagtataggctctgcccagatgccatcacatccctgatactgtgtatgctttgaagcaccttccctgagaagggaagaggggatctttggactaggttcttggctccagacctggaatccacaaaagccaaaccagctcatttcaacaaaggagctccgatgtgaggggcaaggctgccccctgccccagggctcttcagaaagcatctgcatgtgaacaccatcatgcctttataaaggatccttattacaggaaaagcatgagtggtggctaacctgaccaataaagttattttatgattgcaaaaaaaaaaaaaaaaaaaaaaaactcgagactagttctcctcgtgccgaattcggcacgaggtctcgagtttttttttttttttttttagaaaggctggcatctgcttctggtgagggcctcacgaagcttacaatcatggcagaaggtgactcgtgc

SEQ ID NO: 320931 - DNA, 1818 bp, Homo sapiens
ctcttaccaaaccctggccctccccatccctgcatctgcctttgtggctttaatgagaaatccaggcgcttcataagagactgtacaaataacttctagggcgccactaactcattcagcagaaagggacccagggctgccaatgtttcagggaagataagtgagtggaaaaaaggtggtttttatagcgtcaggcggaccgaaggatttgcgtggttgagcgtgaactccgcccctgcagcagagctgaaaaaaaccaggatccgggttcctcagccccttttcacaatatttgattaggaatttggggcgggaccctggtctggcacaggcacgcacactctcagtagactctttcactcctctctctcttcctctctcacacgttctccaacccaaggaggccagacagagggacgtggtcactctctgaaaagttcaacttgagagttctccatcagcagcttctgcaccgtggtggacgtcgtgaacttctccaagctgcaggtgctgcgcctggacgggaacgagatcaagcgcagcgccatgcctgccgacgcgcccctctgcctgcgccttgccagcctcatcgagatctgagcagccctggcaccggatgcctcttctgtgccttaagcagagtcaggagaccccaaggcatgtgagcatctgcccagcaacctgtggagacaacccacactgtgtctgagggtgaaaggacaccaggagtcacttctatacctccctaacctcacccctggaaagccaccagattggaggtcaccagcatgatgataatattcatgacctgatgtgggaggagacagccaacctcaggcttagatcaatgtatagggctatattttggcagctgggtagctctttgaaggtggataagacttcagaagaggaaaggccagactttgcttaccatcagcatctgcaatgggccaaacacacctcaaattggctgagttgagaaagcagccccagtagttccattcttgcccagcactttctgcattccaaacagcatcctacctgggtttttatccacaaaggtagcggccacatggtttttaaagtatgagaaacacagtttgtcctctccttttatccaagcaggaagattctatatcctgatggtagagacagactccaggcagccctggacttgctagcccaaagaaggaggatgtggttaatctgtttcacctggtttgtcctaaggccatagttaaaaagtaccagctctggctggggtccgtgaagcccaggccaggcagccaaatcttgcctgtgctgggcatacaaccctctgctttcacatctctgagctatatcctcattagtgaaggtggcttttgctttatagtttggctggggagcacttaattcttcccatttcaaaaggtaatgttgcctggggcttaacccacctgccctttgggcaaggttgggacaaagccatctgggcagtcaggggcaaggactgttggaggagagttagcccaagtataggctctgcccagatgccatcacatccctgatactgtgtatgctttgaagcaccttccctgagaagggaagaggggatctttggactaggttcttggctccagacctggaatccacaaaagccaaaccagctcatttcaacaaaggagctccgatgtgaggggcaaggctgccccctgccccagggctcttcagaaagcatctgcatgtgaacaccatcatgcctttataaaggatccttattacaggaaaagcatgagtggtggctaacctgaccaataaagttattttatgattgca

SEQ ID NO: 320932 - DNA, 965 bp, Homo sapiens
acagactaaggtacatcttgcgggaagtgcgctgttcctgacagggatactcctgggccgcaaaatgcttggcatccctaccagcattgcaatgtcctaatgagacctcaaattcgggtgattctctaaagtcgccctgtagtctatacttgtgccagtagtcgctcgcattccaaacagcatcctacctgggtttttatccacaaaggtagcggccacatggtttttaaagtatgagaaacacagtttgtcctctccttttatccaagcaggaagattctatatcctgatggtagagacagactccaggcagccctggacttgctagcccaaagaaggaggatgtggttaatctgtttcacctggtttgtcctaaggccatagttaaaaagtaccagctctggctggggtccgtgaagcccaggccaggcagccaaatcttgcctgtgctgggcatacaaccctctgctttcacatctctgagctatatcctcattagtgaaggtggcttttgctttatagtttggctggggagcacttaattcttcccatttcaaaaggtaatgttgcctggggcttaacccacctgccctttgggcaaggttgggacaaagccatctgggcagtcaggggcaaggactgttggaggagagttagcccaagtataggctctgcccagatgccatcacatccctgatactgtgtatgctttgaagcaccttccctgagaagggaagaggggatctttggactaggttcttggctccagacctggaatccacaaaagccaaaccagctcatttcaacaaaggagctccgatgtgaggggcaaggctgccccctgccccagggctcttcagaaagcatctgcatgtgaacaccatcatgcctttataaaggatccttattacaggaaaagcatgagtggtggctaacctgaccaataaagttattttatgattgca

SEQ ID NO: 320933 - DNA, 2813 bp, Homo sapiens
ctcttaccaaaccctggccctccccatccctgcatctgcctttgtggctttaatgagaaatccaggcgcttcataagagactgtacaaataacttctagggcgccactaactcattcagcagaaagggacccagggctgccaatgtttcagggaagataagtgagtggaaaaaaggtggtttttatagcgtcaggcggaccgaaggatttgcgtggttgagcgtgaactccgcccctgcagcagagctgaaaaaaaccaggatccgggttcctcagccccttttcacaatatttgattaggaatttggggcgggaccctggtctggcacaggcacgcacactctcagtagactctttcactcctctctctcttcctctctcacacgttctccaacccaaggaggccagacagagggacgtggtcactctctgaaaagttcaacttgagagacaaaatgcagtggacctccctcctgctgctggcagggctcttctccctctcccaggcccagtatgaagatgaccctcattggtggttccactacctccgcagccagcagtccacctactacgatccctatgacccttacccgtatgagacctacgagccttacccctatggggtggatgaagggccagcctacacctacggctctccatcccctccagatccccgcgactgcccccaggaatgcgactgcccacccaacttccccacggccatgtactgtgacaatcgcaacctcaagtacctgcccttcgttccctcccgcatgaagtatgtgtacttccagaacaaccagatcacctccatccaggaaggcgtctttgacaatgccacagggctgctctggattgctctccacggcaaccagatcaccagtgataaggtgggcaggaaggtcttctccaagctgaggcacctggagaggctgtacctggaccacaacaacctgacccggatgcccggtcccctgcctcgatccctgagagagctccatctcgaccacaaccagatctcacgggtccccaacaatgctctggaggggctggagaacctcacggccttgtacctccaacacaatgagatccaggaagtgggcagttccatgaggggcctccggtcactgatcttgctggacctgagttataaccaccttcggaaggtgcctgatgggctgccctcagctcttgagcagctgtacatggagcacaacaatgtctacaccgtccccgatagctacttccggggggcgcccaagctgctgtatgtgcggctgtcccacaacagtctaaccaacaatggcctggcctccaacaccttcaattccagcagcctccttgagctagacctctcctacaaccagctgcagaagatccccccagtcaacaccaacctggagaacctctacctccaaggcaataggatcaatgagttctccatcagcagcttctgcaccgtggtggacgtcgtgaacttctccaagctgcaggtgctgcgcctggacgggaacgagatcaagcgcagcgccatgcctgccgacgcgcccctctgcctgcgccttgccagcctcatcgagatctgagcagccctggcaccgggtactgggcggagagcccccgtggcatttggcttgatggtttggtttggcttttgctggaaggtccaggatggaccatgtgacagaagtccacgggcaccctctgtagtcttctttcctgtaggtggggttagggggggcgatcagggacaggcagccttctgctgaggacataggcagaagctcactcttttccagggacagaagtggtggtagatggaaggatccctggatgttccaaccccataaatctcacggctcttaagttcttcccaatgatctgaggtcatggaacttcaaaagtggcatgggcaatagtatataaccatacttttctaacaatccctggctgtctgtgagcagcacttgacagctctccctctgtgctgggctggtcgtgcagttactctgggctcccatttgttgcttctcaaaatatacctcttgcccagctgcctcttctgaaatccacttcacccactccactttcctccacagatgcctcttctgtgccttaagcagagtcaggagaccccaaggcatgtgagcatctgcccagcaacctgtggagacaacccacactgtgtctgagggtgaaaggacaccaggagtcacttctatacctccctaacctcacccctggaaagccaccagattggaggtcaccagcatgatgataatattcatgacctgatgtgggaggagacagccaacctcaggcttagatcaatgtatagggctatattttggcagctgggtagctctttgaaggtggataagacttcagaagaggaaaggccagactttgcttaccatcagcatctgcaatgggccaaacacacctcaaattggctgagttgagaaagcagccccagtagttccattcttgcccagcactttctgcattccaaacagcatcctacctgggtttttatccacaaaggtagcggccacatggtttttaaagtatgagaaacacagtttgtcctctccttttatccaagcaggaagattctatatcctgatggtagaggacgaagacgcagtcttctcccatcagaattgtctgttccgtgataggattagccatgaaatgttggccatgattatgtggaacacagatcatcagcattggggctatttccagcaagactgtactaaacacagtaacttgtatccttatgtatctgatgacgcagtctggtccggctg

SEQ ID NO: 320934 - DNA, 1883 bp, Homo sapiens
ctcttaccaaaccctggccctccccatccctgcatctgcctttgtggctttaatgagaaatccaggcgcttcataagagactgtacaaataacttctagggcgccactaactcattcagcagaaagggacccagggctgccaatgtttcagggaagataagtgagtggaaaaaaggtggtttttatagcgtcaggcggaccgaaggatttgcgtggttgagcgtgaactccgcccctgcagcagagctgaaaaaaaccaggatccgggttcctcagccccttttcacaatatttgattaggaatttggggcgggaccctggtctggcacaggcacgcacactctcagtagactctttcactcctctctctcttcctctctcacacgttctccaacccaaggaggccagacagagggacgtggtcactctctgaaaagttcaacttgagagacaaaatgcagtggacctccctcctgctgctggcagggctcttctccctctcccaggcccagtatgaagatgaccctcattggtggttccactacctccgcagccagcagtccacctactacgatccctatgacccttacccgtatgagacctacgagccttacccctatggggtggatgaagggccagcctacacctacggctctccatcccctccagatccccgcgactgcccccaggaatgcgactgcccacccaacttccccacggccatgtactgtgacaatcgcaacctcaagtacctgcccttcgttccctcccgcatgaagtatgtgtacttccagaacaaccagatcacctccatccaggaaggcgtctttgacaatgccacagggctgctctggattgctctccacggcaaccagatcaccagtgataaggtgggcaggaaggtcttctccaagctgaggcacctggagaggctgtacctggaccacaacaacctgacccggatgcccggtcccctgcctcgatccctgagagagctccatctcgaccacaaccagatctcacgggtccccaacaatgctctggaggggctggagaacctcacggccttgtacctccaacacaatgagatccaggaagtgggcagttccatgaggggcctccggtcactgatcttgctggacctgagttataaccaccttcggaaggtgcctgatgggctgccctcagctcttgagcagctgtacatggagcacaacaatgtctacaccgtccccgatagctacttccggggggcgcccaagctgctgtatgtgcggctgtcccacaacagtctaaccaacaatggcctggcctccaacaccttcaattccagcagcctccttgagctagacctctcctacaaccagctgcagaagatccccccagtcaacaccaacctggagaacctctacctccaaggcaataggatcaatgagttctccatcagcagcttctgcaccgtggtggacgtcgtgaacttctccaagctgcaggtgctgcgcctggacgggaacgagatcaagcgcagcgccatgcctgccgacgcgcccctctgcctgcgccttgccagcctcatcgagatctgagcagccctggcaccgggtactgggcggagagcccccgtggcatttggcttgatggtttggtttggcttttgctggaaggtccaggatggaccatgtgacagaagtccacgggcaccctctgtagtcttctttcctgtaggtggggttagggggggcgatcagggacaggcagccttctgctgaggacataggcagaagctcactcttttccagggacagaagtggtggtagatggaaggatccctggatgttccaaccccataaatcccagggttcccaataaaaatgtgaaaacca

SEQ ID NO: 320935 - DNA, 285 bp, Homo sapiens
gttctctcccgcttcttgcagagacaaaatgcagtggacctccctcctgctgctggcagggctcttctccctctcccaggcccagtatgaagatgaccctcattggtggttccactacctccgcagccagcagtccacctactacgatccctatgacccttacccgtatgagacctacgagccttacccctatggggtggatgaagggccagcctacacctacggctctccatcccctccagatccccgcgactgcccccaggaatgcgactgcccacccaactt

SEQ ID NO: 320936 - DNA, 3301 bp, Homo sapiens
ctcttaccaaaccctggccctccccatccctgcatctgcctttgtggctttaatgagaaatccaggcgcttcataagagactgtacaaataacttctagggcgccactaactcattcagcagaaagggacccagggctgccaatgtttcagggaagataagtgagtggaaaaaaggtggtttttatagcgtcaggcggaccgaaggatttgcgtggttgagcgtgaactccgcccctgcagcagagctgaaaaaaaccaggatccgggttcctcagccccttttcacaatatttgattaggaatttggggcgggaccctggtctggcacaggcacgcacactctcagtagactctttcactcctctctctcttcctctctcacacgttctccaacccaaggaggccagacagagggacgtggtcactctctgaaaagttcaacttgagagacaaaatgcagtggacctccctcctgctgctggcagggctcttctccctctcccaggcccagtatgaagatgaccctcattggtggttccactacctccgcagccagcagtccacctactacgatccctatgacccttacccgtatgagacctacgagccttacccctatggggtggatgaagggccagcctacacctacggctctccatcccctccagatccccgcgactgcccccaggaatgcgactgcccacccaacttccccacggccatgtactgtgacaatcgcaacctcaagtacctgcccttcgttccctcccgcatgaagtatgtgtacttccagaacaaccagatcacctccatccaggaaggcgtctttgacaatgccacagggctgctctggattgctctccacggcaaccagatcaccagtgataaggtgggcaggaaggtcttctccaagctgaggcacctggagaggctgtacctggaccacaacaacctgacccggatgcccggtcccctgcctcgatccctgagagagctccatctcgaccacaaccagatctcacgggtccccaacaatgctctggaggggctggagaacctcacggccttgtacctccaacacaatgagatccaggaagtgggcagttccatgaggggcctccggtcactgatcttgctggacctgagttataaccaccttcggaaggtgcctgatgggctgccctcagctcttgagcagctgtacatggagcacaacaatgtctacaccgtccccgatagctacttccggggggcgcccaagctgctgtatgtgcggctgtcccacaacagtctaaccaacaatggcctggcctccaacaccttcaattccagcagcctccttgagctagacctctcctacaaccagctgcagaagatccccccagtcaacaccaacctggagaacctctacctccaaggcaataggatcaatgagttctccatcagcagcttctgcaccgtggtggacgtcgtgaacttctccaagctgcaggtgctgcgcctggacgggaacgagatcaagcgcagcgccatgcctgccgacgcgcccctctgcctgcgccttgccagcctcatcgagatctgagcagccctggcaccgggtactgggcggagagcccccgtggcatttggcttgatggtttggtttggcttttgctggaaggtccaggatggaccatgtgacagaagtccacgggcaccctctgtagtcttctttcctgtaggtggggttagggggggcgatcagggacaggcagccttctgctgaggacataggcagaagctcactcttttccagggacagaagtggtggtagatggaaggatccctggatgttccaaccccataaatctcacggctcttaagttcttcccaatgatctgaggtcatggaacttcaaaagtggcatgggcaatagtatataaccatacttttctaacaatccctggctgtctgtgagcagcacttgacagctctccctctgtgctgggctggtcgtgcagttactctgggctcccatttgttgcttctcaaaatatacctcttgcccagctgcctcttctgaaatccacttcacccactccactttcctccacagatgcctcttctgtgccttaagcagagtcaggagaccccaaggcatgtgagcatctgcccagcaacctgtggagacaacccacactgtgtctgagggtgaaaggacaccaggagtcacttctatacctccctaacctcacccctggaaagccaccagattggaggtcaccagcatgatgataatattcatgacctgatgtgggaggagacagccaacctcaggcttagatcaatgtatagggctatattttggcagctgggtagctctttgaaggtggataagacttcagaagaggaaaggccagactttgcttaccatcagcatctgcaatgggccaaacacacctcaaattggctgagttgagaaagcagccccagtagttccattcttgcccagcactttctgcattccaaacagcatcctacctgggtttttatccacaaaggtagcggccacatggtttttaaagtatgagaaacacagtttgtcctctccttttatccaagcaggaagattctatatcctgatggtagagacagactccaggcagccctggacttgctagcccaaagaaggaggatgtggttaatctgtttcacctggtttgtcctaaggccatagttaaaaagtaccagctctggctggggtccgtgaagcccaggccaggcagccaaatcttgcctgtgctgggcatacaaccctctgctttcacatctctgagctatatcctcattagtgaaggtggcttttgctttatagtttggctggggagcacttaattcttcccatttcaaaaggtaatgttgcctggggcttaacccacctgccctttgggcaaggttgggacaaagccatctgggcagtcaggggcaaggactgttggaggagagttagcccaagtataggctctgcccagatgccatcacatccctgatactgtgtatgctttgaagcaccttccctgagaagggaagaggggatctttggactaggttcttggctccagacctggaatccacaaaagccaaaccagctcatttcaacaaaggagctccgatgtgaggggcaaggctgccccctgccccagggctcttcagaaagcatctgcatgtgaacaccatcatgcctttataaaggatccttattacaggaaaagcatgagtggtggctaacctgaccaataaagttattttatgattgca

SEQ ID NO: 320937 - DNA, 3074 bp, Homo sapiens
ctcttaccaaaccctggccctccccatccctgcatctgcctttgtggctttaatgagaaatccaggcgcttcataagagactgtacaaataacttctagggcgccactaactcattcagcagaaagggacccagggctgccaatgtttcagggaagataagtgagtggaaaaaaggtggtttttatagcgtcaggcggaccgaaggatttgcgtggttgagcgtgaactccgcccctgcagcagagctgaaaaaaaccaggatccgggttcctcagccccttttcacaatatttgattaggaatttggggcgggaccctggtctggcacaggcacgcacactctcagtagactctttcactcctctctctcttcctctctcacacgttctccaacccaaggaggccagacagagggacgtggtcactctctgaaaagttcaacttgagagacaaaatgcagtggacctccctcctgctgctggcagggctcttctccctctcccaggcccagtatgaagatgaccctcattggtggttccactacctccgcagccagcagtccacctactacgatccctatgacccttacccgtatgagacctacgagccttacccctatggggtggatgaagggccagcctacacctacggctctccatcccctccagatccccgcgactgcccccaggaatgcgactgcccacccaacttccccacggccatgtactgtgacaatcgcaacctcaagtacctgcccttcgttccctcccgcatgaagtatgtgtacttccagaacaaccagatcacctccatccaggaaggcgtctttgacaatgccacagggctgctctggattgctctccacggcaaccagatcaccagtgataaggtgggcaggaaggtcttctccaagctgaggcacctggagaggctgtacctggaccacaacaacctgacccggatgcccggtcccctgcctcgatccctgagagagctccatctcgaccacaaccagatctcacgggtccccaacaatgctctggaggggctggagaacctcacggccttgtacctccaacacaatgagatccaggaagtgggcagttccatgaggggcctccggtcactgatcttgctggacctgagttataaccaccttcggaaggtgcctgatgggctgccctcagctcttgagcagctgtacatggagcacaacaatgtctacaccgtccccgatagctacttccggggggcgcccaagctgctgtatgtgcggctgtcccacaacagtctaaccaacaatggcctggcctccaacaccttcaattccagcagcctccttgagctagacctctcctacaaccagctgcagaagatccccccagtcaacaccaacctggagaacctctacctccaaggcaataggatcaatgagttctccatcagcagcttctgcaccgtggtggacgtcgtgaacttctccaagctgcaggtgctgcgcctggacgggaacgagatcaagcgcagcgccatgcctgccgacgcgcccctctgcctgcgccttgccagcctcatcgagatctgagcagccctggcaccgggtactgggcggagagcccccgtggcatttggcttgatggtttggtttggcttttgctggaaggtccaggatggaccatgtgacagaagtccacgggcaccctctgtagtcttctttcctgtaggtggggttagggggggcgatcagggacaggcagccttctgctgaggacataggcagaagctcactcttttccagggacagaagtggtggtagatggaaggatccctggatgttccaaccccataaatctcacggctcttaagttcttcccaatgatctgaggtcatggaacttcaaaagtggcatgggcaatagtatataaccatacttttctaacaatccctggctgtctgtgagcagcacttgacagctctccctctgtgctgggctggtcgtgcagttactctgggctcccatttgttgcttctcaaaatatacctcttgcccagctgcctcttctgaaatccacttcacccactccactttcctccacagatgcctcttctgtgccttaagcagagtcaggagaccccaaggcatgtgagcatctgcccagcaacctgtggagacaacccacactgtgtctgagggtgaaaggacaccaggagtcacttctatacctccctaacctcacccctggaaagccaccagattggaggtcaccagcatgatgataatattcatgacctgatgtgggaggagacagccaacctcaggcttagatcaatgtatagggctatattttggcagctgggtagctctttgaaggtggataagacttcagaagaggaaaggccagactttgcttaccatcagcatctgcaatgggccaaacacacctcaaattggctgagttgagaaagcagccccagtagttccattcttgcccagcactttctgcattccaaacagcatcctacctgggtttttatccacaaaggtagcggccacatggtttttaaagtatgagaaacacagtttgtcctctccttttatccaagcaggaagattctatatcctgatggtagagacagactccaggcagccctggacttgctagcccaaagaaggaggatgtggttaatctgtttcacctggtttgtcctaaggccatagttaaaaagtaccagctctggctggggtccgtgaagcccaggccaggcagccaaatcttgcctgtgctgggcatacaaccctctgctttcacatctctgagctatatcctcattagtgaaggtggcttttgctttatagtttggctggggagcacttaattcttcccatttcaaaagccaaaccagctcatttcaacaaaggagctccgatgtgaggggcaaggctgccccctgccccagggctcttcagaaagcatctgcatgtgaacaccatcatgcctttataaaggatccttattacaggaaaagcatgagtggtggctaacctgaccaataaagttattttatgattgca

SEQ ID NO: 320938 - DNA, 2563 bp, Homo sapiens
ctcttaccaaaccctggccctccccatccctgcatctgcctttgtggctttaatgagaaatccaggcgcttcataagagactgtacaaataacttctagggcgccactaactcattcagcagaaagggacccagggctgccaatgtttcagggaagataagtgagtggaaaaaaggtggtttttatagcgtcaggcggaccgaaggatttgcgtggttgagcgtgaactccgcccctgcagcagagctgaaaaaaaccaggatccgggttcctcagccccttttcacaatatttgattaggaatttggggcgggaccctggtctggcacaggcacgcacactctcagtagactctttcactcctctctctcttcctctctcacacgttctccaacccaaggaggccagacagagggacgtggtcactctctgaaaagttcaacttgagagacaaaatgcagtggacctccctcctgctgctggcagggctcttctccctctcccaggcccagtatgaagatgaccctcattggtggttccactacctccgcagccagcagtccacctactacgatccctatgacccttacccgtatgagacctacgagccttacccctatggggtggatgaagggccagcctacacctacggctctccatcccctccagatccccgcgactgcccccaggaatgcgactgcccacccaacttccccacggccatgtactgtgacaatcgcaacctcaagtacctgcccttcgttccctcccgcatgaagtatgtgtacttccagaacaaccagatcacctccatccaggaaggcgtctttgacaatgccacagggctgctctggattgctctccacggcaaccagatcaccagtgataaggtgggcaggaaggtcttctccaagctgaggcacctggagaggctgtacctggaccacaacaacctgacccggatgcccggtcccctgcctcgatccctgagagagctccatctcgaccacaaccagatctcacgggtccccaacaatgctctggaggggctggagaacctcacggccttgtacctccaacacaatgagatccaggaagtgggcagttccatgaggggcctccggtcactgatcttgctggacctgagttataaccaccttcggaaggtgcctgatgggctgccctcagctcttgagcagctgtacatggagcacaacaatgtctacaccgtccccgatagctacttccggggggcgcccaagctgctgtatgtgcggctgtcccacaacagtctaaccaacaatggcctggcctccaacaccttcaattccagcagcctccttgagctagacctctcctacaaccagctgcagaagatccccccagtcaacaccaacctggagaacctctacctccaaggcaataggatcaatgagttctccatcagcagcttctgcaccgtggtggacgtcgtgaacttctccaagctgcaggtgctgcgcctggacgggaacgagatcaagcgcagcgccatgcctgccgacgcgcccctctgcctgcgccttgccagcctcatcgagatctgagcagccctggcaccgggtactgggcggagagcccccgtggcatttggcttgatggtttggtttggcttttgctggaaggtccaggatggaccatgtgacagaagtccacgggcaccctctgtagtcttctttcctgtaggtggggttagggggggcgatcagggacaggcagccttctgctgaggacataggcagaagctcactcttttccagggacagaagtggtggtagatggaaggatccctggatgttccaaccccataaatctcacggctcttaagttcttcccaatgatctgaggtcatggaacttcaaaagtggcatgggcaatagtatataaccatacttttctaacaatccctggctgtctgtgagcagcacttgacagctctccctctgtgctgggctggtcgtgcagttactctgggctcccatttgttgcttctcaaaatatacctcttgcccagctgcctcttctgaaatccacttcacccactccactttcctccacagatgcctcttctgtgccttaagcagagtcaggagaccccaaggcatgtgagcatctgcccagcaacctgtggagacaacccacactgtgtctgagggtgaaaggacaccaggagtcacttctatacctccctaacctcacccctggaaagccaccagattggaggtcaccagcatgatgataatattcatgacctgatactgtgtatgctttgaagcaccttccctgagaagggaagaggggatctttggactaggttcttggctccagacctggaatccacaaaagccaaaccagctcatttcaacaaaggagctccgatgtgaggggcaaggctgccccctgccccagggctcttcagaaagcatctgcatgtgaacaccatcatgcctttataaaggatccttattacaggaaaagcatgagtggtggctaacctgaccaataaagttattttatgattgca

SEQ ID NO: 320939 - DNA, 2006 bp, Homo sapiens
  misc_feature (1949)..(1949): n is a, c, g, or t
  misc_feature (1998)..(1998): n is a, c, g, or t
ctcttaccaaaccctggccctccccatccctgcatctgcctttgtggctttaatgagaaatccaggcgcttcataagagactgtacaaataacttctagggcgccactaactcattcagcagaaagggacccagggctgccaatgtttcagggaagataagtgagtggaaaaaaggtggtttttatagcgtcaggcggaccgaaggatttgcgtggttgagcgtgaactccgcccctgcagcagagctgaaaaaaaccaggatccgggttcctcagccccttttcacaatatttgattaggaatttggggcgggaccctggtctggcacaggcacgcacactctcagtagactctttcactcctctctctcttcctctctcacacgttctccaacccaaggaggccagacagagggacgtggtcactctctgaaaagttcaacttgagagacaaaatgcagtggacctccctcctgctgctggcagggctcttctccctctcccaggcccagtatgaagatgaccctcattggtggttccactacctccgcagccagcagtccacctactacgatccctatgacccttacccgtatgagacctacgagccttacccctatggggtggatgaagggccagcctacacctacggctctccatcccctccagatccccgcgactgcccccaggaatgcgactgcccacccaacttccccacggccatgtactgtgacaatcgcaacctcaagtacctgcccttcgttccctcccgcatgaagtatgtgtacttccagaacaaccagatcacctccatccaggaaggcgtctttgacaatgccacagggctgctctggattgctctccacggcaaccagatcaccagtgataaggtgggcaggaaggtcttctccaagctgaggcacctggagaggctgtacctggaccacaacaacctgacccggatgcccggtcccctgcctcgatccctgagagagctccatctcgaccacaaccagatctcacgggtccccaacaatgctctggaggggctggagaacctcacggccttgtacctccaacacaatgagatccaggaagtgggcagttccatgaggggcctccggtcactgatcttgctggacctgagttataaccaccttcggaaggtgcctgatgggctgccctcagctcttgagcagctgtacatggagcacaacaatgtctacaccgtccccgatagctacttccggggggcgcccaagctgctgtatgtgcggctgtcccacaacagtctaaccaacaatggcctggcctccaacaccttcaattccagcagcctccttgagctagacctctcctacaaccagctgcagaagatccccccagtcaacaccaacctggagaacctctacctccaaggcaataggatcaatgagttctccatcagcagcttctgcaccgtggtggacgtcgtgaacttctccaagctgcaggtgctgcgcctggacgggaacgagatcaagcgcagcgccatgcctgccgacgcgcccctctgcctgcgccttgccagcctcatcgagatctgagcagccctggcaccgggtactgggcggagagcccccgtggcatttggcttgatggtttggtttggcttttgctggaaggtccaggatggaccatgtgacagaagtccacgggcaccctctgtagtcttctttcctgtaggtggggttagggggggcgatcagggacaggcagccttctgctgaggacataggcagaagctcactcttttccagggacagaagtggtggtagatggaaggatccctggatgttccaaccccataaatctcacggctcttaagttcttcccaatgacccttacccgtatgagacctacgagccttaccccctatggtgggaatgaagggccagcctacacctacnggctctcaatcccttcaagattcccgggaattgccccaagaattgcgantgccaacc

SEQ ID NO: 320940 - DNA, 492 bp, Homo sapiens
gatcgtgccattgcactccagtctaggccacaacagcaaaactccgtctaaaaataaataaataaataaaactgaatgaatataaacagaaaccacagatgctattacatattaaattgataatataaccattacaggcgtgagccaccaagcccggcctaaaacatttaaaaatgtttattttaaacatacataagacatgcacacataaagatacgcatagcatgattgagggcttggtgttttgtttctgtaacactggatttgaaacgaaactataatgagaatgtatagcagggctgggcgaatgacaggcttgcttatgactggagggtcaagggctattgagtgcaaaagctggatgtaatcagattagctcagtgttttgtttttatagctatgcattttagcgtttaaaccatggtaaagaacagcttttaaaaaaaaatcgcttctcagccttttggctaagctcaagtgtaaaaaaaaaaa

SEQ ID NO: 320941 - DNA, 507 bp, Homo sapiens
  misc_feature (31)..(31): n is a, c, g, or t
  misc_feature (98)..(98): n is a, c, g, or t
ttttgggtagatgttaagggtgaccacaggntggtccaagtgcggtgctgtttacaactaattgatcacagctacctaaagatttatttgttcttctncattcctgttgcttcacttgactagccttaaaaaaaaaaaagtggccattacaggcgtgagccaccaagcccggcctaaaacatttaaaaatgtttattttaaacatacataagacatgcacacataaagatacgcatagcatgattgagggcttggtgttttgtttctgtaacactggatttgaaacgaaactataatgagaatgtatagcagggctgggcgaatgacaggcttgcttatgactggagggtcaagggctattgagtgcaaaagctggatgtaatcagattagctcagtgttttgtttttatagctatgcattttagcgtttaaaccatggtaaagaacagcttttaaaaaaaaatcgcttctcagccttttggctaagctcaagtgtaaaaaaaaaaa

SEQ ID NO: 320942 - DNA, 680 bp, Homo sapiens
tacaggcgtgagccaccgcgcccggccagcattcgtatatgtaataataataagtggcaagtaggtaccttctcgtagaaataataatcacatttcttaacaggtattaaggacaaggatcattgttctcctgttcactgttgtattctcattgcccagcactacatttggcacatggtggatactttcacttggttggatgaattttcaacatttagagactttaaaaaaatcttatttcactaggatagggaattggccagttcaataatttttctatcagaccctgacacaactttttttttcttttaaaaatatattacaggcgtgagccaccaagcccggcctaaaacatttaaaaatgtttattttaaacatacataagacatgcacacataaagatacgcatagcatgattgagggcttggtgttttgtttctgtaacactggatttgaaacgaaactataatgagaatgtatagcagggctgggcgaatgacaggcttgcttatgactggagggtcaagggctattgagtgcaaaagctggatgtaatcagattagctcagtgttttgtttttatagctatgcattttagcgtttaaaccatggtaaagaacagcttttaaaaaaaaatcgcttctcagccttttggctaagctcaagtgtaaaaaaaaaaa

SEQ ID NO: 320943 - DNA, 281 bp, Homo sapiens
aaaaaaagtatgattacacacacacgcagacttacacacacttaaaaggacaacagtaaagcgaatttacaaaccaggccaagaaagagattattaaatctcagaaagctgtgtgcctcttctaaactgcatcctcctctcccaccaatactgtctccgtggatttgactgcgtatacatcttttccagaaaatatatttcctaaattttggtaattatttgtgaatgaactcaggcgcttcagtatttttggaaacaatctttttctgtattgattcaag

SEQ ID NO: 320944 - DNA, 257 bp, Homo sapiens
atggcagaattacattgatgaagaacatatgtgtgactgccagggataacacaggtagtgatagaacaattctgtgtcctgattgtggtgttattacacaaatctctacatataaaatctcatagaactagatacccccccataatacagtcagccctctgtatctatgggttctgcatttgtgaactcaacaacttatggatcaaaaatattcagagaaaaattgtatctttactgaacatgtacagacttttctt

SEQ ID NO: 320945 - DNA, 1562 bp, Homo sapiens
atgaacacctttctgcccgtggacgccgccgaagaagcatcgttaaagtctctcttctccctgccgtcatgtctaagtcagagtctcctaaagagcccaaacagctgaggaagctcttcattggagggttgagctttgaaacaaccaatgagagtctgaggagccattttgagcaatggggaacgctcatggactgtgtggtaatgagagatccaaacaccaagtgctccaggggctttgggtttgtcacatatgccactgtggaggaggtggatgcagctatgaatgcaaggccacacaaggtggatggaagagttgtggaatcaaagagagctgtttcaagagaagattctcaaagaccaggtgcccacttaactgtgaaaaagatatttgttggtggcattaaagaagacactgaagaacatcacctaagagattattttgaacagtatggaaaaattgaagtgattgaaatcatgactgaccgaggcagtggcaagaaaaggggctttgcctttgtaacctttgacgaccatgactccgtggataagattgtcattcagaaataccatactgtgaatggccacaactgtgaagttagaaaagccctgtcaaagcaagagatggctagtgcttcatccagccaaagaggtcgaagtggttctggaaactttggtggtggtcgtggaggtggtttcggtgggaatgacaacttcggtcgtggaggaaacttcagtggtcgtggtggctttggtggcagccgtggtggtggtggatatggtggcagtggggatggctataatggatttggtaatgatggaagcaattttggaggtggtggaagctacaatgattttgggaattacaacaatcagtcttcaaattttggacccatgaagggaggaaattttggaggcagaagctctggcccctatggcggtggaggccaatactttgcaaaacacgaaacaaggtggctatggcggttccagcagcagcagtagctatggcagtggcagaagatttaattaggaaacaaagcttagcaggagaggagagccagagaagtgacagggaagctacaggttacaagagatttgtgaactcagccaagcacagtggtggcagggcctagctgctacaaagaagacgtgttttagacacatactcatgtgtatgggcaaaaaactcgaggactgtatttgtgactagctgtataacaggttattttaatttctattctgcggaaagtgtaaagcattccaacaaagggttttaatgtagttttttttttgcacccatgctgttgattattaaatgtaatagtctgattgtgacactgaataaatgtctttttttaaaaaaaataaaataaaaccgatgaacattcaaaatgaaaatagagcttaatcaatttaccaactgtatttaaaaataggtacgggggtatgaattttagaaaatgctttcatgtggtggaattttttcttactagtttttataataacaaatcataatttaaggaaaacttgttgttttgtaaaagttttaactttttagtt

SEQ ID NO: 320946 - DNA, 510 bp, Homo sapiens
atggcaaaaccccatctctacaaaaaatacaaaaattagtcaggcgtagtggcaggcgtctgtaatctcagctattcaggaggctgagacaggagaatcgcttgaacccaggaggcagaggttgtagtgagctgagactgtgccactgcactccagtctgggtgacagagcaagactctgtctcagaaaaagaaaaaaagagatgtaacataacagagttattctcgaaacattgtagtttcatttcaagatcaaataccttactaaatacattaaaagcactatttattatgaaatgttggtccacttaagtagcatttttctggggtcagtcttcctcagtttgggctgatctcctctattcaaacgagtatcacaaacacaaatggctaataactgttagggtggcctagacttcacttgtccttcagtatccgttttcttcttctcccacagtaaaataactttcatctgggcaaatgtccacctagaataagactacatttccca

SEQ ID NO: 320947 - DNA, 2524 bp, Homo sapiens
agccggaagtggcgcacagccctagcagcaacaacagttttccacgtgcgcgtagggcgccgggatcacgtggggaggcagaagccaatggggaagcgtttcgtgtaggtcttctgaggtggtggcgccagcggctacctcctgcctgtgaggagctggctgagaggggactgggcgccggcggggaaggaggagcgctaggtcggtgtacgaccgagattagggtgcgtgccagctccgggaggccgcggtgaggggccgggcccaagctgccgacccgagccgatcgtcagggtcgccagcgcctcagctctgtggaggagcagcagtagtcggagggtgcaggatattagaaatggctactccccagtcaattttcatctttgcaatctgcattttaatgataacagaattaattctggcctcaaaaagctactatgatatcttaggtgtgccaaaatcggcatcagagcgccaaatcaagaaggcctttcacaagttggccatgaagtaccaccctgacaaaaataagagcccggatgctgaagcaaaattcagagagattgcagaagcatatgaaacactctcagatgctaatagacgaaaagagtatgatacacttggacacagtgcttttactagtggtaaaggacaaagaggtagtggaagttcttttgagcagtcatttaacttcaattttgatgacttatttaaagactttggcttttttggtcaaaaccaaaacactggatccaagaagcgttttgaaaatcatttccagacacgccaggatggtggttccagtagacaaaggcatcatttccaagaattttcttttggaggtggattatttgatgacatgtttgaagatatggagaaaatgttttcttttagtggttttgactctaccaatcagcatacagtacagactgaaaatagatttcatggatctagcaagcactgcaggactgtcactcaacgaagaggaaatatggttactacatacactgactgttcaggacagtagttcttattctattctcactaaatccaactggttgactcttcctcattatctttgatgctaaacaattttctgtgaactattttgacaagtgcatgatttcactttaaacaatttgatatagctattaaatatatttaagggttttttttttttgacaaattcaacattcaacgagtagacaaaatgctaattatttccctgattaggaaagtttctttaaaaaacacgtaattttgcctagtgctttttctctacctgcccttgggctcactaatatcaccagtattattaccaagaaaatattgagtttacctgattaaactttaaaagttaattgtagatttaaattgtgtgaacctaatgatttttgcagtgaaacctttactaattcaaagttgcatgttctatgacatctgtgacttgcgttgcagagtgtacatgaaactgtataattgagtcattcagtaaaggagaacagtatcttggttaattgctactgaaaggttgagaaaggaatggtttgatatttaccacagcgctgtgcctttctacagtagaactggggtaaaggaaatggttttattgcccatagtcatttaggctggaaaaaagttgaaaacttaacgaaatattgccaagagattgttatgtgtttggttccagcctaaaaatgattttgtagtgttgaaatcatagctacttacatagctttttcatatttctttcttagttgttggcactcttaggtcttagtatggatttatgtgtttgtgtgtgtgtagtttatcctctctctcatctttatctagagattgactgatacctcattctgtttgtaaaaccagccagtaatttctgtgcaaccttactatgtgcaatatttttaaatcctgagaaatgtgtgcttttgttttcggatagacttatttctttagttctgcacttttccacattatactccatatgagtattaatcctatggatacatattaaaacaagtgtctcatacaacattgtatgtgagagaaatataaatatttacaacctgatattcgttgttgttttattgttaaaagtttattatgcaactctggaggtatagagggcatataagctatgggacatatgctgatcacaggctatattcatgaagttacttttgaccaacctgaaaactgataggattttgtttgtcatttggtaatttctactgcattcttaccatccttctctcacaaattttgatagcttgaagatctttttaattataattttgttgtatttgtttcctaggagcaagtgttcctgctgccagttctttcctctttaggcgtggttgagaaaaagcagaaactttacataaagctgtatttcttaatcatctttaatttgaaacttaagaaaatgaatttattctgttatatttatgtaacttatttcctggaagttatatctactagttttgtttgataataataaaattagctataccttgaa

SEQ ID NO: 320948 - DNA, 229 bp, Homo sapiens
ctcatacaacattgtatgtgagagaaatataaatatttatccataggattaatactcatatggagtataatgtggaaaagtgcagaactaaagaaataagtctatccgaaaacaaaagcacacttttccacattatactccatatgagtattaatcctatggatacatattaaaacaagtgtctcatacaacattgtatgtgagagaaatataaatatttacaacctga

SEQ ID NO: 320949 - DNA, 2796 bp, Homo sapiens
agccggaagtggcgcacagccctagcagcaacaacagttttccacgtgcgcgtagggcgccgggatcacgtggggaggcagaagccaatggggaagcgtttcgtgtaggtcttctgaggtggtggcgccagcggctacctcctgcctgtgaggagctggctgagaggggactgggcgccggcggggaaggaggagcgctaggtcggtgtacgaccgagattagggtgcgtgccagctccgggaggccgcggtgaggggccgggcccaagctgccgacccgagccgatcgtcagggtcgccagcgcctcagctctgtggaggagcagcagtagtcggagggtgcaggatattagaaatggctactccccagtcaattttcatctttgcaatctgcattttaatgataacagaattaattctggcctcaaaaagctactatgatatcttaggtgtgccaaaatcggcatcagagcgccaaatcaagaaggcctttcacaagttggccatgaagtaccaccctgacaaaaataagagcccggatgctgaagcaaaattcagagagattgcagaagcatatgaaacactctcagatgctaatagacgaaaagagtatgatacacttggacacagtgcttttactagtggtaaaggacaaagaggtagtggaagttcttttgagcagtcatttaacttcaattttgatgacttatttaaagactttggcttttttggtcaaaaccaaaacactggatccaagaagcgttttgaaaatcatttccagacacgccaggatggtggttccagtagacaaaggcatcatttccaagaattttcttttggaggtggattatttgatgacatgtttgaagatatggagaaaatgttttcttttagtggttttgactctaccaatcagcatacagtacagactgaaaatagatttcatggatctagcaagcactgcaggactgtcactcaacgaagaggaaatatggttactacatacactgactgttcaggacagtagttcttattctattctcactaaatccaactggttgactcttcctcattatctttgatgctaaacaattttctgtgaactattttgacaagtgcatgatttcactttaaacaatttgatatagctattaaatatatttaagggttttttttttttgacaaattcaacattcaacgagtagacaaaatgctaattatttccctgattaggaaagtttctttaaaaaacacgtaattttgcctagtgctttttctctacctgcccttgggctcactaatatcaccagtattattaccaagaaaatattgagtttacctgattaaactttaaaagttaattgtagatttaaattgtgtgaacctaatgatttttgcagtgaaacctttactaattcaaagttgcatgttctatgacatctgtgacttgcgttgcagagtgtacatgaaactgtataattgagtcattcagtaaaggagaacagtatcttggttaattgctactgaaaggttgagaaaggaatggtttgatatttaccacagcgctgtgcctttctacagtagaactggggtaaaggaaatggttttattgcccatagtcatttaggctggaaaaaagttgaaaacttaacgaaatattgccaagagattgttatgtgtttggttccagcctaaaaatgattttgtagtgttgaaatcatagctacttacatagctttttcatatttctttcttagttgttggcactcttaggtcttagtatggatttatgtgtttgtgtgtgtgtagtttatcctctctctcatctttatctagagattgactgatacctcattctgtttgtaaaaccagccagtaatttctgtgcaaccttactatgtgcaatatttttaaatcctgagaaatgtgtgcttttgttttcggatagacttatttctttagttctgcacttttccacattatactccatatgagtattaatcctatggatacatattaaaacaagtgtctcatacaacattgtatgtgagagaaatataaatatttacaacctgatattcgttgttgttttattgttaaaagtttattatgcaactctggaggtatagagggcatataagctatgggacatatgctgatcacaggctatattcatgaagttacttttgaccaacctgaaaactgataggattttgtttgtcatttggtaatttctactgcattcttaccatccttctctcacaaattttgatagcttgaagatctttttaattataattttgttgtatttgtttcctaggagcaagtgttcctgctgccagttctttcctctttaggcgtggttgagaaaaagcagaaactttacataaagctgtatttcttaatcatctttaatttgaaacttaagaaaatgaatttattctgttatatttatgtaacttatttcctggaagttatatctactagttttgtttgataataataaaattagctataccttgaaaaaaaaaaaaaaaaaaacccaaaatttaaacaaaacacaaaaactgacacaaaaaaacactgtttgggggccctcgggacccggaaaaaagttttttcgaaaacccctcgtgtgggggggcggagggccccatatgttatgcaacacgggcccacacgtgtgtgcacgagagaaaacctggcacgacacacggctgttgggttttccaccaaataaaaacgcgggcgaaccgagtcttcgacactccgaagggttcgaggacaaagggtcca

SEQ ID NO: 320950 - DNA, 1981 bp, Homo sapiens
agccggaagtggcgcacagccctagcagcaacaacagttttccacgtgcgcgtagggcgccgggatcacgtggggaggcagaagccaatggggaagcgtttcgtgtaggtcttctgaggtggtggcgccagcggctacctcctgcctgtgaggagctggctgagaggggactgggcgccggcggggaaggaggagcgctaggtcggtgtacgaccgagattagggtgcgtgccagctccgggaggccgcggtgaggggccgggcccaagctgccgacccgagccgatcgtcagggtcgccagcgcctcagctctgtggaggagcagcagtagtcggagggtgcaggatattagaaatggctactccccagtcaattttcatctttgcaatctgcattttaatgataacagaattaattctggcctcaaaaagctactatgatatcttaggtgtgccaaaatcggcatcagagcgccaaatcaagaaggcctttcacaagttggccatgaagtaccaccctgacaaaaataagagcccggatgctgaagcaaaattcagagagattgcagaagcatatgaaacactctcagatgctaatagacgaaaagagtatgatacacttggacacagtgcttttactagtggtaaaggacaaagaggtagtggaagttcttttgagcagtcatttaacttcaattttgatgacttatttaaagactttggcttttttggtcaaaaccaaaacactggatccaagaagcgttttgaaaatcatttccagacacgccaggatggtggttccagtagacaaaggcatcatttccaagaattttcttttggaggtggattatttgatgacatgtttgaagatatggagaaaatgttttcttttagtggttttgactctaccaatcagcatacagtacagactgaaaatagatttcatggatctagcaagcactgcaggactgtcactcaacgaagaggaaatatggttactacatacactgactgttcaggacagtagttcttattctattctcactaaatccaactggttgactcttcctcattatctttgatgctaaacaattttctgtgaactattttgacaagtgcatgatttcactttaaacaatttgatatagctattaaatatatttaagggttttttttttttgacaaattcaacattcaacgagtagacaaaatgctaattatttccctgattaggaaagtttctttaaaaaacacgtaattttgcctagtgctttttctctacctgcccttgggctcactaatatcaccagtattattaccaagaaaatattgagtttacctgattaaactttaaaagttaattgtagatttaaattgtgtgaacctaatgatttttgcagtgaaacctttactaattcaaagttgcatgttctatgacatctgtgacttgcgttgcagagtgtacatgaaactgtataattgagtcattcagtaaaggagaacagtatcttggttaattgctactgaaaggttgagaaaggaatggtttgatatttaccacagcgctgtgcctttctacagtagaactggggtaaaggaaatggttttattgcccatagtcatttaggctggaaaaaagttgaaaacttaacgaaatattgccaagagattgttatgtgtttggttccagcctaaaaatgattttgtagtgttgaaatcatagctacttacatagctttttcatatttctttcttagttgttggcactcttaggtcttagtatggatttatgtgtttgtgtgtgtgtgatttttttaatgaatatttgggaatgaattgcagacgtgatgcccatttacccctaaaatacttcagtgtatgtttcctgaatcaagcaaggacataatgttacaaaccacagcacagctgtcattatcaagtaaacacatctgaaacatcacaaccttctaattcatacccc

SEQ ID NO: 320951 - DNA, 1144 bp, Homo sapiens
  misc_feature (22)..(22): n is a, c, g, or t
  misc_feature (25)..(25): n is a, c, g, or t
tcgcggacgcgtcgactacganacnacagaagggagatttaaattgtgtgaacctaatgatttttgcagtgaaacctttactaattcaaagttgcatgttctatgacatctgtgacttgcgttgcagagtgtacatgaaactgtataattgagtcattcagtaaaggagaacagtatcttggttaattgctactgaaaggttgagaaaggaatggtttgatatttaccacagcgctgtgcctttctacagtagaactggggtaaaggaaatggttttattgcccatagtcatttaggctggaaaaaagttgaaaacttaacgaaatattgccaagagattgttatgtgtttggttccagcctaaaaatgattttgtagtgttgaaatcatagctacttacatagctttttcatatttctttcttagttgttggcactcttaggtcttagtatggatttatgtgtttgtgtgtgtgtagtttatcctctctctcatctttatctagagattgactgatacctcattctgtttgtaatcctgagaaatgtgtgcttttgttttcggatagacttatttctttagttctgcacttttccacattatactccatatgagtattaatcctatggatacatattaaaacaagtgtctcatacaacattgtatgtgagagaaatataaatatttacaacctgatattcgttgttgttttattgttaaaagtttattatgcaactctggaggtatagagggcatataagctatgggacatatgctgatcacaggctatattcatgaagttacttttgaccaacctgaaaactgataggattttgtttgtcatttggtaatttctactgcattcttaccatccttctctcacaaattttgatagcttgaagatctttttaattataattttgttgtatttgtttcctaggagcaagtgttcctgctgccagttctttcctctttaggcgtggttgagaaaaagcagaaactttacataaagctgtatttcttaatcatctttaatttgaaacttaagaaaatgaatttattctgttatatttatgtaacttatttcctggaagttatatctactagttttgtttgataataataaaattagctataccttgaa

SEQ ID NO: 320952 - DNA, 1136 bp, Homo sapiens
  misc_feature (22)..(22): n is a, c, g, or t
  misc_feature (25)..(25): n is a, c, g, or t
tcgcggacgcgtcgactacganacnacagaagggagatttaaattgtgtgaacctaatgatttttgcagtgaaacctttactaattcaaagttgcatgttctatgacatctgtgacttgcgttgcagagtgtacatgaaactgtataattgagtcattcagtaaaggagaacagtatcttggttaattgctactgaaaggttgagaaaggaatggtttgatatttaccacagcgctgtgcctttctacagtagaactggggtaaaggaaatggttttattgcccatagtcatttaggctggaaaaaagttgaaaacttaacgaaatattgccaagagattgttatgtgtttggttccagcctaaaaatgattttgtagtgttgaaatcatagctacttacatagctttttcatatttctttcttagttgttggcactcttaggtcttagtatggatttatgtgtttgtgtgtgtgtagtttatcctctctctcatctttatctagagattgactgatacctcattctgtttgtaaaaccagccagtaatttctgtgcaaccttactatgtgcaatatttttattttccacattatactccatatgagtattaatcctatggatacatattaaaacaagtgtctcatacaacattgtatgtgagagaaatataaatatttacaacctgatattcgttgttgttttattgttaaaagtttattatgcaactctggaggtatagagggcatataagctatgggacatatgctgatcacaggctatattcatgaagttacttttgaccaacctgaaaactgataggattttgtttgtcatttggtaatttctactgcattcttaccatccttctctcacaaattttgatagcttgaagatctttttaattataattttgttgtatttgtttcctaggagcaagtgttcctgctgccagttctttcctctttaggcgtggttgagaaaaagcagaaactttacataaagctgtatttcttaatcatctttaatttgaaacttaagaaaatgaatttattctgttatatttatgtaacttatttcctggaagttatatctactagttttgtttgataataataaaattagctataccttgaa

SEQ ID NO: 320953 - DNA, 776 bp, Homo sapiens
agccggaagtggcgcacagccctagcagcaacaacagttttccacgtgcgcgtagggcgccgggatcacgtggggaggcagaagccaatggggaagcgtttcgtgtaggtcttctgaggtggtggcgccagcggctacctcctgcctgtgaggagctggctgagaggggactgggcgccggcggggaaggaggagcgctaggtcggtgtacgaccgagattagggtgcgtgccagctccgggaggccgcggtgaggggccgggcccaagctgccgacccgagccgatcgtcagggtcgccagcgcctcagctctgtggaggagcagcagtagtcggagggtgcaggatattagaaatggctactccccagtcaattttcatctttgcaatctgcattttaatgataacagaattaattctggcctcaaaaagctactatgatatcttaggtgtgccaaaatcggcatcagagcgccaaatcaagaaggcctttcacaagttggccatgaagtaccaccctgacaaaaataagagcccggatgctgaagcaaaattcagagagattgcagaaggagcaagtgttcctgctgccagttctttcctctttaggcgtggttgagaaaaagcagaaactttacataaagctgtatttcttaatcatctttaatttgaaacttaagaaaatgaatttattctgttatatttatgtaacttatttcctggaagttatatctactagttttgtttgataataataaaattagctataccttgaa

SEQ ID NO: 320954 - DNA, 2076 bp, Homo sapiens
agccggaagtggcgcacagccctagcagcaacaacagttttccacgtgcgcgtagggcgccgggatcacgtggggaggcagaagccaatggggaagcgtttcgtgtaggtcttctgaggtggtggcgccagcggctacctcctgcctgtgaggagctggctgagaggggactgggcgccggcggggaaggaggagcgctaggtcggtgtacgaccgagattagggtgcgtgccagctccgggaggccgcggtgaggggccgggcccaagctgccgacccgagccgatcgtcagggtcgccagcgcctcagctctgtggaggagcagcagtagtcggagggtgcaggatattagaaatggctactccccagtcaattttcatctttgcaatctgcattttaatgataacagaattaattctggcctcaaaaagctactatgatatcttaggtgtgccaaaatcggcatcagagcgccaaatcaagaaggcctttcacaagttggccatgaagtaccaccctgacaaaaataagagcccggatgctgaagcaaaattcagagagattgcagaagcatatgaaacactctcagatgctaatagacgaaaagagtatgatacacttggacacagtgcttttactagtggtaaaggacaaagaggtagtggaagttcttttgagcagtcatttaacttcaattttgatgacttatttaaagactttggcttttttggtcaaaaccaaaacactggatccaagaagcgttttgaaaatcatttccagacacgccaggatggtggttccagtagacaaaggcatcatttccaagaattttcttttggaggtggattatttgatgacatgtttgaagatatggagaaaatgttttcttttagtggttttgactctaccaatcagcatacagtacagactgaaaatagatttcatggatctagcaagcactgcaggactgtcactcaacgaagaggaaatatggttactacatacactgactgttcaggacagtagttcttattctattctcactaaatccaactggttgactcttcctcattatctttgatgctaaacaattttctgtgaactattttgacaagtgcatgatttcactttaaacaatttgatatagctattaaatatatttaagggttttttttttttgacaaattcaacattcaacgagtagacaaaatgctaattatttccctgattaggaaagtttctttaaaaaacacgtaattttgcctagtgctttttctctacctgcccttgggctcactaatatcaccagtattattaccaagaaaatattgagtttacctgattaaactttaaaagttaattgtagatttaaattgtgtgaacctaatgatttttgcagtgaaacctttactaattcaaagttgcatgttctatgacatctgtgacttgcgttgcagagtgtacatgaaactgtataattgagtcattcagtaaaggagaacagtatcttggttaattgctactgaaaggttgagaaaggaatggtttgatatttaccacagcgctgtgcctttctacagtagaactggggtaaaggaaatggttttattgcccatagtcatttaggctggaaaaaagttgaaaacttaacgaaatattgccaagagattgttatgtgtttggttccagcctaaaaatgattttgtagtgttgaaatcatagctacttacatagctttttcatatttctttcttagttgttggcactcttaggtcttagtatggatttatgtgtttgtgtgtgtgtagtttatcctctctctcatctttatctagagattgactgatacctcattctgtttgtaaaaccagccagtaatttctgtgcaaccttactatgtgcaatatttttaaatcctgagaaatgtgtgcttttgttttcggatagacttatttctttagttctgcacttttccacattatactccatatgagtattaatcctatggatacatattaaaacaagtgtctcatacaacattgtatgtgagagaaatataaatatttacaacctga

SEQ ID NO: 320955 - DNA, 2731 bp, Homo sapiens
agccggaagtggcgcacagccctagcagcaacaacagttttccacgtgcgcgtagggcgccgggatcacgtggggaggcagaagccaatggggaagcgtttcgtgtaggtcttctgaggtggtggcgccagcggctacctcctgcctgtgaggagctggctgagaggggactgggcgccggcggggaaggaggagcgctaggtcggtgtacgaccgagattagggtgcgtgccagctccgggaggccgcggtgaggggccgggcccaagctgccgacccgagccgatcgtcagggtcgccagcgcctcagctctgtggaggagcagcagtagtcggagggtgcaggatattagaaatggctactccccagtcaattttcatctttgcaatctgcattttaatgataacagaattaattctggcctcaaaaagctactatgatatcttaggtgtgccaaaatcggcatcagagcgccaaatcaagaaggcctttcacaagttggccatgaagtaccaccctgacaaaaataagagcccggatgctgaagcaaaattcagagagattgcagaagcatatgaaacactctcagatgctaatagacgaaaagagtatgatacacttggacacagtgcttttactagtggtaaaggacaaagaggtagtggaagttcttttgagcagtcatttaacttcaattttgatgacttatttaaagactttggcttttttggtcaaaaccaaaacactggatccaagaagcgttttgaaaatcatttccagacacgccaggatggtggttccagtagacaaaggcatcatttccaagaattttcttttggaggtggattatttgatgacatgtttgaagatatggagaaaatgttttcttttagtggttttgactctaccaatcagcatacagtacagactgaaaatagatttcatggatctagcaagcactgcaggactgtcactcaacgaagaggaaatatggttactacatacactgactgttcaggacagtagttcttattctattctcactaaatccaactggttgactcttcctcattatctttgatgctaaacaattttctgtgaactattttgacaagtgcatgatttcactttaaacaatttgatatagctattaaatatatttaagggttttttttttttgacaaattcaacattcaacgagtagacaaaatgctaattatttccctgattaggaaagtttctttaaaaaacacgtaattttgcctagtgctttttctctacctgcccttgggctcactaatatcaccagtattattaccaagaaaatattgagtttacctgattaaactttaaaagttaattgtagatttaaattgtgtgaacctaatgatttttgcagtgaaacctttactaattcaaagttgcatgttctatgacatctgtgacttgcgttgcagagtgtacatgaaactgtataattgagtcattcagtaaaggagaacagtatcttggttaattgctactgaaaggttgagaaaggaatggtttgatatttaccacagcgctgtgcctttctacagtagaactggggtaaaggaaatggttttattgcccatagtcatttaggctggaaaaaagttgaaaacttaacgaaatattgccaagagattgttatgtgtttggttccagcctaaaaatgattttgtagtgttgaaatcatagctacttacatagctttttcatatttctttcttagttgttggcactcttaggtcttagtatggatttatgtgtttgtgtgtgtgtagtttatcctctctctcatctttatctagagattgactgatacctcattctgtttgtaaaaccagccagtaatttctgtgcaaccttactatgtgcaatatttttaaatcctgagaaatgtgtgcttttgttttcggatagacttatttctttagttctgcacttttccacattatactccatatgagtattaatcctatggatacatattaaaacaagtgtctcatacaacattgtatgtgagagaaatataaatatttacaacctgatattcgttgttgttttattgttaaaagtttattatgcaactctggaggtatagagggcatataagctatgggacatatgctgatcacaggctatattcatgaagttacttttgaccaacctgaaaactgataggattttgtttgtcatttggtaatttctactgcattcttaccatccttctctcacaaattttgatagcttgaagatctttttaattataattttgttgtatttgtttcctaggagcaagtgttcctgctgccagttctttcctctttaggcgtggttgagaaaaagcagaaactttacataaagctgtatttcttaatcatctttaatttgaaacttaagaaaatgaatttattctgttatatttatgtaacttatttcctggaagttatatctactagttttgtttgataataataaaattagctataccttgaaaaaaaaaaaaaaaagaaaaaaaaatttttgtggggcgccggcgccccgaaaaaatttttcagcaccacttttttggggcggggcccaagtgttgacatgggcagggtccaggaaaccggccgactgggtgggttcccaccaaaaaacccgggcgcggggtttgaaaccccaggggtgtgggctcggctcacgggccggtaccgccgg

SEQ ID NO: 320956 - DNA, 2427 bp, Homo sapiens
agccggaagtggcgcacagccctagcagcaacaacagttttccacgtgcgcgtagggcgccgggatcacgtggggaggcagaagccaatggggaagcgtttcgtgtaggtcttctgaggtggtggcgccagcggctacctcctgcctgtgaggagctggctgagaggggactgggcgccggcggggaaggaggagcgctaggtcggtgtacgaccgagattagggtgcgtgccagctccgggaggccgcggtgaggggccgggcccaagctgccgacccgagccgatcgtcagggtcgccagcgcctcagctctgtggaggagcagcagtagtcggagggtgcaggatattagaaatggctactccccagtcaattttcatctttgcaatctgcattttaatgataacagaattaattctggcctcaaaaagctactatgatatcttaggtgtgccaaaatcggcatcagagcgccaaatcaagaaggcctttcacaagttggccatgaagtaccaccctgacaaaaataagagcccggatgctgaagcaaaattcagagagattgcagaagcatatgaaacactctcagatgctaatagacgaaaagagtatgatacacttggacacagtgcttttactagtggtaaaggacaaagaggtagtggaagttcttttgagcagtcatttaacttcaattttgatgacttatttaaagactttggcttttttggtcaaaaccaaaacactggatccaagaagcgttttgaaaatcatttccagacacgccaggatggtggttccagtagacaaaggcatcatttccaagaattttcttttggaggtggattatttgatgacatgtttgaagatatggagaaaatgttttcttttagtggttttgactctaccaatcagcatacagtacagactgaaaatagatttcatggatctagcaagcactgcaggactgtcactcaacgaagaggaaatatggttactacatacactgactgttcaggacagtagttcttattctattctcactaaatccaactggttgactcttcctcattatctttgatgctaaacaattttctgtgaactattttgacaagtgcatgatttcactttaaacaatttgatatagctattaaatatatttaagggttttttttttttgacaaattcaacattcaacgagtagacaaaatgctaattatttccctgattaggaaagtttctttaaaaaacacgtaattttgcctagtgctttttctctacctgcccttgggctcactaatatcaccagtattattaccaagaaaatattgagtttacctgattaaactttaaaagttaattgtagatttaaattgtgtgaacctaatgatttttgcagtgaaacctttactaattcaaagttgcatgttctatgacatctgtgacttgcgttgcagagtgtacatgaaactgtataattgagtcattcagtaaaggagaacagtatcttggttaattgctactgaaaggttgagaaaggaatggtttgatatttaccacagcgctgtgcctttctacagtagaactggggtaaaggaaatgattttgtagtgttgaaatcatagctacttacatagctttttcatatttctttcttagttgttggcactcttaggtcttagtatggatttatgtgtttgtgtgtgtgtagtttatcctctctctcatctttatctagagattgactgatacctcattctgtttgtaaaaccagccagtaatttctgtgcaaccttactatgtgcaatatttttaaatcctgagaaatgtgtgcttttgttttcggatagacttatttctttagttctgcacttttccacattatactccatatgagtattaatcctatggatacatattaaaacaagtgtctcatacaacattgtatgtgagagaaatataaatatttacaacctgatattcgttgttgttttattgttaaaagtttattatgcaactctggaggtatagagggcatataagctatgggacatatgctgatcacaggctatattcatgaagttacttttgaccaacctgaaaactgataggattttgtttgtcatttggtaatttctactgcattcttaccatccttctctcacaaattttgatagcttgaagatctttttaattataattttgttgtatttgtttcctaggagcaagtgttcctgctgccagttctttcctctttaggcgtggttgagaaaaagcagaaactttacataaagctgtatttcttaatcatctttaatttgaaacttaagaaaatgaatttattctgttatatttatgtaacttatttcctggaagttatatctactagttttgtttgataataataaaattagctataccttgaa

SEQ ID NO: 320957 - DNA, 1028 bp, Homo sapiens
  misc_feature (230)..(230): n is a, c, g, or t
  misc_feature (242)..(242): n is a, c, g, or t
cgctgctggagctggcaaggtcaccaagtctgcccagaaagctcagaaggctagatgaatatcatccctaatacctgccaccccactcttaatcagtggtggaagaacggtctcagaactgtttgtttcaactggccatttaagttcagtagtaaaagactggttaatgaaaacaatgcatcgtaaaaccccttcgagaaaagggaaaagggaagaaatgggtttttttnttgttgggggancccccctttgggggtggttttcttttttgcgtgtggcagttttaagttattagttttttaaatcagtactttttaatggaaacatccaaaaatttgtcacagaattttgagacccattaaaaaagtttaatgagaaaaaaaaaaaaagcaaacctgcctctaatttgtctgctccaccttggaaagtgatatcttaaatttcaaaaagaattaccacatttatccctggcgaggacgtgaggaacagtctaatctcatacactgttggcaggaatgtaaattggcacggcatttttaaaagggaaattaacagaatttatcaaaatattaattggacgtaatcttcaatttagcagtttcactaataaatattgtagagaaatccttatatgcacaaaaaagtatgtacaataatactacagcattgtttgtaatagtgaaaaaaatggaaacaaaatgaccatctatcaatgggaaatggttaatggtatatctattactatgagatgttttgaactaaagggttagccattgaaagagatccaagattttttaaagccaactgcaaaaaacatacagcattatcaacttttgtcgaaacaccccaaaattatatatgcatgcatgtaaatgcattgagaaggctttcaaaggatataaggctaagtgggggaaagaaacttattttctcctccatatatttctctgttgtttaagatttatatagctattattgtcactgaatacatgttaaaagaaaaataaagacagaaaagtggtttatta

SEQ ID NO: 320958 - DNA, 414 bp, Homo sapiens
  misc_feature (324)..(324): n is a, c, g, or t
  misc_feature (341)..(341): n is a, c, g, or t
  misc_feature (392)..(392): n is a, c, g, or t
  misc_feature (398)..(398): n is a, c, g, or t
aatcccatgttgcacaactgctgtgagggttggagctcatgaaggaaagacctagctcgcgcctgcacacagaaggtgctcacatcaatgacgtcatccccattcccaacgtcatcacgctcaaggtctgggaaggcacctgggggttgtgactggggtctcagtggccttcgtcctgctgctgttcctcctcctcttcctcctcctccgacatcggcatcagagcaaacacaggacatcggcccatttctaccgtcctgcaggggctgcggggccagagcccaaggaccagggcctgcagaagagggccagcccagtttgctngacatccagggaggaanttttcaattgttgccgtgaaaggacacacagcccaaggacggggttggagntggatntttggcagacccaaca

SEQ ID NO: 320959 - DNA, 2212 bp, Homo sapiens
cagcctccagtccacactctgcgtgtttttgtgtcctgccaggcaccgtggtctcatccgcctgcacagctgagtccagtgggagctgacgccatgaccctcaccctctcagtcctgatttgcctcgggctgagtgtgggccccaggacctgcgtgcaggcaggcaccctccccaaacccaccctctgggctgagccagcctctgtgatagctcgggggaagcccgtgaccctctggtgtcaggggcccctggagactgaggagtaccgtctggataaggagggactcccatgggcccggaagagacagaacccactggagcctggagccaaggccaagttccacattccatccacggtgtatgacagtgcagggcgataccgctgctactatgagacccctgcaggctggtcagagcccagtgaccccctggagctggtggcgacaggattctatgcagaacccactcttttagccctgccgagtcctgtggtggcctcaggaggaaatgtgaccctccagtgtgatacactggacggacttctcacgtttgttcttgttgaggaagaacagaagctccccaggaccctgtactcacagaagctccccaaagggccatcccaggccctgttccctgtgggtcccgtgacccccagctgcaggtggaggttcagatgctattactattacaggaaaaaccctcaggtgtggtcgaaccccagtgacctcctggagattctggtcccaggcgtgtctaggaagccctccctcctgatcccgcagggctctgtcgtggcccgcggaggcagcctgaccctgcagtgtcgctctgatgtcggctatgacatattcgttctgtacaaggagggggaacatgacctcgtccagggctctggccagcagccccaggctgggctctcccaggccaacttcaccctgggccctgtgagccgctcccacgggggccagtacagatgctacggtgcacacaacctctcccctaggtggtcggcccccagcgaccccctggacatcctgatcgcaggactgatccctgacatacccgccctctcggtgcagccgggccccaaggtggcctcaggagagaacgtgaccctgctgtgtcagtcatggcatcagatagacactttctttttgaccaaggagggggcagcccatcccccgctgtgtctaaagtcaaagtaccagtcttatagacaccaggctgaattctccatgagtcctgtgacctcagcccagggtggaacctaccgatgctacagcgcaatcaggtcctacccctacctgctgtccagccctagttacccccaggagctcgtggtctcaggaccctctggggatcccagcctctcacctacaggctccacccccacacctgcaggccctgaggaccagcccctcacccccacggggttggatccccagagtggtctgggaaggcacctgggggttgtgactggggtctcagtggccttcgtcctgctgctgttcctcctcctcttcctcctcctccgacatcggcatcagagcaaacacaggacatcggcccatttctaccgtcctgcaggggctgcggggccagagcccaaggaccagggcctgcagaagagggccagcccagttgctgacatccaggaggaaattctcaatgctgccgtgaaggacacacagcccaaggacggggtggagatggatgctcgggctgctgcatctgaagccccccaggatgtgacctacgcccagctgcacagcttgaccctcagacgggaggcaactgagcctcctccatcccaggaaagggaacctccagctgaacccagcatctacgcccccctggccatccactagcccacgggggacccagatctcatactcaacagaaggagactcagagactccagaaggcacaggagctgcccccagtggacaccaatgaaccccagccagcctggacccctaacaaagaccaccaggacatcctgggaactctgggactcactagattctgcagtcaaagatgactaatatccttgcatttttgaaatgaagccacagacttctcaataaatcaatgagctgagaaaactgaaacagaaattagagcatggtataaatttggaatgataatgtaaatattacacattaaatgatgaaatcggaaaactacaaatgagcgaatgaattagaaaag

SEQ ID NO: 320960 - DNA, 2444 bp, Homo sapiens
cagcctccagtccacactctgcgtgtttttgtgtcctgccaggcaccgtggtctcatccgcctgcacagctgagtccagtgggagctgacgccatgaccctcaccctctcagtcctgatttgcctcgggctgagtgtgggccccaggacctgcgtgcaggcaggcaccctccccaaacccaccctctgggctgagccagcctctgtgatagctcgggggaagcccgtgaccctctggtgtcaggggcccctggagactgaggagtaccgtctggataaggagggactcccatgggcccggaagagacagaacccactggagcctggagccaaggccaagttccacattccatccacggtgtatgacagtgcagggcgataccgctgctactatgagacccctgcaggctggtcagagcccagtgaccccctggagctggtggcgacaggattctatgcagaacccactcttttagccctgccgagtcctgtggtggcctcaggaggaaatgtgaccctccagtgtgatacactggacggacttctcacgtttgttcttgttgaggaagaacagaagctccccaggaccctgtactcacagaagctccccaaagggccatcccaggccctgttccctgtgggtcccgtgacccccagctgcaggtggaggttcagatgctattactattacaggaaaaaccctcaggtgtggtcgaaccccagtgacctcctggagattctggtcccaggcgtgtctaggaagccctccctcctgatcccgcagggctctgtcgtggcccgcggaggcagcctgaccctgcagtgtcgctctgatgtcggctatgacatattcgttctgtacaaggagggggaacatgacctcgtccagggctctggccagcagccccaggctgggctctcccaggccaacttcaccctgggccctgtgagccgctcccacgggggccagtacagatgctacggtgcacacaacctctcccctaggtggtcggcccccagcgaccccctggacatcctgatcgcaggactgatccctgacatacccgccctctcggtgcagccgggccccaaggtggcctcaggagagaacgtgaccctgctgtgtcagtcatggcatcagatagacactttctttttgaccaaggagggggcagcccatcccccgctgtgtctaaagtcaaagtaccagtcttatagacaccaggctgaattctccatgagtcctgtgacctcagcccagggtggaacctaccgatgctacagcgcaatcaggtcctacccctacctgctgtccagccctagttacccccaggagctcgtggtctcaggaccctctggggatcccagcctctcacctacaggctccacccccacacctgcaggccctgaggaccagcccctcacccccacggggttggatccccagagtggtctgggaaggcacctgggggttgtgactggggtctcagtggccttcgtcctgctgctgttcctcctcctcttcctcctcctccgacatcggcatcagagcaaacacaggacatcggcccatttctaccgtcctgcaggggctgcggggccagagcccaaggaccagggcctgcagaagagggccagcccagttgctgacatccaggaggaaattctcaatgctgccgtgaaggacacacagcccaaggacggggtggagatggatgctcggagcccacacgatgaagacccccaggcagtgacgtatgccccggtgaaacactccagacctaggagagaaatggcctctcctccctccccactgtctggggaattcctggacacaaaggacagacaggcagaagaggacagacagatggacactgagagagtcctctcctctccaggcccccaggcctccccacccccaccacgttccttcctctcactctcccccgctgcaggctgctgcatctgaagccccccaggatgtgacctacgcccagctgcacagcttgaccctcagacgggaggcaactgagcctcctccatcccaggaaagggaacctccagctgaacccagcatctacgcccccctggccatccactagcccacgggggacccagatctcatactcaacagaaggagactcagagactccagaaggcacaggagctgcccccagtggacaccaatgaaccccagccagcctggacccctaacaaagaccaccaggacatcctgggaactctgggactcactagattctgcagtcaaagatgactaatatccttgcatttttgaaatgaagccacagacttctcaataaatcaatgagctgagaaaactgaaacagaaattagagcatggtataaatttggaatgataatgtaaatattacacattaaatgatgaaatcggaaaactacaaatgagcgaatgaattagaaaag

SEQ ID NO: 320961 - DNA, 1750 bp, Homo sapiens
tggtacggtccgaacgtatcgtatgatcaggacctcctggagattctggtccaggcgtgtctaggaagccctccctcctgatcccgcagggctctgtcgtggcccgcggaggcagcctgaccctgcagtgtcgctctgatgtcggctatgacatattcgttctgtacaaggagggggaacatgacctcgtccagggctctggccagcagccccaggctgggctctcccaggccaacttcaccctgggccctgtgagccgctcccacgggggccagtacagatgctacggtgcacacaacctctcccctaggtggtcggcccccagcgaccccctggacatcctgatcgcaggactgatccctgacatacccgccctctcggtgcagccgggccccaaggtggcctcaggagagaacgtgaccctgctgtgtcagtcatggcatcagatagacactttctttttgaccaaggagggggcagcccatcccccgctgtgtctaaagtcaaagtaccagtcttatagacaccaggctgaattctccatgagtcctgtgacctcagcccagggtggaacctaccgatgctacagcgcaatcaggtcctacccctacctgctgtccagccctagttacccccaggagctcgtggtctcaggaccctctggggatcccagcctctcacctacaggctccacccccacacctgcaggccctgaggaccagcccctcacccccacggggttggatccccagagtggtctgggaaggcacctgggggttgtgactggggtctcagtggccttcgtcctgctgctgttcctcctcctcttcctcctcctccgacatcggcatcagagcaaacacaggacatcggcccatttctaccgtcctgcaggggctgcggggccagagcccaaggaccagggcctgcagaagagggccagcccagttgctgacatccaggaggaaattctcaatgctgccgtgaaggacacacagcccaaggacggggtggagatggatgctcggagcccacacgatgaagacccccaggcagtgacgtatgccccggtgaaacactccagacctaggagagaaatggcctctcctccctccccactgtctggggaattcctggacacaaaggacagacaggcagaagaggacagacagatggacactgagagagtcctctcctctccaggcccccaggcctccccacccccaccacgttccttcctctcactctcccccgctgcaggctgctgcatctgaagccccccaggatgtgacctacgcccagctgcacagcttgaccctcagacgggaggcaactgagcctcctccatcccaggaaagggaacctccagctgaacccagcatctacgcccccctggccatccactagcccacgggggacccagatctcatactcaacagaaggagactcagagactccagaaggcacaggagctgcccccagtggacaccaatgaaccccagccagcctggacccctaacaaagaccaccaggacatcctgggaactctgggactcactagattctgcagtcaaagatgactaatatccttgcatttttgaaatgaagccacagacttctcaataaatcaatgagctgagaaaactgaaacagaaattagagcatggtataaatttggaatgataatgtaaatattacacattaaatgatgaaatcggaaaactacaaatgagcgaatgaattagaaaag

SEQ ID NO: 320962 - DNA, 2144 bp, Homo sapiens
cagcctccagtccacactctgcgtgtttttgtgtcctgccaggcaccgtggtctcatccgcctgcacagctgagtccagtgggagctgacgccatgaccctcaccctctcagtcctgatttgcctcgggctgagtgtgggccccaggacctgcgtgcaggcaggcaccctccccaaacccaccctctgggctgagccagcctctgtgatagctcgggggaagcccgtgaccctctggtgtcaggggcccctggagactgaggagtaccgtctggataaggagggactcccatgggcccggaagagacagaacccactggagcctggagccaaggccaagttccacattccatccacggtgtatgacagtgcagggcgataccgctgctactatgagacccctgcaggctggtcagagcccagtgaccccctggagctggtggcgacaggcgtgtctaggaagccctccctcctgatcccgcagggctctgtcgtggcccgcggaggcagcctgaccctgcagtgtcgctctgatgtcggctatgacatattcgttctgtacaaggagggggaacatgacctcgtccagggctctggccagcagccccaggctgggctctcccaggccaacttcaccctgggccctgtgagccgctcccacgggggccagtacagatgctacggtgcacacaacctctcccctaggtggtcggcccccagcgaccccctggacatcctgatcgcaggactgatccctgacatacccgccctctcggtgcagccgggccccaaggtggcctcaggagagaacgtgaccctgctgtgtcagtcatggcatcagatagacactttctttttgaccaaggagggggcagcccatcccccgctgtgtctaaagtcaaagtaccagtcttatagacaccaggctgaattctccatgagtcctgtgacctcagcccagggtggaacctaccgatgctacagcgcaatcaggtcctacccctacctgctgtccagccctagttacccccaggagctcgtggtctcaggaccctctggggatcccagcctctcacctacaggctccacccccacacctgcaggccctgaggaccagcccctcacccccacggggttggatccccagagtggtctgggaaggcacctgggggttgtgactggggtctcagtggccttcgtcctgctgctgttcctcctcctcttcctcctcctccgacatcggcatcagagcaaacacaggacatcggcccatttctaccgtcctgcaggggctgcggggccagagcccaaggaccagggcctgcagaagagggccagcccagttgctgacatccaggaggaaattctcaatgctgccgtgaaggacacacagcccaaggacggggtggagatggatgctcggagcccacacgatgaagacccccaggcagtgacgtatgccccggtgaaacactccagacctaggagagaaatggcctctcctccctccccactgtctggggaattcctggacacaaaggacagacaggcagaagaggacagacagatggacactgagagagtcctctcctctccaggcccccaggcctccccacccccaccacgttccttcctctcactctcccccgctgcaggctgctgcatctgaagccccccaggatgtgacctacgcccagctgcacagcttgaccctcagacgggaggcaactgagcctcctccatcccaggaaagggaacctccagctgaacccagcatctacgcccccctggccatccactagcccacgggggacccagatctcatactcaacagaaggagactcagagactccagaaggcacaggagctgcccccagtggacaccaatgaaccccagccagcctggacccctaacaaagaccaccaggacatcctgggaactctgggactcactagattctgcagtcaaagatgactaatatccttgcatttttgaaatgaagccacagacttctcaataaatcaatgagctgagaaaactgaaacagaaattagagcatggtataaatttggaatgataatgtaaatattacacattaaatgatgaaatcggaaaactacaaatgagcgaatgaattagaaaag

SEQ ID NO: 320963 - DNA, 887 bp, Homo sapiens
aatcccatgttgcacaactgctgtgagggttggagctcatgaaggaaagacctagctcgcgcctgcacacagaaggtgctcacatcaatgacgtcatccccattcccaacgtcatcacgctcaaggtctgggaaggcacctgggggttgtgactggggtctcagtggccttcgtcctgctgctgttcctcctcctcttcctcctcctccgacatcggcatcagagcaaacacaggacatcggcccatttctaccgtcctgcaggggctgcggggccagagcccaaggaccagggcctgcagaagagggccagcccagttgctgacatccaggaggaaattctcaatgctgccgtgaaggacacacagcccaaggacggggtggagatggatgctcgggctgctgcatctgaagccccccaggatgtgacctacgcccagctgcacagcttgaccctcagacgggaggcaactgagcctcctccatcccaggaaagggaacctccagctgaacccagcatctacgcccccctggccatccactagcccacgggggacccagatctcatactcaacagaaggagactcagagactccagaaggcacaggagctgcccccagtggacaccaatgaaccccagccagcctggacccctaacaaagaccaccaggacatcctgggaactctgggactcactagattctgcagtcaaagatgactaatatccttgcatttttgaaatgaagccacagacttctcaataaatcaatgagctgagaaaactgaaacagaaattagagcatggtataaatttggaatgataatgtaaatattacacattaaatgatgaaatcggaaaactacaaatgagcgaatgaattagaaaag

SEQ ID NO: 320964 - DNA, 1442 bp, Homo sapiens
tataaaatgagaataacacagctctccaaatggcacgacacccgctaccttttggcttggagacgctgccccgaaggcggaacctccaggacagctacgtagcgtcccgagcactcagactgaagccagggcagccatgttcattattggaaccgtgaggtgggtagggggggtggtgttgagacagctgtcattttcagttagggcaaaagccaacttccggtcaccatcttgagtgacgacagaggcggagctccaactgacatgttcattaagggcagggctccgagggcgccacctcgagagcgacggcgggctacccggggcgggctgaggcaggttgtagccccgccccgggccttgggctccacctctcggccccacttccgccgggcaagcgtttgtaggcggcgctgccgtaaatcaggcggtctgcttgccgcatcacgcaagatggcggccgcggcggtgaacggggcggcaggcttctcgagctccgggcccgcggcaacctcgggcgctgttctgcaggccgcgaccggcatgtacgagcaactcaagggcgagtggaaccgtaaaagccccaatcttagcaagtgcggggaagagctgggtcgactcaagctagttcttctggagctcaacttcttgccaaccacagggaccaagctgaccaaacagcagctaattctggcccgtgacatactggagatcggggcccaatggagcatcctacgcaaggacatcccctccttcgagcgctacatggcccagctcaaatgctactactttgattacaaggagcagctccccgagtcagcctatatgcaccagctcttgggcctcaacctcctcttcctgctgtcccagaaccgggtggctgagttccacacggagttggagcggctgcctgccaaggacatacagaccaatgtctacatcaagcacccagtgtccctggagcaatacctgatggagggcagctacaacaaagtgttcctggccaagggtaacatccccgccgagagctacaccttcttcattgacatcctgctcgacactatcagggatgagatcgctgggtgcatcgagaaggcctacgagaaaatccttttcactgaggccacccggatcctcttcttcaacacacccaaaaagatgacagactacgccaagaagcgagggtgggtccggggccccaacaactactacagtatggctcagcgctagcgctggcaatacaggatgatgtaatggcgtgtgcctggaggaggggtatgtggaagaggtgacatctaagcttaatgtgaagaaatccctgtgtgcaaatatctgggaggagcataacaggcagagagaggagcagggatgaaggcctgagggcagaggagctgacgtgttggaggaatagaaagaatgccagaggtatggctcagcgctag

SEQ ID NO: 320965 - DNA, 732 bp, Homo sapiens
aaaaactacggctaggtacgacgctcagtgtgtaatcggccgaggaaccgtaaaagccccaatcttagcaagtgcggggaagagctgggtcgactcaagctagttcttctggagctcaacttcttgccaaccacagggaccaagctgaccaaacagcagctaattctggcccgtgacatactggagatcggggcccaatggagcatcctacgcaaggacatcccctccttcgagcgctacatggcccagctcaaatgctactactttgattacaaggagcagctccccgagtcagcctatatgcaccagctcttgggcctcaacctcctcttcctgctgtcccagaaccgggtggctgagttccacacggagttggagcggctgcctgccaaggacatacagaccaatgtctacatcaagcacccagtgtccctggagcaatacctgatggagggcagctacaacaaagtgttcctggccaagggtaacatccccgccgagagctacaccttcttcattgacatcctgctcgacactatcagggatgagatcgctgggtgcatcgagaaggcctacgagaaaatccttttcactgaggccacccggatcctcttcttcaacacacccaaaaagatgacagactacgccaagaagcgagggtgggtcctgggccccaacaactactacagtataccccaggaggatcctctagatcgataacgggagctgcat

SEQ ID NO: 320966 - DNA, 1461 bp, Homo sapiens
tataaaatgagaataacacagctctccaaatggcacgacacccgctaccttttggcttggagacgctgccccgaaggcggaacctccaggacagctacgtagcgtcccgagcactcagactgaagccagggcagccatgttcattattggaaccgtgaggtgggtagggggggtggtgttgagacagctgtcattttcagttagggcaaaagccaacttccggtcaccatcttgagtgacgacagaggcggagctccaactgacatgttcattaagggcagggctccgagggcgccacctcgagagcgacggcgggctacccggggcgggctgaggcaggttgtagccccgccccgggccttgggctccacctctcggccccacttccgccgggcaagcgtttgtaggcggcgctgccgtaaatcaggcggtctgcttgccgcatcacgcaagatggcggccgcggcggtgaacggggcggcaggcttctcgagctccgggcccgcggcaacctcgggcgctgttctgcaggccgcgaccggcatgtacgagcaactcaagggcgagtggaaccgtaaaagccccaatcttagcaagtgcggggaagagctgggtcgactcaagctagttcttctggagctcaacttcttgccaacaactactacagttttgccagccagcagcagaagccggaagacaccaccattccctccacagaactggccaaacaggtcatcgagtatgcccggcagctggagatgatcgtctgagccccccgggcactgggtggggcagggcacgagttatttaaaacagttacactgcagggtttcgcccaataaaggtggactgacaaaaaaaaaaaaaaaaaaaaaacaaaaaattttggggggcttgggcctgaaaaagtttttaaaacaattggttgggacgcccgcgaggcacccaaggaaggtaaagagtggaaacgtgggcccaaaagggtgtttcccagaggaaaaaacgagggaacacaaaaaaagggctgagaatctctcaacgaataaaaaaaagcgccccggggagaaccagagaagagtttctagaaacaatctccaaaagagacgatcatgagagaggaaacaataacggagggaccaccaacacaaaaagggggaatccaacacgagaaaaacacgaaaaatactacagaattacagacccacgggcagtggagtgaacaaagaacaaaaacgagaaaaaagaaaaagaaagaaacaagagagaaaggaaaaggaaaagaaaagaaaagtagaaaagaagagccagaagcggaagagaaaagaacggagaaggaagaaagagaccgagagaaagaaaagggcacagaggacagggaacaaggggaaaagcaagaggagaggagagaaaaaaaagcaaaagaggaaaagcaaacgaaagaaaaggggagaaaggaaagag

SEQ ID NO: 320967 - DNA, 325 bp, Homo sapiens
tggatatgtgttgaatataaaactgaatgatacctgcacagattaatgattgggaatttgacatcagacaaatctggctttgaaacatccacctgggcaacagagagagactccttctcaaaaaataaataaaaggatactatggtgatacccagtttacactttgggaaaccgaggttgtcatttcactgaagtgaggtcactcgctcttgtatgactcaatatgactcttgtaaatgacttattcatgcatctttgggacacagtttcctcatatgaaaacccaggacctgatacctcttcaggaagatgcatggggcgttgt

SEQ ID NO: 320968 - DNA, 1751 bp, Homo sapiens
tataaaatgagaataacacagctctccaaatggcacgacacccgctaccttttggcttggagacgctgccccgaaggcggaacctccaggacagctacgtagcgtcccgagcactcagactgaagccagggcagccatgttcattattggaaccgtgaggtgggtagggggggtggtgttgagacagctgtcattttcagttagggcaaaagccaacttccggtcaccatcttgagtgacgacagaggcggagctccaactgacatgttcattaagggcagggctccgagggcgccacctcgagagcgacggcgggctacccggggcgggctgaggcaggttgtagccccgccccgggccttgggctccacctctcggccccacttccgccgggcaagcgtttgtaggcggcgctgccgtaaatcaggcggtctgcttgccgcatcacgcaagatggcggccgcggcggtgaacggggcggcaggcttctcgagctccgggcccgcggcaacctcgggcgctgttctgcaggccgcgaccggcatgtacgagcaactcaagggcgagtggaaccgtaaaagccccaatcttagcaagtgcggggaagagctgggtcgactcaagctagttcttctggagctcaacttcttgccaaccacagggaccaagctgaccaaacagcagctaattctggcccgtgacatactggagatcggggcccaatggagcatcctacgcaaggacatcccctccttcgagcgctacatggcccagctcaaatgctactactttgattacaaggagcagctccccgagtcagcctatatgcaccagctcttgggcctcaacctcctcttcctgctgtcccagaaccgggtggctgagttccacacggagttggagcggctgcctgccaaggacatacagaccaatgtctacatcaagcacccagtgtccctggagcaatacctgatggagggcagctacaacaaagtgttcctggccaagggtaacatccccgccgagagctacaccttcttcattgacatcctgctcgacactatcagggatgagatcgctgggtgcatcgagaaggcctacgagaaaatccttttcactgaggccacccggatcctcttcttcaacacacccaaaaagatgacagactacgccaagaagcgagggtgggtcctgggccccaacaactactacagttttgccagccagcagcagaagccggaagacaccaccattccctccacagaactggccaaacaggtcatcgagtatgcccggcagctggagatgatcgtctgagccccccgggcactgggtggggcagggcacgagttatttaaaacagttacactgcagggtttcgcccaataaaggtggactgacattccctcttccaggcccttgtctccccagttgggacggcagagagacaagttcttatatctgaagaacttggaggttttggggcattcaggagttggagatagcctccaactgggtcagcctctgtctggtgggcattgctcagggtctcaaacatggacgcccactgtggggccccagcagcactgtggcctgcaggagggcatggccccaggtagggggactgttctagccagctgtggacacataggaatgctggaccagggtaccagattttttcaacaaagggggtgaagtgtcctactaaaaagaataaatgttggcagtgaattaaacaatttttcaaatga

SEQ ID NO: 320969 - DNA, 2008 bp, Homo sapiens
tataaaatgagaataacacagctctccaaatggcacgacacccgctaccttttggcttggagacgctgccccgaaggcggaacctccaggacagctacgtagcgtcccgagcactcagactgaagccagggcagccatgttcattattggaaccgtgaggtgggtagggggggtggtgttgagacagctgtcattttcagttagggcaaaagccaacttccggtcaccatcttgagtgacgacagaggcggagctccaactgacatgttcattaagggcagggctccgagggcgccacctcgagagcgacggcgggctacccggggcgggctgaggcaggttgtagccccgccccgggccttgggctccacctctcggccccacttccgccgggcaagcgtttgtaggcggcgctgccgtaaatcaggcggtctgcttgccgcatcacgcaagatggcggccgcggcggtgaacggggcggcaggcttctcgagctccgggcccgcggcaacctcgggcgctgttctgcaggccgcgaccggcatgtacgagcaactcaagggcgagtggaaccgtaaaagccccaatcttagcaagtgcggggaagagctgggtcgactcaagctagttcttctggagctcaacttcttgccaaccacagggaccaagctgaccaaacagcagctaattctggcccgtgacatactggagatcggggcccaatggagcatcctacgcaaggacatcccctccttcgagcgctacatggcccagctcaaatgctactactttgattacaaggagcagctccccgagtcagcctatatgcaccagctcttgggcctcaacctcctcttcctgctgtcccagaaccgggtggctgagttccacacggagttggagcggctgcctgccaaggacatacagaccaatgtctacatcaagcacccagtgtccctggagcaatacctgatggagggcagctacaacaaagtgttcctggccaagggtaacatccccgccgagagctacaccttcttcattgacatcctgctcgacactatcagggatgagatcgctgggtgcatcgagaaggcctacgagaaaatccttttcactgaggccacccggatcctcttcttcaacacacccaaaaagatgacagactacgccaagaagcgagggtgggtcctgggccccaacaactactacagttttgccagccagcagcagaagccggaagacaccaccattccctccacagaactggccaaacaggtcatcgagtatgcccggcagctggagatgatcgtctgagccccccgggcactgggtggggcagggcacgagttatttaaaacagttacactgcagggtttcgcccaataaaggtggactgacaaaaaaaaaaaaaaaaaaaaaacaaaaaattttggggggcttgggcctgaaaaagtttttaaaacaattggttgggacgcccgcgaggcacccaaggaaggtaaagagtggaaacgtgggcccaaaagggtgtttcccagaggaaaaaacgagggaacacaaaaaaagggctgagaatctctcaacgaataaaaaaaagcgccccggggagaaccagagaagagtttctagaaacaatctccaaaagagacgatcatgagagaggaaacaataacggagggaccaccaacacaaaaagggggaatccaacacgagaaaaacacgaaaaatactacagaattacagacccacgggcagtggagtgaacaaagaacaaaaacgagaaaaaagaaaaagaaagaaacaagagagaaaggaaaaggaaaagaaaagaaaagtagaaaagaagagccagaagcggaagagaaaagaacggagaaggaagaaagagaccgagagaaagaaaagggcacagaggacagggaacaaggggaaaagcaagaggagaggagagaaaaaaaagcaaaagaggaaaagcaaacgaaagaaaaggggagaaaggaaagag

SEQ ID NO: 320970 - DNA, 1236 bp, Homo sapiens
tgatctagaggatcccattcgtgacggcatgtacgagcaactcaagggcgagtggaaccgtaaaagccccaatcttagcaagtgcggggaagagctgggtcgactcaagctagttcttctggagctcaacttcttgccaaccacagggaccaagctgaccaaacagcagctaattctggcccgtgacatactggagatcggggcccaatggagcatcctacgcaaggacatcccctccttcgagcgctacatggcccagctcaaatgctactactttgattacaaggagcagctccccgagtcagcctatatgcaccagctcttgggcctcaacctcctcttcctgctgtcccagaaccgggtggctgagttccacacggagttggagcggctgcctgccaaggacatacagaccaatgtctacatcaagcacccagtgtccctggagcaatacctgatggagggcagctacaacaaagtgttcctggccaagggtaacatccccgccgagagctacaccttcttcattgacatcctgctcgacactatcagggatgagatcgctgggtgcatcgagaaggcctacgagaaaatccttttcactgaggccacccggatcctcttcttcaacacacccaaaaagatgacagactacgccaagaagcgagggtgggtcctgggccccaacaactactacagttttgccagccagcagcagaagccggaagacaccaccattccctccacagaactggccaaacaggtcatcgagtatgcccggcagctggagatgatcgtctgagccccccgggcactgggtggggcagggcacgagttatttaaaacagttacactgcagggtttcgcccaataaaggtggactgacattccctcttccaggcccttgtctccccagttgggacggcagagagacaagttcttatatctgaagaacttggaggttttggggcattcaggagttggagatagcctccaactgggtcagcctctgtctggtgggcattgctcagggtctcaaacatggacgcccactgtggggccccagcagcactgtggcctgcaggagggcatggccccaggtagggggactgttctagccagctgtggacacataggaatgctggaccagggtaccagattttttcaacaaagggggtgaagtgtcctactaaaaagaataaatgttggcagtgaattaaacaatttttcaaatga

SEQ ID NO: 320971 - DNA, 1581 bp, Homo sapiens
ctcggtgccagcgagactgaggcgggctgggggatccgatggggtgaaagatttggaacagccaaagtgggggctcggagggcgtcaagaagcgagagagggacagggagcgttgatggtcacgcctgtaatcgcagcgctttgggaggccgaggcgggggagcgtcgcttgagcccaggagttcaagatcagcctgagcaacatagcgagactctgtctctacattttttttttaagtgagagatgactggaatggacccacgcgggggtggtgggggaatgattggaagacttatggcagaactgagtgaggggttagatttttggtgcgtggaggcttaactggtcggagtggcaggattgggattcgggcttttcctgatggtggattccaggcaagaccaagtgggaagtgaggactgcccggagtgataaaagaatgaggctgaaaagctagttcttctggagctcaacttcttgccaaccacagggaccaagctgaccaaacagcagctaattctggcccgtgacatactggagatcggggcccaatggagcatcctacgcaaggacatcccctccttcgagcgctacatggcccagctcaaatgctactactttgattacaaggagcagctccccgagtcagcctatatgcaccagctcttgggcctcaacctcctcttcctgctgtcccagaaccgggtggctgagttccacacggagttggagcggctgcctgccaaggacatacagaccaatgtctacatcaagcacccagtgtccctggagcaatacctgatggagggcagctacaacaaagtgttcctggccaagggtaacatccccgccgagagctacaccttcttcattgacatcctgctcgacactatcagggatgagatcgctgggtgcatcgagaaggcctacgagaaaatccttttcactgaggccacccggatcctcttcttcaacacacccaaaaagatgacagactacgccaagaagcgagggtgggtcctgggccccaacaactactacagttttgccagccagcagcagaagccggaagacaccaccattccctccacagaactggccaaacaggtcatcgagtatgcccggcagctggagatgatcgtctgagccccccgggcactgggtggggcagggcacgagttatttaaaacagttacactgcagggtttcgcccaataaaggtggactgacattccctcttccaggcccttgtctccccagttgggacggcagagagacaagttcttatatctgaagaacttggaggttttggggcattcaggagttggagatagcctccaactgggtcagcctctgtctggtgggcattgctcagggtctcaaacatggacgcccactgtggggccccagcagcactgtggcctgcaggagggcatggccccaggtagggggactgttctagccagctgtggacacataggaatgctggaccagggtaccagattttttcaacaaagggggtgaagtgtcctactaaaaagaataaatgttggcagtgaattaaacaatttttcaaatga

SEQ ID NO: 320972 - DNA, 1697 bp, Homo sapiens
tataaaatgagaataacacagctctccaaatggcacgacacccgctaccttttggcttggagacgctgccccgaaggcggaacctccaggacagctacgtagcgtcccgagcactcagactgaagccagggcagccatgttcattattggaaccgtgaggtgggtagggggggtggtgttgagacagctgtcattttcagttagggcaaaagccaacttccggtcaccatcttgagtgacgacagaggcggagctccaactgacatgttcattaagggcagggctccgagggcgccacctcgagagcgacggcgggctacccggggcgggctgaggcaggttgtagccccgccccgggccttgggctccacctctcggccccacttccgccgggcaagcgtttgtaggcggcgctgccgtaaatcaggcggtctgcttgccgcatcacgcaagatggcggccgcggcggtgaacggggcggcaggcttctcgagctccgggcccgcggcaacctcgggcgctgttctgcaggccgcgaccggcatgtacgagcaactcaagggcgagtggctagttcttctggagctcaacttcttgccaaccacagggaccaagctgaccaaacagcagctaattctggcccgtgacatactggagatcggggcccaatggagcatcctacgcaaggacatcccctccttcgagcgctacatggcccagctcaaatgctactactttgattacaaggagcagctccccgagtcagcctatatgcaccagctcttgggcctcaacctcctcttcctgctgtcccagaaccgggtggctgagttccacacggagttggagcggctgcctgccaaggacatacagaccaatgtctacatcaagcacccagtgtccctggagcaatacctgatggagggcagctacaacaaagtgttcctggccaagggtaacatccccgccgagagctacaccttcttcattgacatcctgctcgacactatcagggatgagatcgctgggtgcatcgagaaggcctacgagaaaatccttttcactgaggccacccggatcctcttcttcaacacacccaaaaagatgacagactacgccaagaagcgagggtgggtcctgggccccaacaactactacagttttgccagccagcagcagaagccggaagacaccaccattccctccacagaactggccaaacaggtcatcgagtatgcccggcagctggagatgatcgtctgagccccccgggcactgggtggggcagggcacgagttatttaaaacagttacactgcagggtttcgcccaataaaggtggactgacattccctcttccaggcccttgtctccccagttgggacggcagagagacaagttcttatatctgaagaacttggaggttttggggcattcaggagttggagatagcctccaactgggtcagcctctgtctggtgggcattgctcagggtctcaaacatggacgcccactgtggggccccagcagcactgtggcctgcaggagggcatggccccaggtagggggactgttctagccagctgtggacacataggaatgctggaccagggtaccagattttttcaacaaagggggtgaagtgtcctactaaaaagaataaatgttggcagtgaattaaacaatttttcaaatga

SEQ ID NO: 320973 - DNA, 1666 bp, Homo sapiens
tataaaatgagaataacacagctctccaaatggcacgacacccgctaccttttggcttggagacgctgccccgaaggcggaacctccaggacagctacgtagcgtcccgagcactcagactgaagccagggcagccatgttcattattggaaccgtgaggtgggtagggggggtggtgttgagacagctgtcattttcagttagggcaaaagccaacttccggtcaccatcttgagtgacgacagaggcggagctccaactgacatgttcattaagggcagggctccgagggcgccacctcgagagcgacggcgggctacccggggcgggctgaggcaggttgtagccccgccccgggccttgggctccacctctcggccccacttccgccgggcaagcgtttgtaggcggcgctgccgtaaatcaggcggtctgcttgccgcatcacgcaagatggcggccgcggcggtgaacggggcggcaggcttctcgagctccgggcccgcggcaacctcgggcgctgttctgcaggccgcgaccggcatgtacgagcaactcaagggcgagtggaaccgtaaaagccccaatcttagcaagtgcggggaagagctgggtcgactcaagctagttcttctggagctcaacttcttgccaaccacagggaccaagctgaccaaacagcagctaattctggcccgtgacatactggagatcggggcccaatggagcatcctacgcaaggacatcccctccttcgagcgctacatggcccagctcaaatgctactactttgattacaaggagcagctccccgagtcagcctatatgcaccagctcttgggcctcaacctcctcttcctgctgtcccagaaccgggtggctgagttccacacggagttggagcggctgcctgccaaggacatacagaccaatgtctacatcaagcacccagtgtccctggagcaatacctgatggagggcagctacaacaaagtgttcctggccaagggtaacatccccgccgagagctacaccttcttcattgacatcctgctcgacactatcagggatgagatcgctgggtgcatcgagaaggcctacgagaaaatccttttcactgaggccacccggatcctcttcttcaacacacccaaaaagatgacagactacgccaagaagcgagggtgggtcctgggccccaacaactactacagttttgccagccagcagcagaagccggaagacaccaccattccctccacgagttatttaaaacagttacactgcagggtttcgcccaataaaggtggactgacattccctcttccaggcccttgtctccccagttgggacggcagagagacaagttcttatatctgaagaacttggaggttttggggcattcaggagttggagatagcctccaactgggtcagcctctgtctggtgggcattgctcagggtctcaaacatggacgcccactgtggggccccagcagcactgtggcctgcaggagggcatggccccaggtagggggactgttctagccagctgtggacacataggaatgctggaccagggtaccagattttttcaacaaagggggtgaagtgtcctactaaaaagaataaatgttggcagtgaattaaacaatttttcaaatga

SEQ ID NO: 320974 - DNA, 1036 bp, Homo sapiens
actactactactaaattcgcggccgatcgatcccctccttcgagcgctacatggcccagctcaaatgctactactttgattacaaggagcagctccccgagtcagcctatatgcaccagctcttgggcctcaacctcctcttcctgctgtcccagaaccgggtggctgagttccacacggagttggagcggctgcctgccaaggacatacagaccaatgtctacatcaagcacccagtgtccctggagcaatacctgatggagggcagctacaacaaagtgttcctggccaagggtaacatccccgccgagagctacaccttcttcattgacatcctgctcgacactatcagggatgagatcgctgggtgcatcgagaaggcctacgagaaaatccttttcactgaggccacccggatcctcttcttcaacacacccaaaaagatgacagactacgccaagaagcgagggtgggtcctgggccccaacaactactacagttttgccagccagcagcagaagccggaagacaccaccattccctccacagaactggccaaacaggtcatcgagtatgcccggcagctggagatgatcgtctgagccccccgggcactgggtggggcagggcacgagttatttaaaacagttacactgcagggtttcgcccaataaaggtggactgacattccctcttccaggcccttgtctccccagttgggacggcagagagacaagttcttatatctgaagaacttggaggttttggggcattcaggagttggagatagcctccaactgggtcagcctctgtctggtgggcattgctcagggtctcaaacatggacgcccactgtggggccccagcagcactgtggcctgcaggagggcatggccccaggtagggggactgttctagccagctgtggacacataggaatgctggaccagggtaccagattttttcaacaaagggggtgaagtgtcctactaaaaagaataaatgttggcagtgaattaaacaatttttcaaatga

SEQ ID NO: 320975 - DNA, 1575 bp, Homo sapiens
tataaaatgagaataacacagctctccaaatggcacgacacccgctaccttttggcttggagacgctgccccgaaggcggaacctccaggacagctacgtagcgtcccgagcactcagactgaagccagggcagccatgttcattattggaaccgtgaggtgggtagggggggtggtgttgagacagctgtcattttcagttagggcaaaagccaacttccggtcaccatcttgagtgacgacagaggcggagctccaactgacatgttcattaagggcagggctccgagggcgccacctcgagagcgacggcgggctacccggggcgggctgaggcaggttgtagccccgccccgggccttgggctccacctctcggccccacttccgccgggcaagcgtttgtaggcggcgctgccgtaaatcaggcggtctgcttgccgcatcacgcaagatggcggccgcggcggtgaacggggcggcaggcttctcgagctccgggcccgcggcaacctcgggcgctgttctgcaggccgcgaccggcatgtacgagcaactcaagggcgagtggaaccgtaaaagccccaatcttagcaagtgcggggaagagctgggtcgactcaagggagcagctccccgagtcagcctatatgcaccagctcttgggcctcaacctcctcttcctgctgtcccagaaccgggtggctgagttccacacggagttggagcggctgcctgccaaggacatacagaccaatgtctacatcaagcacccagtgtccctggagcaatacctgatggagggcagctacaacaaagtgttcctggccaagggtaacatccccgccgagagctacaccttcttcattgacatcctgctcgacactatcagggatgagatcgctgggtgcatcgagaaggcctacgagaaaatccttttcactgaggccacccggatcctcttcttcaacacacccaaaaagatgacagactacgccaagaagcgagggtgggtcctgggccccaacaactactacagttttgccagccagcagcagaagccggaagacaccaccattccctccacagaactggccaaacaggtcatcgagtatgcccggcagctggagatgatcgtctgagccccccgggcactgggtggggcagggcacgagttatttaaaacagttacactgcagggtttcgcccaataaaggtggactgacattccctcttccaggcccttgtctccccagttgggacggcagagagacaagttcttatatctgaagaacttggaggttttggggcattcaggagttggagatagcctccaactgggtcagcctctgtctggtgggcattgctcagggtctcaaacatggacgcccactgtggggccccagcagcactgtggcctgcaggagggcatggccccaggtagggggactgttctagccagctgtggacacataggaatgctggaccagggtaccagattttttcaacaaagggggtgaagtgtcctactaaaaagaataaatgttggcagtgaattaaacaatttttcaaatga

SEQ ID NO: 320976 - DNA, 1257 bp, Homo sapiens
tataaaatgagaataacacagctctccaaatggcacgacacccgctaccttttggcttggagacgctgccccgaaggcggaacctccaggacagctacgtagcgtcccgagcactcagactgaagccagggcagccatgttcattattggaaccgtgaggtgggtagggggggtggtgttgagacagctgtcattttcagttagggcaaaagccaacttccggtcaccatcttgagtgacgacagaggcggagctccaactgacatgttcattaagggcagggctccgagggcgccacctcgagagcgacggcgggctacccggggcgggctgaggcaggttgtagccccgccccgggccttgggctccacctctcggccccacttccgccgggcaagcgtttgtaggcggcgctgccgtaaatcaggcggtctgcttgccgcatcacgcaagatggcggccgcggcggtgaacggggcggcaggcttctcgagctccgggcccgcggcaacctcgggcgctgttctgcaggccgcgaccggcatgtacgagcaactcaagggcgagtggaaccgtaaaagccccaatcttagcaagtgcggggaagagctgggtcgactcaagctagttcttctggagctcaacttcttgccaaccacagggaccaagctgaccaaacagcagctaattctggcccgtgacatactggagatcggggcccaatggagcatcctacgcaaggacatcccctccttcgagcgctacatggcccagctcaaatgctactactttgattacaaggagcagctccccgagtcagcctatatgcaccagctcttgggcctcaacctcctcttcctgctgtcccagaaccgggtggctgagttccacacggagttggagcggctgcctgccaaggacatacagaccaatgtctacatcaagcacccagtgtccctggagcaatacctgatggagggcagctacaacaaagtgttcctggccaagggtaacatccccgccgagagctacaccttcttcattgacatcctgctcgacactatcagggatgagatcgctgggtgcatcgagaaggcctacgagaaaatccttttcactgaggccacccggatcctcttcttcaacacacccaaaaagatgacagactacgccaagaagcgagggtgggtcctgggccccaacaactactacagtataccccaggaggatcctctagatcgataacgggagctgcat

SEQ ID NO: 320977 - DNA, 1915 bp, Homo sapiens
tataaaatgagaataacacagctctccaaatggcacgacacccgctaccttttggcttggagacgctgccccgaaggcggaacctccaggacagctacgtagcgtcccgagcactcagactgaagccagggcagccatgttcattattggaaccgtgaggtgggtagggggggtggtgttgagacagctgtcattttcagttagggcaaaagccaacttccggtcaccatcttgagtgacgacagaggcggagctccaactgacatgttcattaagggcagggctccgagggcgccacctcgagagcgacggcgggctacccggggcgggctgaggcaggttgtagccccgccccgggccttgggctccacctctcggccccacttccgccgggcaagcgtttgtaggcggcgctgccgtaaatcaggcggtctgcttgccgcatcacgcaagatggcggccgcggcggtgaacggggcggcaggcttctcgagctccgggcccgcggcaacctcgggcgctgttctgcaggccgcgaccggcatgtacgagcaactcaagggcgagtggaaccgtaaaagccccaatcttagcaagtgcggggaagagctgggtcgactcaagctagttcttctggagctcaacttcttgccaaccacagggaccaagctgaccaaacagcagctaattctggcccgtgacatactggagatcggggcccaatggagcatcctacgcaaggacatcccctccttcgagcgctacatggcccagctcaaatgctactactttgattacaaggagcagctccccgagtcagcctatatgcaccagctcttgggcctcaacctcctcttcctgctgtcccagaaccgggtggctgagttccacacggagttggagcggctgcctgccaaggacatacagaccaatgtctacatcaagcacccagtgtccctggagcaatacctgatggagggcagctacaacaaagtgttcctggccaagggtaacatccccgccgagagctacaccttcttcattgacatcctgctcgacactatcagtgaattgggcccggtcatgggattgtggataacggctctcatctcaccacccttggctgttgacatgtgtggccacgtgtgtcaaacctgagcatggaattggttcagcaggcagggattgtgcggcctgtcttagcccatcttccgtcctagatacccatccaggatgagatcgctgggtgcatcgagaaggcctacgagaaaatccttttcactgaggccacccggatcctcttcttcaacacacccaaaaagatgacagactacgccaagaagcgagggtgggtcctgggccccaacaactactacagttttgccagccagcagcagaagccggaagacaccaccattccctccacagaactggccaaacaggtcatcgagtatgcccggcagctggagatgatcgtctgagccccccgggcactgggtggggcagggcacgagttatttaaaacagttacactgcagggtttcgcccaataaaggtggactgacattccctcttccaggcccttgtctccccagttgggacggcagagagacaagttcttatatctgaagaacttggaggttttggggcattcaggagttggagatagcctccaactgggtcagcctctgtctggtgggcattgctcagggtctcaaacatggacgcccactgtggggccccagcagcactgtggcctgcaggagggcatggccccaggtagggggactgttctagccagctgtggacacataggaatgctggaccagggtaccagattttttcaacaaagggggtgaagtgtcctactaaaaagaataaatgttggcagtgaattaaacaatttttcaaatga

SEQ ID NO: 320978 - DNA, 1216 bp, Homo sapiens
  misc_feature (1189)..(1189): n is a, c, g, or t
tataaaatgagaataacacagctctccaaatggcacgacacccgctaccttttggcttggagacgctgccccgaaggcggaacctccaggacagctacgtagcgtcccgagcactcagactgaagccagggcagccatgttcattattggaaccgtgaggtgggtagggggggtggtgttgagacagctgtcattttcagttagggcaaaagccaacttccggtcaccatcttgagtgacgacagaggcggagctccaactgacatgttcattaagggcagggctccgagggcgccacctcgagagcgacggcgggctacccggggcgggctgaggcaggttgtagccccgccccgggccttgggctccacctctcggccccacttccgccgggcaagcgtttgtaggcggcgctgccgtaaatcaggcggtctgcttgccgcatcacgcaagatggcggccgcggcggtgaacggggcggcaggcttctcgagctccgggcccgcggcaacctcgggcgctgttctgcaggccgcgaccggcatgtacgagcaactcaagggcgagtggaaccgtaaaagccccaatcttagcaagtgcggggaagagctgggtcgactcaagctagttcttctggagctcaacttcttgccaaccacagggaccaagctgaccaaacagcagctaattctggcccgtgacatactggagatcggggcccaatggagcatcctacgcaaggacatcccctccttcgagcgctacatggcccagctcaaatgctactactttgattacaaggagcagctccccgagtcagcctatatgcaccagctcttgggcctcaacctcctcttcctgctgtcccagaaccgggtggctgagttccacacggagttggagcggctgcctgccaaggacatacagaccaatgtctacatcaagcacccagtgtccctggagcaatacctgatggagggcagctacaacaaagtgttcctggccaagggtaacatccccgccgagagctacaccttcttcattgacatcctgctcgacactatcagggatgagatcgctgggtgcatcgagaaggcctacgagaaaatccttttcactgaggccacccggatcctcttcttcaacacacccaaaaagatgacagactacgccaagaagcgagggtggntcctggggggtaccgacgctcgacatt

SEQ ID NO: 320979 - DNA, 1566 bp, Homo sapiens
tataaaatgagaataacacagctctccaaatggcacgacacccgctaccttttggcttggagacgctgccccgaaggcggaacctccaggacagctacgtagcgtcccgagcactcagactgaagccagggcagccatgttcattattggaaccgtgaggtgggtagggggggtggtgttgagacagctgtcattttcagttagggcaaaagccaacttccggtcaccatcttgagtgacgacagaggcggagctccaactgacatgttcattaagggcagggctccgagggcgccacctcgagagcgacggcgggctacccggggcgggctgaggcaggttgtagccccgccccgggccttgggctccacctctcggccccacttccgccgggcaagcgtttgtaggcggcgctgccgtaaatcaggcggtctgcttgccgcatcacgcaagatggcggccgcggcggtgaacggggcggcaggcttctcgagctccgggcccgcggcaacctcgggcgctgttctgcaggccgcgaccggcatgtacgagcaactcaagggcgagtggaaccgtaaaagccccaatcttagcaagtgcggggaagagctgggtcgactcaagctagttcttctggagctcaacttcttgccaaccacagggaccaagctgaccaaacagcagctaattctggcccgtgacatactggagatcggggcccaatggagcatcctacgcaaggacatcccctccttcgagcgctacatggcccagctcaaatgctactactttgattacaaggagcagctccccgagtcagcctatatgcaccagctcttgggcctcaacctcctcttcctgctgtcccagaaccgggtggctgagttccacacggagttggagcggctgcctgccaaggacatacagaccaatgtctacatcaagcacccagtgtccctggagcaatacctgatggagggcagctacaacaaagtgttcctggccaagggtaacatccccgccgagagctacaccttcttcattgacatcctgctcgacactatcagtgaattgggcccggtcatgggattgtggataacggctctcatctcaccacccttggctgttgacatgtgtggccacgtgtgtcaaacctgagcatggaattggttcagcaggcagggattgtgcggcctgtcttagcccatcttccgtcctagatacccatccagtgagtcatgagacttcacctccggccaccaaaactgtggaaccctcagtttctccttctctagaatgggttgaccaaatcccagcagccccttgggttgccgtgtgcacaagtgacatcccacgggcagatggatgtgacatacaaatcccttgaggagtaaaagggtgtcgaagtggtggctgagctgatgcactcgggcagagcaccaaatcagaatgagtttccatgccttaggtgcaaaggcaagcccagaggcattcgagtgaggagtggtagccagtacccactacctaccgcatggcctaagcgatattggaggcactcctccccat

SEQ ID NO: 320980 - DNA, 1793 bp, Homo sapiens
tataaaatgagaataacacagctctccaaatggcacgacacccgctaccttttggcttggagacgctgccccgaaggcggaacctccaggacagctacgtagcgtcccgagcactcagactgaagccagggcagccatgttcattattggaaccgtgaggtgggtagggggggtggtgttgagacagctgtcattttcagttagggcaaaagccaacttccggtcaccatcttgagtgacgacagaggcggagctccaactgacatgttcattaagggcagggctccgagggcgccacctcgagagcgacggcgggctacccggggcgggctgaggcaggttgtagccccgccccgggccttgggctccacctctcggccccacttccgccgggcaagcgtttgtaggcggcgctgccgtaaatcaggcggtctgcttgccgcatcacgcaagatggcggccgcggcggtgaacggggcggcaggcttctcgagctccgggcccgcggcaacctcgggcgctgttctgcaggccgcgaccggcatgtacgagcaactcaagggcgagtggaaccgtaaaagccccaatcttagcaagtgcggggaagagctgggtcgactcaagctagttcttctggagctcaacttcttgccaaccacagggaccaagctgaccaaacagcagctaattctggcccgtgagtgtcactggggttggttgggggtgataatctgggggtcatggcaggaatggtagcactggtggttggggaagagacctcagtcacctcctgagagctcactctgtcacccacaggttgcagtgagccgagatcacgccattgcactccagcctgggtgacagagcgagactctgtctggggaaaaaaaaaaaaaaaagaagaaggtgaaattgaattttagtgatggtgacagctggtaactgatctgtcactcaggccaaacactatcctcagtgctttaaagatgttgattcaccaaatcctcacagttgacccagagaggtgtgtaattagggtcccagtctcaacacagagaaactgaggcacagagaggtgaagttacttgtcaagggtcgttgggcagagtacgattggtgagaaaagagagcataggacacgtgggcaagtgctggccccatagggtggggatggagcctttgtgatcactctactcgtctctaatccctcctttcctgcagcgagggtgggtcctgggccccaacaactactacagttttgccagccagcagcagaagccggaagacaccaccattccctccacagaactggccaaacaggtcatcgagtatgcccggcagctggagatgatcgtctgagccccccgggcactgggtggggcagggcacgagttatttaaaacagttacactgcagggtttcgcccaataaaggtggactgacattccctcttccaggcccttgtctccccagttgggacggcagagagacaagttcttatatctgaagaacttggaggttttggggcattcaggagttggagatagcctccaactgggtcagcctctgtctggtgggcattgctcagggtctcaaacatggacgcccactgtggggccccagcagcactgtggcctgcaggagggcatggccccaggtagggggactgttctagccagctgtggacacataggaatgctggaccagggtaccagattttttcaacaaagggggtgaagtgtcctactaaaaagaataaatgttggcagtgaattaaacaatttttcaaatga

SEQ ID NO: 320981 - DNA, 1384 bp, Homo sapiens
tggaggtgggcgctgcacgcatgttggctgctgtctttatcaaaatttcttagaggtggcagctttttctgcaagactttgcttcatttggtctcaggcgtttgagcacgagcaacgcttggtgttgcaggaggagggctgggaccaggctatggaaggtgaaattgggctgggtgcagtggctcccgcgcaccaaggtggatcctcccacctaggctcactctgggaggctgaggtgggaggatcgcctgaggtcaggagttcgagaccagcctggtcaacatggtgaaacctcatctctactaaaaaatacaaaaaaaattagccggatgtggtggcgggtgcctgtaatctcagctactcgggaggctgaggcaggagaattgcttgaacccaggagggtggaggttgcagtgagccgagatcacgccattgcactccagcctgggtgacagagcgagactctgtctggggaaaaaaaaaaaaaaaagaagaaggtgaaattgaattttagtgatggtgacagctggtaactgatctgtcactcaggccaaacactatcctcagtgctttaaagatgttgattcaccaaatcctcacagttgacccagagaggtgtgtaattagggtcccagtctcaacacagagaaactgaggcacagagaggtgaagttacttgtcaagggtcgttgggcagagtacgattggtgagaaaagagagcataggacacgtgggcaagtgctggccccatagggtggggatggagcctttgtgatcactctactcgtctctaatccctcctttcctgcagcgagggtgggtcctgggccccaacaactactacagttttgccagccagcagcagaagccggaagacaccaccattccctccacagaactggccaaacaggtcatcgagtatgcccggcagctggagatgatcgtctgagccccccgggcactgggtggggcagggcacgagttatttaaaacagttacactgcagggtttcgcccaataaaggtggactgacattccctcttccaggcccttgtctccccagttgggacggcagagagacaagttcttatatctgaagaacttggaggttttggggcattcaggagttggagatagcctccaactgggtcagcctctgtctggtgggcattgctcagggtctcaaacatggacgcccactgtggggccccagcagcactgtggcctgcaggagggcatggccccaggtagggggactgttctagccagctgtggacacataggaatgctggaccagggtaccagattttttcaacaaagggggtgaagtgtcctactaaaaagaataaatgttggcagtgaattaaacaatttttcaaatga

SEQ ID NO: 320982 - DNA, 1219 bp, Homo sapiens
gtatttgaattcccttcttttctttcttccctccctcccctccccatcagctagttcttctggagctcaacttcttgccaaccacagggaccaagctgaccaaacagcagctaattctggcccgtgagtgtcactggggttggttgggggtgataatctgggggtcatggcaggaatggtagcactggtggttggggaagagacctcagtcacctcctgagagctcactctgtcacccacaggttgcagtgagccgagatcacgccattgcactccagcctgggtgacagagcgagactctgtctggggaaaaaaaaaaaaaaaagaagaaggtgaaattgaattttagtgatggtgacagctggtaactgatctgtcactcaggccaaacactatcctcagtgctttaaagatgttgattcaccaaatcctcacagttgacccagagaggtgtgtaattagggtcccagtctcaacacagagaaactgaggcacagagaggtgaagttacttgtcaagggtcgttgggcagagtacgattggtgagaaaagagagcataggacacgtgggcaagtgctggccccatagggtggggatggagcctttgtgatcactctactcgtctctaatccctcctttcctgcagcgagggtgggtcctgggccccaacaactactacagttttgccagccagcagcagaagccggaagacaccaccattccctccacagaactggccaaacaggtcatcgagtatgcccggcagctggagatgatcgtctgagccccccgggcactgggtggggcagggcacgagttatttaaaacagttacactgcagggtttcgcccaataaaggtggactgacattccctcttccaggcccttgtctccccagttgggacggcagagagacaagttcttatatctgaagaacttggaggttttggggcattcaggagttggagatagcctccaactgggtcagcctctgtctggtgggcattgctcagggtctcaaacatggacgcccactgtggggccccagcagcactgtggcctgcaggagggcatggccccaggtagggggactgttctagccagctgtggacacataggaatgctggaccagggtaccagattttttcaacaaagggggtgaagtgtcctactaaaaagaataaatgttggcagtgaattaaacaatttttcaaatga

SEQ ID NO: 320983 - DNA, 611 bp, Homo sapiens
gaggtgatctagaggattcggcctgactacgccaagaagcgagggtgggtcctgggccccaacaactactacagttttgccagccagcagcagaagccggaagacaccaccattccctccacagaactggccaaacaggtcatcgagtatgcccggcagctggagatgatcgtctgagccccccgggcactgggtggggcagggcacgagttatttaaaacagttacactgcagggtttcgcccaataaaggtggactgacattccctcttccaggcccttgtctccccagttgggacggcagagagacaagttcttatatctgaagaacttggaggttttggggcattcaggagttggagatagcctccaactgggtcagcctctgtctggtgggcattgctcagggtctcaaacatggacgcccactgtggggccccagcagcactgtggcctgcaggagggcatggccccaggtagggggactgttctagccagctgtggacacataggaatgctggaccagggtaccagattttttcaacaaagggggtgaagtgtcctactaaaaagaataaatgttggcagtgaattaaacaatttttcaaatga

SEQ ID NO: 320984 - DNA, 614 bp, Homo sapiens
ctcggtgccagcgagactgaggcgggctgggggatccgatggggtgaaagatttggaacagccaaagtgggggctcggagggcgtcaagaagcgagagagggacagggagcgttgatggtcacgcctgtaatcgcagcgctttgggaggccgaggcgggggagcgtcgcttgagcccaggagttcaagatcagcctgagcaacatagcgagactctgtctctacattttttttttaagtgagagatgactggaatggacccacgcgggggtggtgggggaatgattggaagacttatggcagaactgagtgaggggttagatttttggtgcgtggaggcttaactggtcggagtggcaggattgggattcgggcttttcctgatggtggattccaggcaagaccaagtgggaagtgaggactgcccggagtgataaaagaatgaggctgaaaaggtgggctgtgtagagggtgtgtggttaagaccaggctgggttaggatctgagagatctggggcttaggctcgcatctgttgggagagggggcagcctagttgtgaaggcaggactgaacctagaagaaatattcttacaagtagagaacaagaatacggg

SEQ ID NO: 320985 - DNA, 626 bp, Homo sapiens
gaagtgaggtcactcgctcttgtatgactcaatatgactcttgtaaatgacttattcatgcatctttgggacacagtttcctcatatgaaaacccaggacctgatacctcttcaggaagatgcatggggcgttgtgaggattcctggagcctggggtagagggctcgctaggcccttaaatcctccttaacctgcttccccatcccacgtccacagggagcagctccccgagtcagcctatatgcaccagctcttgggcctcaacctcctcttcctgctgtcccagaaccgggtggctgagttccacacggagttggagcggctgcctgccaaggacatacagaccaatgtctacatcaagcacccagtgtccctggagcaagtgagatggcaaggggcaggggaggacctggccaaagtgggtggtgcaggggtggtcttaggagggctttcctgaaggagtggccagggttcacccatctttccacccacggacccatcctcttgtttgtccaacaaatactgagtcccagctgtgtgcctggcactgtggtaggttgtcagactgtgcagtgagccaagcaggtgaaattcatgatcttgtggtgatgacactggggtgtgga

SEQ ID NO: 320986 - DNA, 1769 bp, Homo sapiens
tataaaatgagaataacacagctctccaaatggcacgacacccgctaccttttggcttggagacgctgccccgaaggcggaacctccaggacagctacgtagcgtcccgagcactcagactgaagccagggcagccatgttcattattggaaccgtgaggtgggtagggggggtggtgttgagacagctgtcattttcagttagggcaaaagccaacttccggtcaccatcttgagtgacgacagaggcggagctccaactgacatgttcattaagggcagggctccgagggcgccacctcgagagcgacggcgggctacccggggcgggctgaggcaggttgtagccccgccccgggccttgggctccacctctcggccccacttccgccgggcaagcgtttgtaggcggcgctgccgtaaatcaggcggtctgcttgccgcatcacgcaagatggcggccgcggcggtgaacggggcggcaggcttctcgagctccgggcccgcggcaacctcgggcgctgttctgcaggccgcgaccggcatgtacgagcaactcaagggcgagtggaaccgtaaaagccccaatcttagcaagtgcggggaagagctgggtcgactcaagctagttcttctggagctcaacttcttgccaaccacagggaccaagctgaccaaacagcagctaattctggcccgtgacatactggagatcggggcccaatggagcatcctacgcaaggacatcccctccttcgagcgctacatggcccagctcaaatgctactactttgattacaaggagcagctccccgagtcagcctatatgcaccagctcttgggcctcaacctcctcttcctgctgtcccagaaccgggtggctgagttccacacggagttggagcggctgcctgccaaggacatacagaccaatgtctacatcaagcacccagtgtccctggagcaatacctgatggagggcagctacaacaaagtgttcctggccaagggtaacatccccgccgagagctacaccttcttcattgacatcctgctcgacactatcagggatgagatcgctgggtgcatcgagaaggcctacgagaaaatccttttcactgaggccacccggatcctcttcttcaacacacccaaaaagatgacagactacgccaagaagcgagggtgggtcctgggccccaacaactactacagttttgccagccagcagcagaagccggaagacaccaccattccctccacagaactggccaaacaggtcatcgagtatgcccggcagctggagatgatcgtctgagccccccgggcactgggtggggcagggcacgagttatttaaaacagttacactgcagggtttcgcccaataaaggtggactgacattccctcttccaggcccttgtctccccagttgggacggcagagagacaagttcttatatctgaagaacttggaggttttggggcattcaggagttggagatagcctccaactgggtcagcctctgtctggtgggcattgctcagggtctcaaacatggacgcccactgtggggccccagcagcactgtggcctgcaggagggcatggccccaggtagggggactgttctagccagctgtggacacataggaatgctggaccagggtaccagattttttcaacaaagggggtgaagtgtcctactaaaaagaataaatgttggcagtgaattaaacaatttttcaaatgattcaaatgacatgtgaaa

SEQ ID NO: 320987 - DNA, 1102 bp, Homo sapiens
tataaaatgagaataacacagctctccaaatggcacgacacccgctaccttttggcttggagacgctgccccgaaggcggaacctccaggacagctacgtagcgtcccgagcactcagactgaagccagggcagccatgttcattattggaaccgtgaggtgggtagggggggtggtgttgagacagctgtcattttcagttagggcaaaagccaacttccggtcaccatcttgagtgacgacagaggcggagctccaactgacatgttcattaagggcagggctccgagggcgccacctcgagagcgacggcgggctacccggggcgggctgaggcaggttgtagccccgccccgggccttgggctccacctctcggccccacttccgccgggcaagcgtttgtaggcggcgctgccgtaaatcaggcggtctgcttgccgcatcacgcaagatggcggccgcggcggtgaacggggcggcaggcttctcgagctccgggcccgcggcaacctcgggcgctgttctgcaggccgcgaccggcatgtacgagcaactcaagggcgagtggaaccgtaaaagccccaatcttagcaagtgcggggaagagctgggtcgactcaagctagttcttctggagctcaacttcttgccaaccacagggaccaagctgaccaaacagcagctaattctggcccgtgacatactggagatcggggcccaatggagcatcctacgcaaggacatcccctccttcgagcgctacatggcccagctcaaatgctactactttgattacaaggagcagctccccgagtcagcctatatgcaccagctcttgggcctcaacctcctcttcctgctgtcccagaaccgggtggctgagttccacacggagttggagcggctgcctgccaaggacatacagaccaatgtctacatcaagcacccagtgtccctggagcaatacctgatggagggcagctacaacaaagtgttcctggccaagggtaacatccccgccgagagctacaccttcttcattgacatcctgctcgacactatcaggtgcgtagcggggccgggccctgtggagtttggaa

SEQ ID NO: 320988 - DNA, 442 bp, Homo sapiens
  misc_feature (158)..(158): n is a, c, g, or t
tacccagcgctgagccatacccacttatgttgtcattctaattgtttacgtacatggatataccggatatgtaaaattttctttcctgtaccctttgatagtaggttgccggtgtcatgccacttccggatgcttcagtattgccagcgctagcgctnagcaatacctgatggagggcagctacaacaaagtgttcctggccaagggtaacatccccgccgagagctacaccttcttcattgacatcctgctcgacactatcagggatgagatcgctgggtgcatcgagaaggcctacgagaaaatccttttcactgaggccacccggatcctcttcttcaacacacccaaaaagatgacagactacgccaagaagcgagggtgggtcctgggccccaacaactactacagtatggctcagcgctggggtccttctagataa

SEQ ID NO: 320989 - DNA, 2358 bp, Homo sapiens
tataaaatgagaataacacagctctccaaatggcacgacacccgctaccttttggcttggagacgctgccccgaaggcggaacctccaggacagctacgtagcgtcccgagcactcagactgaagccagggcagccatgttcattattggaaccgtgaggtgggtagggggggtggtgttgagacagctgtcattttcagttagggcaaaagccaacttccggtcaccatcttgagtgacgacagaggcggagctccaactgacatgttcattaagggcagggctccgagggcgccacctcgagagcgacggcgggctacccggggcgggctgaggcaggttgtagccccgccccgggccttgggctccacctctcggccccacttccgccgggcaagcgtttgtaggcggcgctgccgtaaatcaggcggtctgcttgccgcatcacgcaagatggcggccgcggcggtgaacggggcggcaggcttctcgagctccgggcccgcggcaacctcgggcgctgttctgcaggccgcgaccggcatgtacgagcaactcaagggcgagtggaaccgtaaaagccccaatcttagcaagtgcggggaagagctgggtcgactcaagctagttcttctggagctcaacttcttgccaaccacagggaccaagctgaccaaacagcagctaattctggcccgtgacatactggagatcggggcccaatggagcatcctacgcaaggacatcccctccttcgagcgctacatggcccagctcaaatgctactactttgattacaaggagcagctccccgagtcagcctatatgcaccagctcttgggcctcaacctcctcttcctgctgtcccagaaccgggtggctgagttccacacggagttggagcggctgcctgccaaggacatacagaccaatgtctacatcaagcacccagtgtccctggagcaatacctgatggagggcagctacaacaaagtgttcctggccaagggtaacatccccgccgagagctacaccttcttcattgacatcctgctcgacactatcagggatgagatcgctgggtgcatcgagaaggcctacgagaaaatccttttcactgaggccacccggatcctcttcttcaacacacccaaaaagatgacagactacgccaagaagcgagggtgggtcctgggccccaacaactactacagttttgccagccagcagcagaagccggaagacaccaccattccctccacagaactggccaaacaggtcatcgagtatgcccggcagctggagatgatcgtctgagccccccgggcactgggtggggcagggcacgagttatttaaaacagttacactgcagggtttcgcccaataaaggtggactgacattccctcttccaggcccttgtctccccagttgggacggcagagagacaagttcttatatctgaagaacttggaggttttggggcattcaggagttggagatagcctccaactgggtcagcctctgtctggtgggcattgctcagggtctcaaacatggacgcccactgtggggccccagcagcactgtggcctgcaggagggcatggccccaggtagggggactgttctagccagctgtggacacataggaatgctggaccagggtaccagattttttcaacaaagggggtgaagtgtcctactaaaaagaataaatgttggcagtgaattaaacaatttttcaaatgaaaaaaaaaaaaaaaaaaaaaaacaaaaaattttggggggcttgggcctgaaaaagtttttaaaacaattggttgggacgcccgcgaggcacccaaggaaggtaaagagtggaaacgtgggcccaaaagggtgtttcccagaggaaaaaacgagggaacacaaaaaaagggctgagaatctctcaacgaataaaaaaaagcgccccggggagaaccagagaagagtttctagaaacaatctccaaaagagacgatcatgagagaggaaacaataacggagggaccaccaacacaaaaagggggaatccaacacgagaaaaacacgaaaaatactacagaattacagacccacgggcagtggagtgaacaaagaacaaaaacgagaaaaaagaaaaagaaagaaacaagagagaaaggaaaaggaaaagaaaagaaaagtagaaaagaagagccagaagcggaagagaaaagaacggagaaggaagaaagagaccgagagaaagaaaagggcacagaggacagggaacaaggggaaaagcaagaggagaggagagaaaaaaaagcaaaagaggaaaagcaaacgaaagaaaaggggagaaaggaaagag

SEQ ID NO: 320990 - DNA, 1364 bp, Homo sapiens
ctcggtgccagcgagactgaggcgggctgggggatccgatggggtgaaagatttggaacagccaaagtgggggctcggagggcgtcaagaagcgagagagggacagggagcgttgatggtcacgcctgtaatcgcagcgctttgggaggccgaggcgggggagcgtcgcttgagcccaggagttcaagatcagcctgagcaacatagcgagactctgtctctacattttttttttaactagttcttctggagctcaacttcttgccaaccacagggaccaagctgaccaaacagcagctaattctggcccgtgacatactggagatcggggcccaatggagcatcctacgcaaggacatcccctccttcgagcgctacatggcccagctcaaatgctactactttgattacaaggagcagctccccgagtcagcctatatgcaccagctcttgggcctcaacctcctcttcctgctgtcccagaaccgggtggctgagttccacacggagttggagcggctgcctgccaaggacatacagaccaatgtctacatcaagcacccagtgtccctggagcaatacctgatggagggcagctacaacaaagtgttcctggccaagggtaacatccccgccgagagctacaccttcttcattgacatcctgctcgacactatcagggatgagatcgctgggtgcatcgagaaggcctacgagaaaatccttttcactgaggccacccggatcctcttcttcaacacacccaaaaagatgacagactacgccaagaagcgagggtgggtcctgggccccaacaactactacagttttgccagccagcagcagaagccggaagacaccaccattccctccacagaactggccaaacaggtcatcgagtatgcccggcagctggagatgatcgtctgagccccccgggcactgggtggggcagggcacgagttatttaaaacagttacactgcagggtttcgcccaataaaggtggactgacattccctcttccaggcccttgtctccccagttgggacggcagagagacaagttcttatatctgaagaacttggaggttttggggcattcaggagttggagatagcctccaactgggtcagcctctgtctggtgggcattgctcagggtctcaaacatggacgcccactgtggggccccagcagcactgtggcctgcaggagggcatggccccaggtagggggactgttctagccagctgtggacacataggaatgctggaccagggtaccagattttttcaacaaagggggtgaagtgtcctactaaaaagaataaatgttggcagtgaattaaacaatttttcaaatga

SEQ ID NO: 320991 - DNA, 1190 bp, Homo sapiens
aagctagtacgaggactggggtgtaaatcggccgagggcggggaagagctgggtcgactcaagctagttcttctggagctcaacttcttgccaaccacagggaccaagctgaccaaacagcagctaattctggcccgtgacatactggagatcggggcccaatggagcatcctacgcaaggacatcccctccttcgagcgctacatggcccagctcaaatgctactactttgattacaaggagcagctccccgagtcagcctatatgcaccagctcttgggcctcaacctcctcttcctgctgtcccagaaccgggtggctgagttccacacggagttggagcggctgcctgccaaggacatacagaccaatgtctacatcaagcacccagtgtccctggagcaatacctgatggagggcagctacaacaaagtgttcctggccaagggtaacatccccgccgagagctacaccttcttcattgacatcctgctcgacactatcagggatgagatcgctgggtgcatcgagaaggcctacgagaaaatccttttcactgaggccacccggatcctcttcttcaacacacccaaaaagatgacagactacgccaagaagcgagggtgggtcctgggccccaacaactactacagttttgccagccagcagcagaagccggaagacaccaccattccctccacagaactggccaaacaggtcatcgagtatgcccggcagctggagatgatcgtctgagccccccgggcactgggtggggcagggcacgagttatttaaaacagttacactgcagggtttcgcccaataaaggtggactgacattccctcttccaggcccttgtctccccagttgggacggcagagagacaagttcttatatctgaagaacttggaggttttggggcattcaggagttggagatagcctccaactgggtcagcctctgtctggtgggcattgctcagggtctcaaacatggacgcccactgtggggccccagcagcactgtggcctgcaggagggcatggccccaggtagggggactgttctagccagctgtggacacataggaatgctggaccagggtaccagattttttcaacaaagggggtgaagtgtcctactaaaaagaataaatgttggcagtgaattaaacaatttttcaaatga

SEQ ID NO: 320992 - DNA, 1601 bp, Homo sapiens
tataaaatgagaataacacagctctccaaatggcacgacacccgctaccttttggcttggagacgctgccccgaaggcggaacctccaggacagctacgtagcgtcccgagcactcagactgaagccagggcagccatgttcattattggaaccgtgaggtgggtagggggggtggtgttgagacagctgtcattttcagttagggcaaaagccaacttccggtcaccatcttgagtgacgacagaggcggagctccaactgacatgttcattaagggcagggctccgagggcgccacctcgagagcgacggcgggctacccggggcgggctgaggcaggttgtagccccgccccgggccttgggctccacctctcggccccacttccgccgggcaagcgtttgtaggcggcgctgccgtaaatcaggcggtctgcttgccgcatcacgcaagatggcggccgcggcggtgaacggggcggcaggcttctcgagctccgggcccgcggcaacctcgggcgctgttctgcaggccgcgaccggcatgtacgagcaactcaagggcgagtggaaccgtaaaagccccaatcttagcaagtgcggggaagagctgggtcgactcaagctcaaatgctactactttgattacaaggagcagctccccgagtcagcctatatgcaccagctcttgggcctcaacctcctcttcctgctgtcccagaaccgggtggctgagttccacacggagttggagcggctgcctgccaaggacatacagaccaatgtctacatcaagcacccagtgtccctggagcaatacctgatggagggcagctacaacaaagtgttcctggccaagggtaacatccccgccgagagctacaccttcttcattgacatcctgctcgacactatcagggatgagatcgctgggtgcatcgagaaggcctacgagaaaatccttttcactgaggccacccggatcctcttcttcaacacacccaaaaagatgacagactacgccaagaagcgagggtgggtcctgggccccaacaactactacagttttgccagccagcagcagaagccggaagacaccaccattccctccacagaactggccaaacaggtcatcgagtatgcccggcagctggagatgatcgtctgagccccccgggcactgggtggggcagggcacgagttatttaaaacagttacactgcagggtttcgcccaataaaggtggactgacattccctcttccaggcccttgtctccccagttgggacggcagagagacaagttcttatatctgaagaacttggaggttttggggcattcaggagttggagatagcctccaactgggtcagcctctgtctggtgggcattgctcagggtctcaaacatggacgcccactgtggggccccagcagcactgtggcctgcaggagggcatggccccaggtagggggactgttctagccagctgtggacacataggaatgctggaccagggtaccagattttttcaacaaagggggtgaagtgtcctactaaaaagaataaatgttggcagtgaattaaacaatttttcaaatga

SEQ ID NO: 320993 - DNA, 1020 bp, Homo sapiens
  misc_feature (8)..(8): n is a, c, g, or t
  misc_feature (42)..(42): n is a, c, g, or t
tgctgccnacagggatgtcacagtcagtagataagagccatnttaagactctctgtatcatcctcagaaggacagggagaatttatgtaacatctgaagcagtgttaagattcctgctgtgttcatcattcaggaaaggagagagcaccacctacagcgagcacctgtattggtggtgcctgccaaggacatacagaccaatgtctacatcaagcacccagtgtccctggagcaatacctgatggagggcagctacaacaaagtgttcctggccaagggtaacatccccgccgagagctacaccttcttcattgacatcctgctcgacactatcagggatgagatcgctgggtgcatcgagaaggcctacgagaaaatccttttcactgaggccacccggatcctcttcttcaacacacccaaaaagatgacagactacgccaagaagcgagggtgggtcctgggccccaacaactactacagttttgccagccagcagcagaagccggaagacaccaccattccctccacagaactggccaaacaggtcatcgagtatgcccggcagctggagatgatcgtctgagccccccgggcactgggtggggcagggcacgagttatttaaaacagttacactgcagggtttcgcccaataaaggtggactgacattccctcttccaggcccttgtctccccagttgggacggcagagagacaagttcttatatctgaagaacttggaggttttggggcattcaggagttggagatagcctccaactgggtcagcctctgtctggtgggcattgctcagggtctcaaacatggacgcccactgtggggccccagcagcactgtggcctgcaggagggcatggccccaggtagggggactgttctagccagctgtggacacataggaatgctggaccagggtaccagattttttcaacaaagggggtgaagtgtcctactaaaaagaataaatgttggcagtgaattaaacaatttttcaaatga

SEQ ID NO: 320994 - DNA, 1245 bp, Homo sapiens
tataaaatgagaataacacagctctccaaatggcacgacacccgctaccttttggcttggagacgctgccccgaaggcggaacctccaggacagctacgtagcgtcccgagcactcagactgaagccagggcagccatgttcattattggaaccgtgaggtgggtagggggggtggtgttgagacagctgtcattttcagttagggcaaaagccaacttccggtcaccatcttgagtgacgacagaggcggagctccaactgacatgttcattaagggcagggctccgagggcgccacctcgagagcgacggcgggctacccggggcgggctgaggcaggttgtagccccgccccgggccttgggctccacctctcggccccacttccgccgggcaagcgtttgtaggcggcgctgccgtaaatcaggcggtctgcttgccgcatcacgcaagatggcggccgcggcggtgaacggggcggcaggcttctcgagctccgggcccgcggcaacctcgggcgctgttctgcaggccgcgaccggcatgtacgagcaactcaagggcgagtggaaccgtaaaagccccaatcttagcaagtgcggggaagagctgggtcgactcaagctagttcttctggagctcaacttcttgccaaccacagggaccaagctgaccaaacagcagctaattctggcccgtgacatactggagatcggggcccaatggagcatcctacgcaaggacatcccctccttcgagcgctacatggcccagctcaaatgctactactttgattacaaggagcagctccccgagtcagcctatatgcaccagctcttgggcctcaacctcctcttcctgctgtcccagaaccgggtggctgagttccacacggagttggagcggctgcctgccaaggacatacagaccaatgtctacatcaagcacccagtgtccctggagcaatacctgatggagggcagctacaacaaagtgttcctggccaagggtaacatccccgccgagagctacaccttcttcattgacatcctgctcgacactatcagggatgagatcgctgggtgcatcgagaaggcctacgagaaaatccttttcactgaggccacccggatcctcttcttcaacacacccaaaaagatgacagactacgccaagaagcgagggtgggtcctgggccccaacaactactacagtatggctcagcgctggggtccttctagataa

SEQ ID NO: 320995 - DNA, 1069 bp, Homo sapiens
gtgcctcttgatgggtacaaggaaccccctcaggatctatgaagtggggtgcagcaccctggtgatgggtgttatgagaagagatgccctcatgtgagtcccaagctgggtttcagacctgaaatcctgtggctgggagtgggattcagagtgtgggcccaggagtcagagatttcagtggggatcacccgtggcccttgcttgctttgcgagtctggtcaagtttctccccttctgagccttgatgaataaaacagggcccttcacatattcctgccatcagtgctgaactccagggtcagagctgacacatgtcaggtctggggggacaggtcctgggaggttgttgatgctcagtaatgaggagcttctcatcttcccccagggatgagatcgctgggtgcatcgagaaggcctacgagaaaatccttttcactgaggccacccggatcctcttcttcaacacacccaaaaagatgacagactacgccaagaagcgagggtgggtcctgggccccaacaactactacagttttgccagccagcagcagaagccggaagacaccaccattccctccacagaactggccaaacaggtcatcgagtatgcccggcagctggagatgatcgtctgagccccccgggcactgggtggggcagggcacgagttatttaaaacagttacactgcagggtttcgcccaataaaggtggactgacattccctcttccaggcccttgtctccccagttgggacggcagagagacaagttcttatatctgaagaacttggaggttttggggcattcaggagttggagatagcctccaactgggtcagcctctgtctggtgggcattgctcagggtctcaaacatggacgcccactgtggggccccagcagcactgtggcctgcaggagggcatggccccaggtagggggactgttctagccagctgtggacacataggaatgctggaccagggtaccagattttttcaacaaagggggtgaagtgtcctactaaaaagaataaatgttggcagtgaattaaacaatttttcaaatga

SEQ ID NO: 320996 - DNA, 1072 bp, Homo sapiens
tataaaatgagaataacacagctctccaaatggcacgacacccgctaccttttggcttggagacgctgccccgaaggcggaacctccaggacagctacgtagcgtcccgagcactcagactgaagccagggcagccatgttcattattggaaccgtgaggtgggtagggggggtggtgttgagacagctgtcattttcagttagggcaaaagccaacttccggtcaccatcttgagtgacgacagaggcggagctccaactgacatgttcattaagggcagggctccgagggcgccacctcgagagcgacggcgggctacccggggcgggctgaggcaggttgtagccccgccccgggccttgggctccacctctcggccccacttccgccgggcaagcgtttgtaggcggcgctgccgtaaatcaggcggtctgcttgccgcatcacgcaagatggcggccgcggcggtgaacggggcggcaggcttctcgagctccgggcccgcggcaacctcgggcgctgttctgcaggccgcgaccggcatgtacgagcaactcaagggcgagtggaaccgtaaaagccccaatcttagcaagtgcggggaagagctgggtcgactcaagctagttcttctggagctcaacttcttgccaaccacagggaccaagctgaccaaacagcagctaattctggcccgtgacatactggagatcggggcccaatggagcatcctacgcaaggacatcccctccttcgagcgctacatggcccagctcaaatgctactactttgattacaaggagcagctccccgagtcagcctatatgcaccagctcttgggcctcaacctcctcttcctgctgtcccagaaccgggtggctgagttccacacggagttggagcggctgcctgccaaggacatacagaccaatgtctacatcaagcagtcacaagcccgcaagcaagcagttatagtgtagaggatcacccacgtggatcacctaaacatcgatagaaccgccgcagcgtacactttcctgcttgaagtccagcactacgcctcgcacagac

SEQ ID NO: 320997 - DNA, 520 bp, Homo sapiens
cgtgtgaccgtccgtgagagtgtgaccatccatgtgagcatctgtgtgaccgtccgtgtgagcatccatgtgagcctgtgaccgtccgtgtgagtgtgtgaccatccgtgtgagagtgtgaccatccatgtgagcatccgtgtgagcatccgtgtgaccgtccgtgtgacgcgtgtgtgtaggggttgtctgtgtaggtgtatgagtgtaggtgtgtgtggaggtgtgtgtggtgggtgtagatgtgtgtgtggggtgtgtgtaggtctactgggtggaggtgtggtgtgtggaggtgtgtgtggtggactgtggtggctggtgtagacgggatgaggcaggtatttgtgtgtacccaccgggtggggtgagccacaaccgctcttgtattgccagcgcccttgggtagggtgaggcagagctgacatgaaactaaacaaagctttctcaactctctccacaaggatccacagggatcccagatggtgtcctcagaaaccccagtgatagctggcagggg

SEQ ID NO: 320998 - DNA, 2666 bp, Homo sapiens
acatttcagggacaccatgaagggtggcttcactgggggtgatgagtaccagaagcacttcctgcccagggactacttggctacttactacagcttcgatggcagcccctcacccgaggccgagatgctgaagtttaacttggaatgtctccacaagaccttcggccctggaggcctccaaggggacacgctgattgacattggctcaggtcctaccatctaccaagttcttgctgcctgtgattccttccaagacatcactctctccgactttaccgaccgcaaccgggaggagctggaaaagtggctgaagaaggagccgggggcctatgactggaccccagcggtgaaattcgcctgtgagctggaaggaaacagcggccgatgggaggagaaggaggagaagctgcgggcagcggtgaagcgggtgctcaagtgcgatgtccacctgggcaacccgctggccccggctgtgttgcctctcgccgactgtgtgctcaccctgctggccatggagtgtgcctgctgtagccttgatgcctaccgcgctgccctgtgcaaccttgcctcactgctcaagccgggtggccacctggtgaccactgtcacgcttcggctcccgtcctacatggtggggaagcgtgaattttcctgcgtggccctggagaaagaggaggtggagcaggctgtcctggatgctggctttgacattgaacagctcctacacagtccccagagctactctgtcaccaatgctgccaacaatggggtctgctgcattgtggctcgcaagaagcctgggccctgagccaggagggccagccagaggtctggtcaggctgtgaggccttggccatctgtatgctagagaggggtgaggaatggatgctgtctaacagtctctgatttcaacactaacattccatcttctgaaattctgagattctaacatccttgttttagaattctaagtttccaacattcctcattctaggatcctaggagtggaattttccattttctaatatactaagccttacagctatcttagatgcgatctgactcctgtgtgactgtggagcacccagggacgtggttttagagtctacctaatatgttaaggacaaggaaacctctgagtctacctaatatgttaaggacaaggaaacctctggacagtggtatattggggaattttttttttttttttgagacggagtctggctctgtcacccaggctagagtgcaatggcacgatctcggctcactgcaagctctgcgtcctgggttgacgccattctcctgcctcagcctcctgagtagctgggactacaggagctcgccaccacacccagctaattttttttttttttttttttttttatttgagacggagtttcgctctgtcgcccaggctggagtgcagtggcgcgatctcgactcactgcaagctccgcctcccgggttcacgccattctcctgcctcagcctcccgtgtagctgggactacaggcacgcgccaccatgcccggctaatttttgtatttttagtagatatggggtttcaccgtgttagccaggatggtctcgatctcctgacctggtgatccacccacctcggcctcccaaagtgctgggattacaggcgtgagccaccgcacccagccagggggaatgttctataaccagctctgtaaaggaaaagcactgatgtgtggtagtcaccaatttctgtggtgtaaatactcccaccatggttgatttcaagccaccagtggtttaataaccagctcataaatctcctaaatattttacagttgactctcatgagctgattggagtcagctggaacataccactgcctctagactaaggccagcagatttagcaaatacagactgccccagttcattgaattttagataaatgaaataaatctataaggttaagtatgtccccagaactgcatggaacatgcttaatctaaacaatgatttgttgttcacctgaaattcaaatttagctgggtgtcctgtatttcatctggcaaccctacttcagacccaggtgtaaggtacatggatgtgctttggtcaaggaataggccaaggcagagatccatgcctgcatgactcagtgggtttggtgcacaggcacacacctccacttgttatataacctgtttgtgtaagttcatacttggtctgagccactgttgtctgtaaaaggtaattgtcctgctaatgctgtacaggggctcttggggttcggctcagctcaacatggcttgacatggtgggcacactggcgcccagtaagagagagagagagccaaagctgtccgttttgcagatggacaggaaggagccaggacacagctcagcttgctcacgcccagagagagagtggaagccacgggctcaagcagccaaggcagggcggacagtgtgagagagctagtgtaagctgttgatgagagctgttgctgaataaaaccatattcacctgccggaataaaaaaatatatattattagataattttttagttatatattttttgttttattggtgggggggttattgtataatatatttattttattttggagggggggcccttacccaaattggcccttttatggagtgtgttttaaaatatcagggg

SEQ ID NO: 320999 - DNA, 2564 bp, Homo sapiens
acatttcagggacaccatgaagggtggcttcactgggggtgatgagtaccagaagcacttcctgcccagggactacttggctacttactacagcttcgatggcagcccctcacccgaggccgagatgctgaagtttaacttggaatgtctccacaagaccttcggccctggaggcctccaaggggacacgctgattgacattggctcaggtcctaccatctaccaagttcttgctgcctgtgattccttccaagacatcactctctccgactttaccgaccgcaaccgggaggagctggaaaagtggctgaagaaggagccgggggcctatgactggaccccagcggtgaaattcgcctgtgagctggaaggaaacagcggccgatgggaggagaaggaggagaagctgcgggcagcggtgaagcgggtgctcaagtgcgatgtccacctgggcaacccgctggccccggctgtgttgcctctcgccgactgtgtgctcaccctgctggccatggagtgtgcctgctgtagccttgatgcctaccgcgctgccctgtgcaaccttgcctcactgctcaagccgggtggccacctggtgaccactgtcacgcttcggctcccgtcctacatggtggggaagcgtgaattttcctgcgtggccctggagaaagaggaggtggagcaggctgtcctggatgctggctttgacattgaacagctcctacacagtccccagagctactctgtcaccaatgctgccaacaatggggtctgctgcattgtggctcgcaagaagcctgggccctgagccaggagggccagccagaggtctggtcaggctgtgaggccttggccatctgtatgctagagaggggtgaggaatggatgctgtctaacagtctctgatttcaacactaacattccatcttctgaaattctgagattctaacatccttgttttagaattctaagtttccaacattcctcattctaggatcctaggagtggaattttccattttctaatatactaagccttacagctatcttagatgcgatctgactcctgtgtgactgtggagcacccagggacgtggttttagagtctacctaatatgttaaggacaaggaaacctctgagtctacctaatatgttaaggacaaggaaacctctggacagtggtatattggggaattttttttttttttttgagacggagtctggctctgtcacccaggctagagtgcaatggcacgatctcggctcactgcaagctctgcgtcctgggttgacgccattctcctgcctcagcctcctgagtagctgggactacaggagctcgccaccacacccagctaattttttttttttttttttttttttatttgagacggagtttcgctctgtcgcccaggctggagtgcagtggcgcgatctcgactcactgcaagctccgcctcccgggttcacgccattctcctgcctcagcctcccgtgtagctgggactacaggcacgcgccaccatgcccggctaatttttgtatttttagtagatatggggtttcaccgtgttagccaggatggtctcgatctcctgacctggtgatccacccacctcggcctcccaaagtgctgggattacaggcgtgagccaccgcacccagccagggggaatgttctataaccagctctgtaaaggaaaagcactgatgtgtggtagtcaccaatttctgtggtgtaaatactcccaccatggttgatttcaagccaccagtggtttaataaccagctcataaatctcctaaatattttacagttgactctcatgagctgattggagtcagctggaacataccactgcctctagactaaggccagcagatttagcaaatacagactgccccagttcattgaattttagataaatgaaataaatctataaggttaagtatgtccccagaactgcatggaacatgcttaatctaaacaatgatttgttgttcacctgaaattcaaatttagctgggtgtcctgtatttcatctggcaaccctacttcagacccaggtgtaaggtacatggatgtgctttggtcaaggaataggccaaggcagagatccatgcctgcatgactcagtgggtttggtgcacaggcacacacctccacttgttatataacctgtttgtgtaagttcatacttggtctgagccactgttgtctgtaaaaggtaattgtcctgctaatgctgtacaggggctcttggggttcggctcagctcaacatggcttgacatggtgggcacactggcgcccagtaagagagagagagagccaaagctgtccgttttgcagatggacaggaaggagccaggacacagctcagcttgctcacgcccagagagagaaaaagttaagctgctgaccctgaaggcaagggagagcaggctgcacagctgtgtgtggaagccacgggctcaagcagccaaggcagggcggacagtgtgagagagctagtgtaagctgttgatgagagctgttgctgaataaaaccatattcacctgcc

SEQ ID NO: 321000 - DNA, 2720 bp, Homo sapiens
acatttcagggacaccatgaagggtggcttcactgggggtgatgagtaccagaagcacttcctgcccagggactacttggctacttactacagcttcgatggcagcccctcacccgaggccgagatgctgaagtttaacttggaatgtctccacaagaccttcggccctggaggcctccaaggggacacgctgattgacattggctcaggtcctaccatctaccaagttcttgctgcctgtgattccttccaagacatcactctctccgactttaccgaccgcaaccgggaggagctggaaaagtggctgaagaaggagccgggggcctatgactggaccccagcggtgaaattcgcctgtgagctggaaggaaacagcggccgatgggaggagaaggaggagaagctgcgggcagcggtgaagcgggtgctcaagtgcgatgtccacctgggcaacccgctggccccggctgtgttgcctctcgccgactgtgtgctcaccctgctggccatggagtgtgcctgctgtagccttgatgcctaccgcgctgccctgtgcaaccttgcctcactgctcaagccgggtggccacctggtgaccactgtcacgcttcggctcccgtcctacatggtggggaagcgtgaattttcctgcgtggccctggagaaagaggaggtggagcaggctgtcctggatgctggctttgacattgaacagctcctacacagtccccagagctactctgtcaccaatgctgccaacaatggggtctgctgcattgtggctcgcaagaagcctgggccctgagccaggagggccagccagaggtctggtcaggctgtgaggccttggccatctgtatgctagagaggggtgaggaatggatgctgtctaacagtctctgatttcaacactaacattccatcttctgaaattctgagattctaacatccttgttttagaattctaagtttccaacattcctcattctaggatcctaggagtggaattttccattttctaatatactaagccttacagctatcttagatgcgatctgactcctgtgtgactgtggagcacccagggacgtggttttagagtctacctaatatgttaaggacaaggaaacctctgagtctacctaatatgttaaggacaaggaaacctctggacagtggtatattggggaattttttttttttttttgagacggagtctggctctgtcacccaggctagagtgcaatggcacgatctcggctcactgcaagctctgcgtcctgggttgacgccattctcctgcctcagcctcctgagtagctgggactacaggagctcgccaccacacccagctaattttttttttttttttttttttttatttgagacggagtttcgctctgtcgcccaggctggagtgcagtggcgcgatctcgactcactgcaagctccgcctcccgggttcacgccattctcctgcctcagcctcccgtgtagctgggactacaggcacgcgccaccatgcccggctaatttttgtatttttagtagatatggggtttcaccgtgttagccaggatggtctcgatctcctgacctggtgatccacccacctcggcctcccaaagtgctgggattacaggcgtgagccaccgcacccagccagggggaatgttctataaccagctctgtaaaggaaaagcactgatgtgtggtagtcaccaatttctgtggtgtaaatactcccaccatggttgatttcaagccaccagtggtttaataaccagctcataaatctcctaaatattttacagttgactctcatgagctgattggagtcagctggaacataccactgcctctagactaaggccagcagatttagcaaatacagactgccccagttcattgaattttagataaatgaaataaatctataaggttaagtatgtccccagaactgcatggaacatgcttaatctaaacaatgatttgttgttcacctgaaattcaaatttagctgggtgtcctgtatttcatctggcaaccctacttcagacccaggtgtaaggtacatggatgtgctttggtcaaggaataggccaaggcagagatccatgcctgcatgactcagtgggtttggtgcacaggcacacacctccacttgttatataacctgtttgtgtaagttcatacttggtctgagccactgttgtctgtaaaaggtaattgtcctgctaatgctgtacaggggctcttggggttcggctcagctcaacatggcttgacatggtgggcacactggcgcccagtaagagagagagagagccaaagctgtccgttttgcagatggacaggaaggagccaggacacagctcagcttgctcacgcccagagagagaaaaagttaagctgctgaccctgaaggcaagggagagcaggctgcacagctgtgtgtggaagccacgggctcaagcagccaaggcagggcggacagtgtgagagagctagtgtaagctgttgatgagagctgttgctgaataaaaccatattcacctgccggaataaaaaaatatatattattagataattttttagttatatattttttgttttattggtgggggggttattgtataatatatttattttattttggagggggggcccttacccaaattggcccttttatggagtgtgttttaaaatatcagggg

SEQ ID NO: 321001 - DNA, 4961 bp, Homo sapiens
  misc_feature (4697)..(4697): n is a, c, g, or t
ctcctcctgcagcagcggcagcggcagcagcagttagcagcggcaacttgaggctgcaccccgggcaagtccccagggtggtgctcagccgagaggggggcttggcgccccgaaggggtgtgtgtagggtgggggcgaccagctgggaccagctggtggccctggaaaacctcccacacacccacacccacacaccccttttgtgttgcaggctgcccctccaagagcggaggcagcgagagtacgcgtgtgcctcgcgccggtccacgcggggagagcactggggaccgagacccggcaccacctcccggtccgccctccagggaaaacgggaaaactagcaagagctagcaagaactagcaagagcttgaacaaacgcctggactcagattggaagactgctcatttgtctactgcctcattcctggaaattgcactggaactgtctgattaagaaaaacagaataattctgaaagaaagaaaacaaagaaaaacatactccagaattcctaatagaacacttcacctgaacctaaaatggtgagcgagagtcaccatgaggccctggcagccccgcctgtcaccactgtcgcgactgttctgccaagcaacgccacagagccagccagtcctggagaaggaaaggaagatgcattttctaagctgaaggagaagtttatgaatgagttgcataaaattccattgccaccgtgggccttaattgcaatagccatagtcgcagtccttttagtcctgacctgctgcttttgtatctgtaagaaatgtttgttcaaaaagaaaaacaagaagaagggaaaggaaaaaggagggaagaatgccattaacatgaaagatgtaaaagacttagggaagacgatgaaagatcaggccctcaaggatgatgatgctgaaactggattgacagatggagaagaaaaagaagaacccaaagaagaggagaaactgggaaaacttcagtattcactggattatgatttccaaaataaccagctgctggtagggatcattcaggctgctgaactgcccgccttggacatggggggcacatctgatccttacgtgaaagtgtttctgctacctgataagaagaagaaatttgagacaaaagtccaccgaaaaacccttaatcctgtcttcaatgagcaatttactttcaaggtaccatactcggaattgggtggcaaaaccctagtgatggctgtatatgattttgatcgtttctctaagcatgacatcattggagaatttaaagtccctatgaacacagtggattttggccatgtaactgaggaatggcgtgacctgcaaagtgctgagaaggaagagcaagagaaattgggtgatatctgcttctcccttcgctacgtacctactgctggtaagctgactgttgtcattctggaggcaaagaacctgaagaagatggatgtgggtggcttatccgatccttatgtgaagattcatctgatgcagaatggtaagaggctgaagaagaaaaagacaacaattaaaaagaacacacttaacccctactacaatgagtcattcagctttgaagtaccttttgaacaaatccagaaagtgcaggtggtggtaactgttttggactatgacaagattggcaagaacgatgccatcggcaaagtctttgtgggctacaacagcaccggcgcggagctgcgacactggtcagacatgctggccaaccccaggcgacctattgcccagtggcacaccctgcaggtagaggaggaagttgatgccatgctggccgtcaagaagtaaaggaaagaagaagcctttctgcatttgcccatatagtgctctttagccagtatctgtaaatacctcagtaatatgggtcctttcatttttccagccatgcattcctaacacaattcagtggtacttggaatcctgttttaatttgcacaaatttaaatgtagagagcccctaagtccttcatcataccactgccctccaaatctactcttcttttaagcaatatgatgtgtagatagagcatgaatgaaattatttattgtatcacactgttgtatataccagtatgctaaagatttatttctagtttgtgtatttgtatgttgtaagcgtttcctaatctgtgtatatctagatgtttttaataagatgttctattttaaactatgtaaattgactgagatataggagagctgataatatattatacggtaaatatagtatcgtctgcattccagcaaaaatatcaactcgtaaggcactagtacagttaaactgacatcttaaaggacaacttaaacctgagctttctattgaatcatttgagtaccaagataaacttacaccacatacttggtgggtgaatccaattttgtagaattcctacacaggcaaaatagcatgatctgagcagcagcatccaggctgacctcaaggaagcatagccacaaaacagaatagcacctgtctgtacatatttacaaagctaaaataatggcttcactcttatatttgaggaagcaactgaacaggagtcaatgatttcatattactgcatatagaataacaacaaggtgttccgtgtgtgtgtgtgtgtgtgtgtgtgtgtgtgtgcacatttgtttggggatgggggagaagaagctaaggggagaagtcaacatttatgaaatattgcctgactatttaaaaagaaaaaagtagctctccattatcacctttatacaaaatgtacatcctgtgaattctgttccagatttcacacctacaataattccaaaaggtttgcacattagagtttgtaacaaaatattttattatataaaaccaggttagaaggaatgcaggatatttttaacacaacaatctgtgcttattacacaaaattactttgtggtaaacagacagtattgtaatcccatcaaaagatgaaagaaaaacaaaaacaaaaaccaacaacaattagccatagttctgaatgcacttcaattaagccaaaacagacagctagtgatctttttatatgctctttttacttaagttttaatttgtcctttaaaaaaaggtgaaacaaaccaagaacaagttctagaaaactgaagcaacctcttatgtatactagatgcttgatttaggaggagtttttaaacgttttcaatgttattatgtagtaaatgacactattatgaagctactagtcattccataagagtcttaaaggactgctctgtgtaacactgtgactgccgtgtgtgcttagacccgtagtttcctcagtggatagcactcaatttattccgtagtgatattgtaacaatactgccattcccttctactgcactgcccaaggtgtgtgtagcacaaacagttctcattacaaaggaccaattcagaactgaaaagctatgcataggacaaggaagatacatagaatggggtggaacacagcattttgtcaagcactgtgcaatattccatatttttccccactatggtagacaaccatttcgtggaagggcagcctattatcccacactgcatctagccttttgtcccattcacttctgtgatccattttaatttccaggccacaagacagtagtgatgctctgaaatgaaagtttgtcttcacaaatatcaaaacaaaatggaggaaaactaagcattggcctcatgttcagtcttcaggatatcacaccacgtcttttcaaaaactaaagagaattcaaaaagggctgatggtaggctttgaacatggggttggctgtttcccagtaaaactggaattcctgtcgttactgtttccttatcaaagaaggggcaagctcttttgccttttaggccagacatagcaaacgctttataattggcatagacataaaggataaaaggaaaataaccgtctgccgatggtccgtacttcttaaaaaacataggtaatagaaaatatacacaagtcagaatgtgaaattaaataatggtttgaacagaaaattcaaacaagactctttccaatttaaagggccaaaccctaccaaagagagggagttgactggcttttaaaaagtatttaaataccacaaatgacatttaatttcactgtattcagctttaagttgttcacaatgaaaccacactttcaaacaagcaggttcaagctgctgaatagacattatttcttgcattaaaataccactaatgcattctcttgcaacactgccagacatgggattgtcaccatagaattagttggtactatgccatctttcactctttcacaagtcagtgatggaacctgctttatgaccaagattcatcctcaaataagccacatgtacccttctgacaaagctgtgtaaagtattagaatctgatgctctagaaagatcctagttgcctttgtgtatatttactgcctgcttgagtgtttctatgtgtgggttttccctgtatcttgtagaaatgttggggtgttttcctctgccatatggctcgtggcctgcgagccaactatttcagctgtattttaccttcatttttgatgaggtgatttaaattttgtttcactttgtgtagtgaattccacagtagttttctgattgttgttaaaaatgacttaacatattacacagatattcaataaaaatgttttatttcctgttgaaaaaaanaaacaaaacgaaagctggacatatatgctaaaaaatattaaccttggggggggccccgagcccaaatgccccttaagggagatggtataaaattcaacgggccttgttttaacaccgtctggatgggaaaaccctgtgttttaccaactttatcggcttggaagaaaatccccttttcgcaagtgggagtattaccaaaaagccccgaccgtttcgccttcccaaacatttgcccaccctgatgggaaatggttgagctttttt

SEQ ID NO: 321002 - DNA, 4907 bp, Homo sapiens
  misc_feature (4643)..(4643): n is a, c, g, or t
ctcctcctgcagcagcggcagcggcagcagcagttagcagcggcaacttgaggctgcaccccgggcaagtccccagggtggtgctcagccgagaggggggcttggcgccccgaaggggtgtgtgtagggtgggggcgaccagctgggaccagctggtggccctggaaaacctcccacacacccacacccacacaccccttttgtgttgcaggctgcccctccaagagcggaggcagcgagagtacgcgtgtgcctcgcgccggtccacgcggggagagcactggggaccgagacccggcaccacctcccggtccgccctccagggaaaacgggaaaactagcaagagctagcaagaactagcaagagcttgaacaaacgcctggactcagattggaagactgctcatttgtctactgcctcattcctggaaattgcactggaactgtctgattaagaaaaacagaataattctgaaagaaagaaaacaaagaaaaacatactccagaattcctaatagaacacttcacctgaacctaaaatggtgagcgagagtcaccatgaggccctggcagccccgcctgtcaccactgtcgcgactgttctgccaagcaacgccacagagccagccagtcctggagaaggaaaggaagatgcattttctaagctgaaggagaagtttatgaatgagttgcataaaattccattgccaccgtgggccttaattgcaatagccatagtcgcagtccttttagtcctgacctgctgcttttgtatctgtaagaaatgtttgttcaaaaagaaaaacaagaagaagggaaaggaaaaaggagggaagaatgccattaacatgaaagatgtaaaagacttagggaagacgatgaaagatcaggccctcaaggatgatgatgctgaaactggattgacagatggagaagaaaaagaagaacccaaagaagaggagaaactgggaaaacttcagtattcactggattatgatttccaaaataaccagctgctggtagggatcattcaggctgctgaactgcccgccttggacatggggggcacatctgatccttacgtgaaagtgtttctgctacctgataagaagaagaaatttgagacaaaagtccaccgaaaaacccttaatcctgtcttcaatgagcaatttactttcaaggtaccatactcggaattgggtggcaaaaccctagtgatggctgtatatgattttgatcgtttctctaagcatgacatcattggagaatttaaagtccctatgaacacagtggattttggccatgtaactgaggaatggcgtgacctgcaaagtgctgagaaggaagagcaagagaaattgggtgatatctgcttctcccttcgctacgtacctactgctggtaagctgactgttgtcattctggaggcaaagaacctgaagaagatggatgtgggtggcttatccgatccttatgtgaagattcatctgatgcagaatggtaagaggctgaagaagaaaaagacaacaattaaaaagaacacacttaacccctactacaatgagtcattcagctttgaagtaccttttgaacaaatccagaaagtgcaggtggtggtaactgttttggactatgacaagattggcaagaacgatgccatcggcaaagtctttgtgggctacaacagcaccggcgcggagctgcgacactggtcagacatgctggccaaccccaggcgacctattgcccagtggcacaccctgcaggtagaggaggaagttgatgccatgctggccgtcaagaagtaaaggaaagaagaagcctttctgcatttgcccatatagtgctctttagccagtatctgtaaatacctcagtaatatgggtcctttcatttttccagccatgcattcctaacacaattcagtggtacttggaatcctgttttaatttgcacaaatttaaatgtagagagcccctaagtccttcatcataccactgccctccaaatctactcttcttttaagcaatatgatgtgtagatagagcatgaatgaaattatttattgtatcacactgttgtatataccagtatgctaaagatttatttctagtttgtgtatttgtatgttgtaagcgtttcctaatctgtgtatatctagatgtttttaataagatgttctattttaaactatgtaaattgactgagatataggagagctgataatatattatacggtaaatatagtatcgtctgcattccagcaaaaatatcaactcgtaaggcactagtacagttaaactgacatcttaaaggacaacttaaacctgagctttctattgaatcatttgagtaccaagataaacttacaccacatacttggtgggtgaatccaattttgtagaattcctacacaggcaaaatagcatgatctgagcagcagcatccaggctgacctcaaggaagcatagccacaaaacagaatagcacctgtctgtacatatttacaaagctaaaataatggcttcactcttatatttgaggaagcaactgaacaggagtcaatgatttcatattactgcatatagaataacaacaaggtgttccgtgtgtgtgtgtgtgtgtgtgtgtgtgtgtgtgcacatttgtttggggatgggggagaagaagctaaggggagaagtcaacatttatgaaatattgcctgactatttaaaaagaaaaaagtagctctccattatcacctttatacaaaatgtacatcctgtgaattctgttccagatttcacacctacaataattccaaaaggtttgcacattagagtttgtaacaaaatattttattatataaaaccaggttagaaggaatgcaggatatttttaacacaacaatctgtgcttattacacaaaattactttgtggtaaacagacagtattgtaatcccatcaaaagatgaaagaaaaacaaaaacaaaaaccaacaacaattagccatagttctgaatgcacttcaattaagccaaaacagacagctagtgatctttttatatgctctttttacttaagttttaatttgtcctttaaaaaaaggtgaaacaaaccaagaacaagttctagaaaactgaagcaacctcttatgtatactagatgcttgatttaggaggagtttttaaacgttttcaatgttattatgtagtaaatgacactattatgaagctactagtcattccataagagtcttaaaggactgctctgtgtaacactgtgactgccgtgtgtgcttagacccgtagtttcctcagtggatagcactcaatttattccgtagtgatattgtaacaatactgccattcccttctactgcactgcccaaggtgtgtgtagcacaaacagttctcattacaaaggaccaattcagaactgaaaagctatgcataggacaaggaagatacatagaatggggtggaacacagcattttgtcaagcactgtgcaatattccatatttttccccactatggtagacaaccatttcgtggaagggcagcctattatcccacactgcatctagccttttgtcccattcacttctgtgatccattttaatttccaggccacaagacagtagtgatgctctgaaatgaaagtttgtcttcacaaatatcaaaacaaaatggaggaaaactaagcattggcctcatgttcagtcttcaggatatcacaccacgtcttttcaaaaactaaagagaattcaaaaagggctgatggtaggctttgaacatggggttggctgtttcccagtaaaactggaattcctgtcgttactgtttccttatcaaagaaggggcaagctcttttgccttttaggccagacatagcaaacgctttataattggcatagacataaaggataaaaggaaaataaccgtctgccgatggtccgtacttcttaaaaaacataggtaatagaaaatatacacaagtcagaatgtgaaattaaataatggtttgaacagaaaattcaaacaagactctttccaatttaaagggccaaaccctaccaaagagagggagttgactggcttttaaaaagtatttaaataccacaaatgacatttaatttcactgtattcagctttaagttgttcacaatgaaaccacactttcaaacaagcaggttcaagctgctgaatagacattatttcttgcatttagaattagttggtactatgccatctttcactctttcacaagtcagtgatggaacctgctttatgaccaagattcatcctcaaataagccacatgtacccttctgacaaagctgtgtaaagtattagaatctgatgctctagaaagatcctagttgcctttgtgtatatttactgcctgcttgagtgtttctatgtgtgggttttccctgtatcttgtagaaatgttggggtgttttcctctgccatatggctcgtggcctgcgagccaactatttcagctgtattttaccttcatttttgatgaggtgatttaaattttgtttcactttgtgtagtgaattccacagtagttttctgattgttgttaaaaatgacttaacatattacacagatattcaataaaaatgttttatttcctgttgaaaaaaanaaacaaaacgaaagctggacatatatgctaaaaaatattaaccttggggggggccccgagcccaaatgccccttaagggagatggtataaaattcaacgggccttgttttaacaccgtctggatgggaaaaccctgtgttttaccaactttatcggcttggaagaaaatccccttttcgcaagtgggagtattaccaaaaagccccgaccgtttcgccttcccaaacatttgcccaccctgatgggaaatggttgagctttttt

SEQ ID NO: 321003 - DNA, 4908 bp, Homo sapiens
  misc_feature (4644)..(4644): n is a, c, g, or t
ctcctcctgcagcagcggcagcggcagcagcagttagcagcggcaacttgaggctgcaccccgggcaagtccccagggtggtgctcagccgagaggggggcttggcgccccgaaggggtgtgtgtagggtgggggcgaccagctgggaccagctggtggccctggaaaacctcccacacacccacacccacacaccccttttgtgttgcaggctgcccctccaagagcggaggcagcgagagtacgcgtgtgcctcgcgccggtccacgcggggagagcactggggaccgagacccggcaccacctcccggtccgccctccagggaaaacgggaaaactagcaagagctagcaagaactagcaagagcttgaacaaacgcctggactcagattggaagactgctcatttgtctactgcctcattcctggaaattgcactggaactgtctgattaagaaaaacagaataattctgaaagaaagaaaacaaagaaaaacatactccagaattcctaatagaacacttcacctgaacctaaaatggtgagcgagagtcaccatgaggccctggcagccccgcctgtcaccactgtcgcgactgttctgccaagcaacgccacagagccagccagtcctggagaaggaaaggaagatgcattttctaagctgaaggagaagtttatgaatgagttgcataaaattccattgccaccgtgggccttaattgcaatagccatagtcgcagtccttttagtcctgacctgctgcttttgtatctgtaagaaatgtttgttcaaaaagaaaaacaagaagaagggaaaggaaaaaggagggaagaatgccattaacatgaaagatgtaaaagacttagggaagacgatgaaagatcaggccctcaaggatgatgatgctgaaactggattgacagatggagaagaaaaagaagaacccaaagaagaggagaaactgggaaaacttcagtattcactggattatgatttccaaaataaccagctgctggtagggatcattcaggctgctgaactgcccgccttggacatggggggcacatctgatccttacgtgaaagtgtttctgctacctgataagaagaagaaatttgagacaaaagtccaccgaaaaacccttaatcctgtcttcaatgagcaatttactttcaaggtaccatactcggaattgggtggcaaaaccctagtgatggctgtatatgattttgatcgtttctctaagcatgacatcattggagaatttaaagtccctatgaacacagtggattttggccatgtaactgaggaatggcgtgacctgcaaagtgctgagaaggaagagcaagagaaattgggtgatatctgcttctcccttcgctacgtacctactgctggtaagctgactgttgtcattctggaggcaaagaacctgaagaagatggatgtgggtggcttatccgatccttatgtgaagattcatctgatgcagaatggtaagaggctgaagaagaaaaagacaacaattaaaaagaacacacttaacccctactacaatgagtcattcagctttgaagtaccttttgaacaaatccagaaagtgcaggtggtggtaactgttttggactatgacaagattggcaagaacgatgccatcggcaaagtctttgtgggctacaacagcaccggcgcggagctgcgacactggtcagacatgctggccaaccccaggcgacctattgcccagtggcacaccctgcaggtagaggaggaagttgatgccatgctggccgtcaagaagtaaaggaaagaagaagcctttctgcatttgcccatatagtgctctttagccagtatctgtaaatacctcagtaatatgggtcctttcatttttccagccatgcattcctaacacaattcagtggtacttggaatcctgttttaatttgcacaaatttaaatgtagagagcccctaagtccttcatcataccactgccctccaaatctactcttcttttaagcaatatgatgtgtagatagagcatgaatgaaattatttattgtatcacactgttgtatataccagtatgctaaagatttatttctagtttgtgtatttgtatgttgtaagcgtttcctaatctgtgtatatctagatgtttttaataagatgttctattttaaactatgtaaattgactgagatataggagagctgataatatattatacggtaaatatagtatcgtctgcattccagcaaaaatatcaactcgtaaggcactagtacagttaaactgacatcttaaaggacaacttaaacctgagctttctattgaatcatttgagtaccaagataaacttacaccacatacttggtgggtgaatccaattttgtagaattcctacacaggcaaaatagcatgatctgagcagcagcatccaggctgacctcaaggaagcatagccacaaaacagaatagcacctgtctgtacatatttacaaagctaaaataatggcttcactcttatatttgaggaagcaactgaacaggagtcaatgatttcatattactgcatatagaataacaacaaggtgttccgtgtgtgtgtgtgtgtgtgtgtgtgtgtgtgtgcacatttgtttggggatgggggagaagaagctaaggggagaagtcaacatttatgaaatattgcctgactatttaaaaagaaaaaagtagctctccattatcacctttatacaaaatgtacatcctgtgaattctgttccagatttcacacctacaataattccaaaaggtttgcacattagagtttgtaacaaaatattttattatataaaaccaggttagaaggaatgcaggatatttttaacacaacaatctgtgcttattacacaaaattactttgtggtaaacagacagtattgtaatcccatcaaaagatgaaagaaaaacaaaaacaaaaaccaacaacaattagccatagttctgaatgcacttcaattaagccaaaacagacagctagtgatctttttatatgctctttttacttaagttttaatttgtcctttaaaaaaaggtgaaacaaaccaagaacaagttctagaaaactgaagcaacctcttatgtatactagatgcttgatttaggaggagtttttaaacgttttcaatgttattatgtagtaaatgacactattatgaagctactagtcattccataagagtcttaaaggactgctctgtgtaacactgtgactgccgtgtgtgcttagacccgtagtttcctcagtggatagcactcaatttattccgtagtgatattgtaacaatactgccattcccttctactgcactgcccaaggtgtgtgtagcacaaacagttctcattacaaaggaccaattcagaactgaaaagctatgcataggacaaggaagatacatagaatggggtggaacacagcattttgtcaagcactgtgcaatattccatatttttccccactatggtagacaaccatttcgtggaagggcagcctattatcccacactgcatctagccttttgtcccattcacttctgtgatccattttaatttccaggccacaagacagtagtgatgctctgaaatgaaagtttgtcttcacaaatatcaaaacaaaatggaggaaaactaagcattggcctcatgttcagtcttcaggatatcacaccacgtcttttcaaaaactaaagagaattcaaaaagggctgatggtaggctttgaacatggggttggctgtttcccagtaaaactggaattcctgtcgttactgtttccttatcaaagaaggggcaagctcttttgccttttaggccagacatagcaaacgctttataattggcatagacataaaggataaaaggaaaataaccgtctgccgatggtccgtacttcttaaaaaacataggtaatagaaaatatacacaagtcagaatgtgaaattaaataatggtttgaacagaaaattcaaacaagactctttccaatttaaagggccaaaccctaccaaagagagggagttgactggcttttaaaaagtatttaaataccacaaatgacatttaatttcactgtattcagctttaagttgttcacaatgaaaccacactttcaaacaagcaggttcaagctgctgaatagacattatttcttgcattaaaataccactaatgcattctcttgcaacactgccagacatgggattgtcaccatagaattagttggtactatgccatctttcactctttcacaagtcagtgatggaacctgctttatgaccaagattcatcctcaaataagccacatgtacccttctgacaaagctgtgtaaagtattagaatctgatgctctagaaagatcctaccctgtatcttgtagaaatgttggggtgttttcctctgccatatggctcgtggcctgcgagccaactatttcagctgtattttaccttcatttttgatgaggtgatttaaattttgtttcactttgtgtagtgaattccacagtagttttctgattgttgttaaaaatgacttaacatattacacagatattcaataaaaatgttttatttcctgttgaaaaaaanaaacaaaacgaaagctggacatatatgctaaaaaatattaaccttggggggggccccgagcccaaatgccccttaagggagatggtataaaattcaacgggccttgttttaacaccgtctggatgggaaaaccctgtgttttaccaactttatcggcttggaagaaaatccccttttcgcaagtgggagtattaccaaaaagccccgaccgtttcgccttcccaaacatttgcccaccctgatgggaaatggttgagctttttt

SEQ ID NO: 321004 - DNA, 221 bp, Homo sapiens
cggccgcctcctcactggagggattcctggagaagctgcagtgtggggatgctctagaccgagtactgcccccagtgtctttccacctcctcctgcagcagcggcagcggcagcagcagttagcagcggcaacttgaggctgcaccccgggcaagtccccagggtggtgctcagccgagaggggggcttggcgccccgaaggggtgtgtgtagggtggggg

SEQ ID NO: 321005 - DNA, 4907 bp, Homo sapiens
  misc_feature (4643)..(4643): n is a, c, g, or t
ctcctcctgcagcagcggcagcggcagcagcagttagcagcggcaacttgaggctgcaccccgggcaagtccccagggtggtgctcagccgagaggggggcttggcgccccgaaggggtgtgtgtagggtgggggcgaccagctgggaccagctggtggccctggaaaacctcccacacacccacacccacacaccccttttgtgttgcaggctgcccctccaagagcggaggcagcgagagtacgcgtgtgcctcgcgccggtccacgcggggagagcactggggaccgagacccggcaccacctcccggtccgccctccagggaaaacgggaaaactagcaagagctagcaagaactagcaagagcttgaacaaacgcctggactcagattggaagactgctcatttgtctactgcctcattcctggaaattgcactggaactgtctgattaagaaaaacagaataattctgaaagaaagaaaacaaagaaaaacatactccagaattcctaatagaacacttcacctgaacctaaaatggtgagcgagagtcaccatgaggccctggcagccccgcctgtcaccactgtcgcgactgttctgccaagcaacgccacagagccagccagtcctggagaaggaaaggaagatgcattttctaagctgaaggagaagtttatgaatgagttgcataaaattccattgccaccgtgggccttaattgcaatagccatagtcgcagtccttttagtcctgacctgctgcttttgtatctgtaagaaatgtttgttcaaaaagaaaaacaagaagaagggaaaggaaaaaggagggaagaatgccattaacatgaaagatgtaaaagacttagggaagacgatgaaagatcaggccctcaaggatgatgatgctgaaactggattgacagatggagaagaaaaagaagaacccaaagaagaggagaaactgggaaaacttcagtattcactggattatgatttccaaaataaccagctgctggtagggatcattcaggctgctgaactgcccgccttggacatggggggcacatctgatccttacgtgaaagtgtttctgctacctgataagaagaagaaatttgagacaaaagtccaccgaaaaacccttaatcctgtcttcaatgagcaatttactttcaaggtaccatactcggaattgggtggcaaaaccctagtgatggctgtatatgattttgatcgtttctctaagcatgacatcattggagaatttaaagtccctatgaacacagtggattttggccatgtaactgaggaatggcgtgacctgcaaagtgctgagaaggaagagcaagagaaattgggtgatatctgcttctcccttcgctacgtacctactgctggtaagctgactgttgtcattctggaggcaaagaacctgaagaagatggatgtgggtggcttatccgatccttatgtgaagattcatctgatgcagaatggtaagaggctgaagaagaaaaagacaacaattaaaaagaacacacttaacccctactacaatgagtcattcagctttgaagtaccttttgaacaaatccagaaagtgcaggtggtggtaactgttttggactatgacaagattggcaagaacgatgccatcggcaaagtctttgtgggctacaacagcaccggcgcggagctgcgacactggtcagacatgctggccaaccccaggcgacctattgcccagtggcacaccctgcaggtagaggaggaagttgatgccatgctggccgtcaagaagtaaaggaaagaagaagcctttctgcatttgcccatatagtgctctttagccagtatctgtaaatacctcagtaatatgggtcctttcatttttccagccatgcattcctaacacaattcagtggtacttggaatcctgttttaatttgcacaaatttaaatgtagagagcccctaagtccttcatcataccactgccctccaaatctactcttcttttaagcaatatgatgtgtagatagagcatgaatgaaattatttattgtatcacactgttgtatataccagtatgctaaagatttatttctagtttgtgtatttgtatgttgtaagcgtttcctaatctgtgtatatctagatgtttttaataagatgttctattttaaactatgtaaattgactgagatataggagagctgataatatattatacggtaaatatagtatcgtctgcattccagcaaaaatatcaactcgtaaggcactagtacagttaaactgacatcttaaaggacaacttaaacctgagctttctattgaatcatttgagtaccaagataaacttacaccacatacttggtgggtgaatccaattttgtagaattcctacacaggcaaaatagcatgatctgagcagcagcatccaggctgacctcaaggaagcatagccacaaaacagaatagcacctgtctgtacatatttacaaagctaaaataatggcttcactcttatatttgaggaagcaactgaacaggagtcaatgatttcatattactgcatatagaataacaacaaggtgttccgtgtgtgtgtgtgtgtgtgtgtgtgtgtgtgtgcacatttgtttggggatgggggagaagaagctaaggggagaagtcaacatttatgaaatattgcctgactatttaaaaagaaaaaagtagctctccattatcacctttatacaaaatgtacatcctgtgaattctgttccagatttcacacctacaataattccaaaaggtttgcacattagagtttgtaacaaaatattttattatataaaaccaggttagaaggaatgcaggatatttttaacacaacaatctgtgcttattacacaaaattactttgtggtaaacagacagtattgtaatcccatcaaaagatgaaagaaaaacaaaaacaaaaaccaacaacaattagccatagttctgaatgcacttcaattaagccaaaacagacagctagtgatctttttatatgctctttttacttaagttttaatttgtcctttaaaaaaaggtgaaacaaaccaagaacaagttctagaaaactgaagcaacctcttatgtatactagatgcttgatttaggaggagtttttaaacgttttcaatgttattatgtagtaaatgacactattatgaagctactagtcattccataagagtcttaaaggactgctctgtgtaacactgtgactgccgtgtgtgcttagacccgtagtttcctcagtggatagcactcaatttattccgtagtgatattgtaacaatactgccattcccttctactgcactgcccaaggtgtgtgtagcacaaacagttctcattacaaaggaccaattcagaaattttgtcaagcactgtgcaatattccatatttttccccactatggtagacaaccatttcgtggaagggcagcctattatcccacactgcatctagccttttgtcccattcacttctgtgatccattttaatttccaggccacaagacagtagtgatgctctgaaatgaaagtttgtcttcacaaatatcaaaacaaaatggaggaaaactaagcattggcctcatgttcagtcttcaggatatcacaccacgtcttttcaaaaactaaagagaattcaaaaagggctgatggtaggctttgaacatggggttggctgtttcccagtaaaactggaattcctgtcgttactgtttccttatcaaagaaggggcaagctcttttgccttttaggccagacatagcaaacgctttataattggcatagacataaaggataaaaggaaaataaccgtctgccgatggtccgtacttcttaaaaaacataggtaatagaaaatatacacaagtcagaatgtgaaattaaataatggtttgaacagaaaattcaaacaagactctttccaatttaaagggccaaaccctaccaaagagagggagttgactggcttttaaaaagtatttaaataccacaaatgacatttaatttcactgtattcagctttaagttgttcacaatgaaaccacactttcaaacaagcaggttcaagctgctgaatagacattatttcttgcattaaaataccactaatgcattctcttgcaacactgccagacatgggattgtcaccatagaattagttggtactatgccatctttcactctttcacaagtcagtgatggaacctgctttatgaccaagattcatcctcaaataagccacatgtacccttctgacaaagctgtgtaaagtattagaatctgatgctctagaaagatcctagttgcctttgtgtatatttactgcctgcttgagtgtttctatgtgtgggttttccctgtatcttgtagaaatgttggggtgttttcctctgccatatggctcgtggcctgcgagccaactatttcagctgtattttaccttcatttttgatgaggtgatttaaattttgtttcactttgtgtagtgaattccacagtagttttctgattgttgttaaaaatgacttaacatattacacagatattcaataaaaatgttttatttcctgttgaaaaaaanaaacaaaacgaaagctggacatatatgctaaaaaatattaaccttggggggggccccgagcccaaatgccccttaagggagatggtataaaattcaacgggccttgttttaacaccgtctggatgggaaaaccctgtgttttaccaactttatcggcttggaagaaaatccccttttcgcaagtgggagtattaccaaaaagccccgaccgtttcgccttcccaaacatttgcccaccctgatgggaaatggttgagctttttt

SEQ ID NO: 321006 - DNA, 202 bp, Homo sapiens
actttttaccctttttagcctttgcccttttttcgcctttattgtttggggttttaaggccaacaactatcaccctctcctactcttcttctccctgccccctggagggcactgtgtttggttgtgcaaatgtatttactatgcgtgtttccagcagttggcattaaagtgcctttttctaataaaatcagtttattatgac

SEQ ID NO: 321007 - DNA, 4032 bp, Homo sapiens
tgcgcctcgcccgcccggaccagcctgccccggcgccgaggtcgctcctgtggttggtccagcccagaatgcagccttgagcctggcttaggccaccacctactccagctctctccaccccctattttactgcagctcagggggtaggctctaggctccaaagtacctgggtattgtcccttcatcaagaaagccccacagctctggagggctctgataatcccgttgtcagctctctgaaaagacagcatggctattaccctacagcccagtgacctgatctttgagttcgcaagcaacgggatggatgatgatatccaccagctggaagacccctctgtgttcccagctgtgatcgtggagcaggtaccctaccctgatttactgcatctgtactcgggactggagttggacgacgttcacaatggcatcataacagacgggaccttgtgcatgacgcaggatcagatcctggaaggcagttttttgctgacagatgacaatgaggccacctcgcacaccatgtcaaccgcggaagtcttactcaatatggagtctcccagcgatatcctggatgagaagcagatcttcagtacctccgaaatgcttccagactcggaccctgcaccagctgtcactctgcccaactacctgtttcctgcctctgagcccgatgccctgaacagggcgggtgacactagtgaccaggaggggcattctctggaggagaaggcctccagagaggaaagtgccaagaagactgggaaatcaaagaagagaatccggaagaccaagggcaaccgaagtacctcacctgtcactgaccccagcatccccattaggaagaaatcaaaggatggcaaaggcagcaccatctatctgtgggagttcctcctggctcttctgcaagacagaaacacctgtcccaagtacatcaagtggacccagcgagagaaaggcatcttcaaactggtggactccaaagctgtgtccaagctgtgggggaagcagaaaaacaagcctgacatgaactatgagacaatggggcgggcactaagatactactaccaaagaggcatactggccaaagtggaagggcagaggctggtgtaccagtttaaggagatgcccaaggacctggtggtcattgaagatgaggatgagagcagcgaagccacagcagccccacctcaggcctccacggcctctgtggcctctgccagtaccacccggcgaaccagctccagggtctcatccagatctgccccccagggcaagggcagctcttcttgggagaagccaaaaattcagcatgtcggtctccagccatctgcgagtctggaattgggaccgtcgctagacgaggagatccccactacctccaccatgctcgtctctccagcagagggccaggtcaagctcaccaaagctgtgagtgcatcttcagtgcccagcaacatccacctaggagtggcccccgtggggtcgggctcggccctgaccctgcagacgatcccactgaccacggtgctgaccaatgggcctcctgccagtactactgctcccactcagctcgttctccagagtgttccagcggcctctactttcaaggacaccttcactttgcaggcctctttccccctgaacgccagtttccaagacagccaggtggcagccccaggggctccactgattctcagtggcctcccccaacttctggctggggccaaccgtccgaccaacccggcgccacccacggtcacaggggctggaccagcagggcccagctctcagccccctgggactgtcattgctgccttcatcaggacttctggcactacagcagcccctagggtcaaggaggggccactgaggtcctcctcctatgttcagggtatggtgacgggggcccccatggaggggctgctggttcctgaagagaccctgagggagctcctgagagatcaggctcatcttcagccacttccaacccaggtggtttccaggggttcccacaatccgagccttctgggcaaccagactttgtctcctcccagccgccccactgttgggctgaccccagtggctgaacttgagctctcctcaggctcagggtccctgctgatggctgagcctagtgtgaccacatctgggagccttctgacaagatcccccaccccagcccctttctccccattcaaccctacttccctcattaagatggagccccatgacatataagcaaaggggtcagggcaagtgtgacccaccaggcaaaattgagcagcattttcatagggaccgacttcagtagcacacctgcccctgcatttcagtgggatgtcaatacacttgaccccaagtcccccggccctgcctggtgtcactgtggccaaacagtgcccagcttaagcatccctggcatcagactatggccttcaagagcactagggcatatgcttttggcagcataacgggctgacttggtgatggagggaaaaagccttgagccaggcagaagtttgtggccagggtttgtgcagcagctttgtgagaagagcccttctacctggctctatctcactggctgcattccctacacagggaatttactaccctatatgtgaatatccctgtatgtacttgtgtgtacttgttggtctgtatcttagtttctttggggaggacagggctgtagctgtgaggtcttgtctccaagggtgtgtgtatgtctccgtggatcagccacagggatagggattttgtttttaagggaaagcattctctaattccctttgttcatgccgagattcagttgctctgagactatggggtacaagtttgatcctccgaatctggagatgttgtagagctggaacgagtgcagagtaggaacgctttgatgcgcatgcacattggggaagatgcgctcctcagggacacaaaggccgagtggggtaaaaccacgaagggagggaagggaagtcagctctgggagcagccctcactggctggaccaaggtactcttcctggagtttgccgtgttagcaaccacagtcaccttgcagtcaggctggaatcttgggccaccccaaagtgctttgctgaaggatttagacggggatgaagtgccctccagcctcagagctagccacaaagcccccagagctgaattcattgagtatttgtgcctagggcttgggctgtttgtgtgataccggccccccgccagacaatagcctttgctgacaccccagcctacttccccgatcctgggctccctcttgattactttttgacattttccagctgtcaggcatcactgcggctagtccggcagcgacctagatggggtccacccccattcctgctcaagcatgggcacctaccacatggtttctgctgctcagcctgcctgcaactcacctcgaaggcggaccagcctgcctctgtgatgactgcagcagacctccttgggtgtaccaatgcccctcatctcccactttcacacctaaccctgactccttcaccaagaagacgggagtcggcagccaggagttcccgtggcacctctctctcttcgtggctccctgcttcccccttccctctttccgaggaagggtcaacctattctctctcaaagccaacccctaggccaattgcctggatctcctcccctctcccttctttaaacgagcttgcctccctcctgccaagtttgagggcaaggctaagaaatgtcagccacggaaacaactctattatctggtgactttgggtaatgtgaatcagtgcctgaggacctttgctgtgtccttggtacagaaccatccacttgacctaactacctcccctggccgcgctctcgctcttctcttctttgttaagccaacaactatcaccctctcctactcttcttctccctgccccctggagggcactgtgtttggttgtgcaaatgtatttactatgcgtgtttccagcagttggcattaaagtgcctttttctaataaaatcagtttattatgac

SEQ ID NO: 321008 - DNA, 4102 bp, Homo sapiens
gaattccctttcgccggcgccgagttcctggcgccgctcgcccggcccggcttccgaggggagaggacgggctggcggggctggggacccgcgtctcggcccccggagcggggaccacggagacagaccccggcccggcgaccgagctgggcccgtgagccactcggcctcaggtcgctcctgtggttggtccagcccagaatgcagccttgagcctggcttaggccaccacctactccagctctctccaccccctattttactgcagctcaggggcccagtgacctgatctttgagttcgcaagcaacgggatggatgatgatatccaccagctggaagacccctctgtgttcccagctgtgatcgtggagcaggtaccctaccctgatttactgcatctgtactcgggactggagttggacgacgttcacaatggcatcataacagacgggaccttgtgcatgacgcaggatcagatcctggaaggcagttttttgctgacagatgacaatgaggccacctcgcacaccatgtcaaccgcggaagtcttactcaatatggagtctcccagcgatatcctggatgagaagcagatcttcagtacctccgaaatgcttccagactcggaccctgcaccagctgtcactctgcccaactacctgtttcctgcctctgagcccgatgccctgaacagggcgggtgacactagtgaccaggaggggcattctctggaggagaaggcctccagagaggaaagtgccaagaagactgggaaatcaaagaagagaatccggaagaccaagggcaaccgaagtacctcacctgtcactgaccccagcatccccattaggaagaaatcaaaggatggcaaaggcagcaccatctatctgtgggagttcctcctggctcttctgcaagacagaaacacctgtcccaagtacatcaagtggacccagcgagagaaaggcatcttcaaactggtggactccaaagctgtgtccaagctgtgggggaagcagaaaaacaagcctgacatgaactatgagacaatggggcgggcactaagatactactaccaaagaggcatactggccaaagtggaagggcagaggctggtgtaccagtttaaggagatgcccaaggacctggtggtcattgaagatgaggatgagagcagcgaagccacagcagccccacctcaggcctccacggcctctgtggcctctgccagtaccacccggcgaaccagctccagggtctcatccagatctgccccccagggcaagggcagctcttcttgggagaagccaaaaattcagcatgtcggtctccagccatctgcgagtctggaattgggaccgtcgctagacgaggagatccccactacctccaccatgctcgtctctccagcagagggccaggtcaagctcaccaaagctgtgagtgcatcttcagtgcccagcaacatccacctaggagtggcccccgtggggtcgggctcggccctgaccctgcagacgatcccactgaccacggtgctgaccaatgggcctcctgccagtactactgctcccactcagctcgttctccagagtgttccagcggcctctactttcaaggacaccttcactttgcaggcctctttccccctgaacgccagtttccaagacagccaggtggcagccccaggggctccactgattctcagtggcctcccccaacttctggctggggccaaccgtccgaccaacccggcgccacccacggtcacaggggctggaccagcagggcccagctctcagccccctgggactgtcattgctgccttcatcaggacttctggcactacagcagcccctagggtcaaggaggggccactgaggtcctcctcctatgttcagggtatggtgacgggggcccccatggaggggctgctggttcctgaagagaccctgagggagctcctgagagatcaggctcatcttcagccacttccaacccaggtggtttccaggggttcccacaatccgagccttctgggcaaccagactttgtctcctcccagccgccccactgttgggctgaccccagtggctgaacttgagctctcctcaggctcagggtccctgctgatggctgagcctagtgtgaccacatctgggagccttctgacaagatcccccaccccagcccctttctccccattcaaccctacttccctcattaagatggagccccatgacatataagcaaaggggtcagggcaagtgtgacccaccaggcaaaattgagcagcattttcatagggaccgacttcagtagcacacctgcccctgcatttcagtgggatgtcaatacacttgaccccaagtcccccggccctgcctggtgtcactgtggccaaacagtgcccagcttaagcatccctggcatcagactatggccttcaagagcactagggcatatgcttttggcagcataacgggctgacttggtgatggagggaaaaagccttgagccaggcagaagtttgtggccagggtttgtgcagcagctttgtgagaagagcccttctacctggctctatctcactggctgcattccctacacagggaatttactaccctatatgtgaatatccctgtatgtacttgtgtgtacttgttggtctgtatcttagtttctttggggaggacagggctgtagctgtgaggtcttgtctccaagggtgtgtgtatgtctccgtggatcagccacagggatagggattttgtttttaagggaaagcattctctaattccctttgttcatgccgagattcagttgctctgagactatggggtacaagtttgatcctccgaatctggagatgttgtagagctggaacgagtgcagagtaggaacgctttgatgcgcatgcacattggggaagatgcgctcctcagggacacaaaggccgagtggggtaaaaccacgaagggagggaagggaagtcagctctgggagcagccctcactggctggaccaaggtactcttcctggagtttgccgtgttagcaaccacagtcaccttgcagtcaggctggaatcttgggccaccccaaagtgctttgctgaaggatttagacggggatgaagtgccctccagcctcagagctagccacaaagcccccagagctgaattcattgagtatttgtgcctagggcttgggctgtttgtgtgataccggccccccgccagacaatagcctttgctgacaccccagcctacttccccgatcctgggctccctcttgattactttttgacattttccagctgtcaggcatcactgcggctagtccggcagcgacctagatggggtccacccccattcctgctcaagcatgggcacctaccacatggtttctgctgctcagcctgcctgcaactcacctcgaaggcggaccagcctgcctctgtgatgactgcagcagacctccttgggtgtaccaatgcccctcatctcccactttcacacctaaccctgactccttcaccaagaagacgggagtcggcagccaggagttcccgtggcacctctctctcttcgtggctccctgcttcccccttccctctttccgaggaagggtcaacctattctctctcaaagccaacccctaggccaattgcctggatctcctcccctctcccttctttaaacgagcttgcctccctcctgccaagtttgagggcaaggctaagaaatgtcagccacggaaacaactctattatctggtgactttgggtaatgtgaatcagtgcctgaggacctttgctgtgtccttggtacagaaccatccacttgacctaactacctcccctggccgcgctctcgctcttctcttctttgttaagccaacaactatcaccctctcctactcttcttctccctgccccctggagggcactgtgtttggttgtgcaaatgtatttactatgcgtgtttccagcagttggcattaaagtgcctttttctaataaaatcagtttattatgacagtttcctgatggttgaaagtaagcatcttgataaagggtcaccattaaaaaaaaattttg

SEQ ID NO: 321009 - DNA, 3996 bp, Homo sapiens
tgcgcctcgcccgcccggaccagcctgccccggcgccgaggtcgctcctgtggttggtccagcccagaatgcagccttgagcctggcttaggccaccacctactccagctctctccaccccctattttactgcagctcagggggtaggctctaggctccaaagtacctggcccagtgacctgatctttgagttcgcaagcaacgggatggatgatgatatccaccagctggaagacccctctgtgttcccagctgtgatcgtggagcaggtaccctaccctgatttactgcatctgtactcgggactggagttggacgacgttcacaatggcatcataacagacgggaccttgtgcatgacgcaggatcagatcctggaaggcagttttttgctgacagatgacaatgaggccacctcgcacaccatgtcaaccgcggaagtcttactcaatatggagtctcccagcgatatcctggatgagaagcagatcttcagtacctccgaaatgcttccagactcggaccctgcaccagctgtcactctgcccaactacctgtttcctgcctctgagcccgatgccctgaacagggcgggtgacactagtgaccaggaggggcattctctggaggagaaggcctccagagaggaaagtgccaagaagactgggaaatcaaagaagagaatccggaagaccaagggcaaccgaagtacctcacctgtcactgaccccagcatccccattaggaagaaatcaaaggatggcaaaggcagcaccatctatctgtgggagttcctcctggctcttctgcaagacagaaacacctgtcccaagtacatcaagtggacccagcgagagaaaggcatcttcaaactggtggactccaaagctgtgtccaagctgtgggggaagcagaaaaacaagcctgacatgaactatgagacaatggggcgggcactaagatactactaccaaagaggcatactggccaaagtggaagggcagaggctggtgtaccagtttaaggagatgcccaaggacctggtggtcattgaagatgaggatgagagcagcgaagccacagcagccccacctcaggcctccacggcctctgtggcctctgccagtaccacccggcgaaccagctccagggtctcatccagatctgccccccagggcaagggcagctcttcttgggagaagccaaaaattcagcatgtcggtctccagccatctgcgagtctggaattgggaccgtcgctagacgaggagatccccactacctccaccatgctcgtctctccagcagagggccaggtcaagctcaccaaagctgtgagtgcatcttcagtgcccagcaacatccacctaggagtggcccccgtggggtcgggctcggccctgaccctgcagacgatcccactgaccacggtgctgaccaatgggcctcctgccagtactactgctcccactcagctcgttctccagagtgttccagcggcctctactttcaaggacaccttcactttgcaggcctctttccccctgaacgccagtttccaagacagccaggtggcagccccaggggctccactgattctcagtggcctcccccaacttctggctggggccaaccgtccgaccaacccggcgccacccacggtcacaggggctggaccagcagggcccagctctcagccccctgggactgtcattgctgccttcatcaggacttctggcactacagcagcccctagggtcaaggaggggccactgaggtcctcctcctatgttcagggtatggtgacgggggcccccatggaggggctgctggttcctgaagagaccctgagggagctcctgagagatcaggctcatcttcagccacttccaacccaggtggtttccaggggttcccacaatccgagccttctgggcaaccagactttgtctcctcccagccgccccactgttgggctgaccccagtggctgaacttgagctctcctcaggctcagggtccctgctgatggctgagcctagtgtgaccacatctgggagccttctgacaagatcccccaccccagcccctttctccccattcaaccctacttccctcattaagatggagccccatgacatataagcaaaggggtcagggcaagtgtgacccaccaggcaaaattgagcagcattttcatagggaccgacttcagtagcacacctgcccctgcatttcagtgggatgtcaatacacttgaccccaagtcccccggccctgcctggtgtcactgtggccaaacagtgcccagcttaagcatccctggcatcagactatggccttcaagagcactagggcatatgcttttggcagcataacgggctgacttggtgatggagggaaaaagccttgagccaggcagaagtttgtggccagggtttgtgcagcagctttgtgagaagagcccttctacctggctctatctcactggctgcattccctacacagggaatttactaccctatatgtgaatatccctgtatgtacttgtgtgtacttgttggtctgtatcttagtttctttggggaggacagggctgtagctgtgaggtcttgtctccaagggtgtgtgtatgtctccgtggatcagccacagggatagggattttgtttttaagggaaagcattctctaattccctttgttcatgccgagattcagttgctctgagactatggggtacaagtttgatcctccgaatctggagatgttgtagagctggaacgagtgcagagtaggaacgctttgatgcgcatgcacattggggaagatgcgctcctcagggacacaaaggccgagtggggtaaaaccacgaagggagggaagggaagtcagctctgggagcagccctcactggctggaccaaggtactcttcctggagtttgccgtgttagcaaccacagtcaccttgcagtcaggctggaatcttgggccaccccaaagtgctttgctgaaggatttagacggggatgaagtgccctccagcctcagagctagccacaaagcccccagagctgaattcattgagtatttgtgcctagggcttgggctgtttgtgtgataccggccccccgccagacaatagcctttgctgacaccccagcctacttccccgatcctgggctccctcttgattactttttgacattttccagctgtcaggcatcactgcggctagtccggcagcgacctagatggggtccacccccattcctgctcaagcatgggcacctaccacatggtttctgctgctcagcctgcctgcaactcacctcgaaggcggaccagcctgcctctgtgatgactgcagcagacctccttgggtgtaccaatgcccctcatctcccactttcacacctaaccctgactccttcaccaagaagacgggagtcggcagccaggagttcccgtggcacctctctctcttcgtggctccctgcttcccccttccctctttccgaggaagggtcaacctattctctctcaaagccaacccctaggccaattgcctggatctcctcccctctcccttctttaaacgagcttgcctccctcctgccaagtttgagggcaaggctaagaaatgtcagccacggaaacaactctattatctggtgactttgggtaatgtgaatcagtgcctgaggacctttgctgtgtccttggtacagaaccatccacttgacctaactacctcccctggccgcgctctcgctcttctcttctttgttaagccaacaactatcaccctctcctactcttcttctccctgccccctggagggcactgtgtttggttgtgcaaatgtatttactatgcgtgtttccagcagttggcattaaagtgcctttttctaataaaatcagtttattatgacagtttcctgatggttgaaagtaagcatcttgataaagggtcaccattaaaaaaaaattttg

SEQ ID NO: 321010 - DNA, 947 bp, Homo sapiens
tgctagccaccagaactcgtagtcgtgttcttgacttatttcctgctgttaagttgggctgtttgtgtgataccggccccccgccagacaatagcctttgctgacaccccagcctacttccccgatcctgggctccctcttgattactttttgacattttccagctgtcaggcatcactgcggctagtccggcagcgacctagatggggtccacccccattcctgctcaagcatgggcacctaccacatggtttctgctgctcagcctgcctgcaactcacctcgaaggcggaccagcctgcctctgtgatgactgcagcagacctccttgggtgtaccaatgcccctcatctcccactttcacacctaaccctgactccttcaccaagaagacgggagtcggcagccaggagttcccgtggcacctctctctcttcgtggctccctgcttcccccttccctctttccgaggaagggtcaacctattctctctcaaagccaacccctaggccaattgcctggatctcctcccctctcccttctttaaacgagcttgcctccctcctgccaagtttgagggcaaggctaagaaatgtcagccacggaaacaactctattatctggtgactttgggtaatgtgaatcagtgcctgaggacctttgctgtgtccttggtacagaaccatccacttgacctaactacctcccctggccgcgctctcgctcttctcttctttgttaagccaacaactatcaccctctcctactcttcttctccctgccccctggagggcactgtgtttggttgtgcaaatgtatttactatgcgtgtttccagcagttggcattaaagtgcctttttctaataaaatcagtttattatgacagtttcctgatggttgaaagtaagcatcttgataaagggtcaccattaaaaaaaaattttg

SEQ ID NO: 321011 - DNA, 263 bp, Homo sapiens
cggcttccgaggggagaggacgggctggcggggctggggacccgcgtctcggcccccggagcggggaccacggagacagaccccggcccggcgaccgagctgggcccgtgagccactcggcctcaggtacgtcgatggcgccggttcttcgagccttgggggacgtggaaaagtttgcttgagggcggaatcgagagcgccggggccccggcgtggggctgggggcccagggaagggcgggagagtcgcggagtgtcgcgagc

SEQ ID NO: 321012 - DNA, 4165 bp, Homo sapiens
gaattccctttcgccggcgccgagttcctggcgccgctcgcccggcccggcttccgaggggagaggacgggctggcggggctggggacccgcgtctcggcccccggagcggggaccacggagacagaccccggcccggcgaccgagctgggcccgtgagccactcggcctcaggtcgctcctgtggttggtccagcccagaatgcagccttgagcctggcttaggccaccacctactccagctctctccaccccctattttactgcagctcagggggtaggctctaggctccaaagtacctgggtattgtcccttcatcaagaaagccccacagctctggagggctctgataatcccgttgtcagctctctgaaaagacagcatggctattaccctacagcccagtgacctgatctttgagttcgcaagcaacgggatggatgatgatatccaccagctggaagacccctctgtgttcccagctgtgatcgtggagcaggtaccctaccctgatttactgcatctgtactcgggactggagttggacgacgttcacaatggcatcataacagacgggaccttgtgcatgacgcaggatcagatcctggaaggcagttttttgctgacagatgacaatgaggccacctcgcacaccatgtcaaccgcggaagtcttactcaatatggagtctcccagcgatatcctggatgagaagcagatcttcagtacctccgaaatgcttccagactcggaccctgcaccagctgtcactctgcccaactacctgtttcctgcctctgagcccgatgccctgaacagggcgggtgacactagtgaccaggaggggcattctctggaggagaaggcctccagagaggaaagtgccaagaagactgggaaatcaaagaagagaatccggaagaccaagggcaaccgaagtacctcacctgtcactgaccccagcatccccattaggaagaaatcaaaggatggcaaaggcagcaccatctatctgtgggagttcctcctggctcttctgcaagacagaaacacctgtcccaagtacatcaagtggacccagcgagagaaaggcatcttcaaactggtggactccaaagctgtgtccaagctgtgggggaagcagaaaaacaagcctgacatgaactatgagacaatggggcgggcactaagatactactaccaaagaggcatactggccaaagtggaagggcagaggctggtgtaccagtttaaggagatgcccaaggacctggtggtcattgaagatgaggatgagagcagcgaagccacagcagccccacctcaggcctccacggcctctgtggcctctgccagtaccacccggcgaaccagctccagggtctcatccagatctgccccccagggcaagggcagctcttcttgggagaagccaaaaattcagcatgtcggtctccagccatctgcgagtctggaattgggaccgtcgctagacgaggagatccccactacctccaccatgctcgtctctccagcagagggccaggtcaagctcaccaaagctgtgagtgcatcttcagtgcccagcaacatccacctaggagtggcccccgtggggtcgggctcggccctgaccctgcagacgatcccactgaccacggtgctgaccaatgggcctcctgccagtactactgctcccactcagctcgttctccagagtgttccagcggcctctactttcaaggacaccttcactttgcaggcctctttccccctgaacgccagtttccaagacagccaggtggcagccccaggggctccactgattctcagtggcctcccccaacttctggctggggccaaccgtccgaccaacccggcgccacccacggtcacaggggctggaccagcagggcccagctctcagccccctgggactgtcattgctgccttcatcaggacttctggcactacagcagcccctagggtcaaggaggggccactgaggtcctcctcctatgttcagggtatggtgacgggggcccccatggaggggctgctggttcctgaagagaccctgagggagctcctgagagatcaggctcatcttcagccacttccaacccaggtggtttccaggggttcccacaatccgagccttctgggcaaccagactttgtctcctcccagccgccccactgttgggctgaccccagtggctgaacttgagctctcctcaggctcagggtccctgctgatggctgagcctagtgtgaccacatctgggagccttctgacaagatcccccaccccagcccctttctccccattcaaccctacttccctcattaagatggagccccatgacatataagcaaaggggtcagggcaagtgtgacccaccaggcaaaattgagcagcattttcatagggaccgacttcagtagcacacctgcccctgcatttcagtgggatgtcaatacacttgaccccaagtcccccggccctgcctggtgtcactgtggccaaacagtgcccagcttaagcatccctggcatcagactatggccttcaagagcactagggcatatgcttttggcagcataacgggctgacttggtgatggagggaaaaagccttgagccaggcagaagtttgtggccagggtttgtgcagcagctttgtgagaagagcccttctacctggctctatctcactggctgcattccctacacagggaatttactaccctatatgtgaatatccctgtatgtacttgtgtgtacttgttggtctgtatcttagtttctttggggaggacagggctgtagctgtgaggtcttgtctccaagggtgtgtgtatgtctccgtggatcagccacagggatagggattttgtttttaagggaaagcattctctaattccctttgttcatgccgagattcagttgctctgagactatggggtacaagtttgatcctccgaatctggagatgttgtagagctggaacgagtgcagagtaggaacgctttgatgcgcatgcacattggggaagatgcgctcctcagggacacaaaggccgagtggggtaaaaccacgaagggagggaagggaagtcagctctgggagcagccctcactggctggaccaaggtactcttcctggagtttgccgtgttagcaaccacagtcaccttgcagtcaggctggaatcttgggccaccccaaagtgctttgctgaaggatttagacggggatgaagtgccctccagcctcagagctagccacaaagcccccagagctgaattcattgagtatttgtgcctagggcttgggctgtttgtgtgataccggccccccgccagacaatagcctttgctgacaccccagcctacttccccgatcctgggctccctcttgattactttttgacattttccagctgtcaggcatcactgcggctagtccggcagcgacctagatggggtccacccccattcctgctcaagcatgggcacctaccacatggtttctgctgctcagcctgcctgcaactcacctcgaaggcggaccagcctgcctctgtgatgactgcagcagacctccttgggtgtaccaatgcccctcatctcccactttcacacctaaccctgactccttcaccaagaagacgggagtcggcagccaggagttcccgtggcacctctctctcttcgtggctccctgcttcccccttccctctttccgaggaagggtcaacctattctctctcaaagccaacccctaggccaattgcctggatctcctcccctctcccttctttaaacgagcttgcctccctcctgccaagtttgagggcaaggctaagaaatgtcagccacggaaacaactctattatctggtgactttgggtaatgtgaatcagtgcctgaggacctttgctgtgtccttggtacagaaccatccacttgacctaactacctcccctggccgcgctctcgctcttctcttctttgttaagccaacaactatcaccctctcctactcttcttctccctgccccctggagggcactgtgtttggttgtgcaaatgtatttactatgcgtgtttccagcagttggcattaaagtgcctttttctaataaaatcagtttattatgac

SEQ ID NO: 321013 - DNA, 4226 bp, Homo sapiens
gaattccctttcgccggcgccgagttcctggcgccgctcgcccggcccggcttccgaggggagaggacgggctggcggggctggggacccgcgtctcggcccccggagcggggaccacggagacagaccccggcccggcgaccgagctgggcccgtgagccactcggcctcaggtcgctcctgtggttggtccagcccagaatgcagccttgagcctggcttaggccaccacctactccagctctctccaccccctattttactgcagctcagggggtaggctctaggctccaaagtacctgggtattgtcccttcatcaagaaagccccacagctctggagggctctgataatcccgttgtcagctctctgaaaagacagcatggctattaccctacagcccagtgacctgatctttgagttcgcaagcaacgggatggatgatgatatccaccagctggaagacccctctgtgttcccagctgtgatcgtggagcaggtaccctaccctgatttactgcatctgtactcgggactggagttggacgacgttcacaatggcatcataacagacgggaccttgtgcatgacgcaggatcagatcctggaaggcagttttttgctgacagatgacaatgaggccacctcgcacaccatgtcaaccgcggaagtcttactcaatatggagtctcccagcgatatcctggatgagaagcagatcttcagtacctccgaaatgcttccagactcggaccctgcaccagctgtcactctgcccaactacctgtttcctgcctctgagcccgatgccctgaacagggcgggtgacactagtgaccaggaggggcattctctggaggagaaggcctccagagaggaaagtgccaagaagactgggaaatcaaagaagagaatccggaagaccaagggcaaccgaagtacctcacctgtcactgaccccagcatccccattaggaagaaatcaaaggatggcaaaggcagcaccatctatctgtgggagttcctcctggctcttctgcaagacagaaacacctgtcccaagtacatcaagtggacccagcgagagaaaggcatcttcaaactggtggactccaaagctgtgtccaagctgtgggggaagcagaaaaacaagcctgacatgaactatgagacaatggggcgggcactaagatactactaccaaagaggcatactggccaaagtggaagggcagaggctggtgtaccagtttaaggagatgcccaaggacctggtggtcattgaagatgaggatgagagcagcgaagccacagcagccccacctcaggcctccacggcctctgtggcctctgccagtaccacccggcgaaccagctccagggtctcatccagatctgccccccagggcaagggcagctcttcttgggagaagccaaaaattcagcatgtcggtctccagccatctgcgagtctggaattgggaccgtcgctagacgaggagatccccactacctccaccatgctcgtctctccagcagagggccaggtcaagctcaccaaagctgtgagtgcatcttcagtgcccagcaacatccacctaggagtggcccccgtggggtcgggctcggccctgaccctgcagacgatcccactgaccacggtgctgaccaatgggcctcctgccagtactactgctcccactcagctcgttctccagagtgttccagcggcctctactttcaaggacaccttcactttgcaggcctctttccccctgaacgccagtttccaagacagccaggtggcagccccaggggctccactgattctcagtggcctcccccaacttctggctggggccaaccgtccgaccaacccggcgccacccacggtcacaggggctggaccagcagggcccagctctcagccccctgggactgtcattgctgccttcatcaggacttctggcactacagcagcccctagggtcaaggaggggccactgaggtcctcctcctatgttcagggtatggtgacgggggcccccatggaggggctgctggttcctgaagagaccctgagggagctcctgagagatcaggctcatcttcagccacttccaacccaggtggtttccaggggttcccacaatccgagccttctgggcaaccagactttgtctcctcccagccgccccactgttgggctgaccccagtggctgaacttgagctctcctcaggctcagggtccctgctgatggctgagcctagtgtgaccacatctgggagccttctgacaagatcccccaccccagcccctttctccccattcaaccctacttccctcattaagatggagccccatgacatataagcaaaggggtcagggcaagtgtgacccaccaggcaaaattgagcagcattttcatagggaccgacttcagtagcacacctgcccctgcatttcagtgggatgtcaatacacttgaccccaagtcccccggccctgcctggtgtcactgtggccaaacagtgcccagcttaagcatccctggcatcagactatggccttcaagagcactagggcatatgcttttggcagcataacgggctgacttggtgatggagggaaaaagccttgagccaggcagaagtttgtggccagggtttgtgcagcagctttgtgagaagagcccttctacctggctctatctcactggctgcattccctacacagggaatttactaccctatatgtgaatatccctgtatgtacttgtgtgtacttgttggtctgtatcttagtttctttggggaggacagggctgtagctgtgaggtcttgtctccaagggtgtgtgtatgtctccgtggatcagccacagggatagggattttgtttttaagggaaagcattctctaattccctttgttcatgccgagattcagttgctctgagactatggggtacaagtttgatcctccgaatctggagatgttgtagagctggaacgagtgcagagtaggaacgctttgatgcgcatgcacattggggaagatgcgctcctcagggacacaaaggccgagtggggtaaaaccacgaagggagggaagggaagtcagctctgggagcagccctcactggctggaccaaggtactcttcctggagtttgccgtgttagcaaccacagtcaccttgcagtcaggctggaatcttgggccaccccaaagtgctttgctgaaggatttagacggggatgaagtgccctccagcctcagagctagccacaaagcccccagagctgaattcattgagtatttgtgcctagggcttgggctgtttgtgtgataccggccccccgccagacaatagcctttgctgacaccccagcctacttccccgatcctgggctccctcttgattactttttgacattttccagctgtcaggcatcactgcggctagtccggcagcgacctagatggggtccacccccattcctgctcaagcatgggcacctaccacatggtttctgctgctcagcctgcctgcaactcacctcgaaggcggaccagcctgcctctgtgatgactgcagcagacctccttgggtgtaccaatgcccctcatctcccactttcacacctaaccctgactccttcaccaagaagacgggagtcggcagccaggagttcccgtggcacctctctctcttcgtggctccctgcttcccccttccctctttccgaggaagggtcaacctattctctctcaaagccaacccctaggccaattgcctggatctcctcccctctcccttctttaaacgagcttgcctccctcctgccaagtttgagggcaaggctaagaaatgtcagccacggaaacaactctattatctggtgactttgggtaatgtgaatcagtgcctgaggacctttgctgtgtccttggtacagaaccatccacttgacctaactacctcccctggccgcgctctcgctcttctcttctttgttaagccaacaactatcaccctctcctactcttcttctccctgccccctggagggcactgtgtttggttgtgcaaatgtatttactatgcgtgtttccagcagttggcattaaagtgcctttttctaataaaatcagtttattatgacagtttcctgatggttgaaagtaagcatcttgataaagggtcaccattaaaaaaaaattttg

SEQ ID NO: 321014 - DNA, 2700 bp, Homo sapiens
gaggagcactggggagatggaggtagaaggtctcccacccagctcccggctaactcccaactccctgcccctcttcctctagatactactaccaaagaggcatactgaccctgcagacgatcccactgaccacggtgctgaccaatgggcctcctgccagtactactgctcccactcagctcgttctccagagtgttccagcggcctctactttcaaggacaccttcactttgcaggcctctttccccctgaacgccagtttccaagacagccaggtggcagccccaggggctccactgattctcagtggcctcccccaacttctggctggggccaaccgtccgaccaacccggcgccacccacggtcacaggggctggaccagcagggcccagctctcagccccctgggactgtcattgctgccttcatcaggacttctggcactacagcagcccctagggtcaaggaggggccactgaggtcctcctcctatgttcagggtatggtgacgggggcccccatggaggggctgctggttcctgaagagaccctgagggagctcctgagagatcaggctcatcttcagccacttccaacccaggtggtttccaggggttcccacaatccgagccttctgggcaaccagactttgtctcctcccagccgccccactgttgggctgaccccagtggctgaacttgagctctcctcaggctcagggtccctgctgatggctgagcctagtgtgaccacatctgggagccttctgacaagatcccccaccccagcccctttctccccattcaaccctacttccctcattaagatggagccccatgacatataagcaaaggggtcagggcaagtgtgacccaccaggcaaaattgagcagcattttcatagggaccgacttcagtagcacacctgcccctgcatttcagtgggatgtcaatacacttgaccccaagtcccccggccctgcctggtgtcactgtggccaaacagtgcccagcttaagcatccctggcatcagactatggccttcaagagcactagggcatatgcttttggcagcataacgggctgacttggtgatggagggaaaaagccttgagccaggcagaagtttgtggccagggtttgtgcagcagctttgtgagaagagcccttctacctggctctatctcactggctgcattccctacacagggaatttactaccctatatgtgaatatccctgtatgtacttgtgtgtacttgttggtctgtatcttagtttctttggggaggacagggctgtagctgtgaggtcttgtctccaagggtgtgtgtatgtctccgtggatcagccacagggatagggattttgtttttaagggaaagcattctctaattccctttgttcatgccgagattcagttgctctgagactatggggtacaagtttgatcctccgaatctggagatgttgtagagctggaacgagtgcagagtaggaacgctttgatgcgcatgcacattggggaagatgcgctcctcagggacacaaaggccgagtggggtaaaaccacgaagggagggaagggaagtcagctctgggagcagccctcactggctggaccaaggtactcttcctggagtttgccgtgttagcaaccacagtcaccttgcagtcaggctggaatcttgggccaccccaaagtgctttgctgaaggatttagacggggatgaagtgccctccagcctcagagctagccacaaagcccccagagctgaattcattgagtatttgtgcctagggcttgggctgtttgtgtgataccggccccccgccagacaatagcctttgctgacaccccagcctacttccccgatcctgggctccctcttgattactttttgacattttccagctgtcaggcatcactgcggctagtccggcagcgacctagatggggtccacccccattcctgctcaagcatgggcacctaccacatggtttctgctgctcagcctgcctgcaactcacctcgaaggcggaccagcctgcctctgtgatgactgcagcagacctccttgggtgtaccaatgcccctcatctcccactttcacacctaaccctgactccttcaccaagaagacgggagtcggcagccaggagttcccgtggcacctctctctcttcgtggctccctgcttcccccttccctctttccgaggaagggtcaacctattctctctcaaagccaacccctaggccaattgcctggatctcctcccctctcccttctttaaacgagcttgcctccctcctgccaagtttgagggcaaggctaagaaatgtcagccacggaaacaactctattatctggtgactttgggtaatgtgaatcagtgcctgaggacctttgctgtgtccttggtacagaaccatccacttgacctaactacctcccctggccgcgctctcgctcttctcttctttgttaagccaacaactatcaccctctcctactcttcttctccctgccccctggagggcactgtgtttggttgtgcaaatgtatttactatgcgtgtttccagcagttggcattaaagtgcctttttctaataaaatcagtttattatgacagtttcctgatggttgaaagtaagcatcttgataaagggtcaccattaaaaaaaaattttg

SEQ ID NO: 321015 - DNA, 955 bp, Homo sapiens
ccaaagtgctgggattacaggtgtgagccaccacgcctggccgccgaaataatttttaaagaatgtagtttagtaacaaggacatggaacccaaaaggaagaaattagatggaaaaatggtgagcaaattggtaaacatgtgaatctaaacaagcatttaatatgcaatatgaataataatgattaatttgtgggccacagaaacaagatgcatgagacacaagaacatggaagactgagagggcaatttgagagggggttaaagagactgagcattgtctggctttgtaaagtcaggtgtgtatttcagatatttaagaggatcaccaaaagaatacaaacggaactataactgccaatgcagagaaaagggtagtgatgggtattaaaactataatggaaggcagaaagggagaaaaaggaagcaaagtaaaagggatggtaaatatatagtacaaaaccagaggtagaaaatgtggtttacattcacctcttaaaacacagatgaccagattggccaagaaaaaataagatgcagctctatgctatttacaagaggaaatttaaaacctaagggcaccaaaaagtaaaacgatgggaaaaggtgtactagagaaaaactaaccaaaagatgtacctatagaaaactcagacaaaataggccttcaggcagaagacactggggataagaggatcaccatgaaatgatgcgaggaggaactctgtgaagagaggaaagttctgaacttctatgttccagggtttttgtttttaaggctgaaaataggccaggcgcagtggctcatgccagtaatcccagcactttgggaggccgaggtgggtggatcactagaggctgggaattcaagaccagcctggccaacatggcaaaactctgtctctactaaaaatacaaagattagctagctgggcgtggtggtgcacgcctgtcatc

SEQ ID NO: 321016 - DNA, 869 bp, Homo sapiens
cctttatagcgtcccccagttcccctgattacaggatccaattcaggatcatgcattgcatatagtttatatggttcttgagtctcctttaatctaaaaaaattctgtagccttttttcttccatgacattgactttttttttttttttttttttcccctgaggcaggaaaatcatttgaacctggaaggtggaggttgcgggagctgaaatcacaccatgttttccagccggggtgagtgagactctaactaaaaaaaacaaaaaaaaaaaaattggaatggggtgggccctaatttacaaagtgcattttttaagtgttggaggtgcgtgtggtttggacaacttatttttctctttgcggggctctcaaaaatttcaagaaaaggtttgttttgattgtgcctgtgaacaatttccacacatttaaggggtataggggcagtggtggtgtttcataaaaaacaaagggggtatattatgaatgcccaaaggtaaatacctgtccaacaaaataagaatggcaccatctgcccgggggaataagttcggacaacggcgtttaaacataaataagggtgaaacacctctctggggtcacacaatatacctcccaattgacagaccgctcggagaaggaatggtggttcctctaggaaacaaatgggtccccatctcgcggggcttaaaaaaaaaattagttgcctctccggaaaaaacgacagcaccggacaccaagcgaacagcacagagacgcagcaggcaacacgaaacaacaacagaagtagcacaaagacgcgacagcccaacgtcatacgcggcggcgacatcactacacaagcacgacgaccggcgactcgaagagacgcc

SEQ ID NO: 321017 - DNA, 465 bp, Homo sapiens
caatatggaataaaaattcgggtttactataattttttaattactgtaattcttatttatagaagtttctaatcattctttttcattatcccttattttaatggaaattatttgttaaatgactaaaattaaaataatttaaaagatccagtggacgcagatgggaaatggtgatagctgtctttcctggtgagttaaagattacaagaaaattaacaattttcatacgacatttaaccacctcgctcccctgtggtctacaccattctagtgagttggtaggaattgtaggataagctgtcttattctagtgtttaagaagaaatcaagcggcagggcacagtggttcatgtctataatcccagcactttgggaggctgaagcgggaggatcacttgaagctgagtttgagaccagcctgggtagcatagcaagacctcatctctgtttaaaaaaaaaaaaaac

SEQ ID NO: 321018 - DNA, 602 bp, Homo sapiens
gctttctcctttgaaatgtaggtcctcgagaacattcatttctacttatgatgaaattgtgaaaactagtaaatctgatccagggtgtagtttttatcagttgcctctcaccccttaaaaaaaaaaattaacgtgggaaaaatattgtcatggattttctatctgtactcacagcttgaccagatggttttaacattgtggaatgcctagcagtttaaagccattaactagcctctggttaccctcttctggatttctagtttttttcttaaggtcatcatgtattgcttaagctctgtctttgtgagaaagcttgtccctgctggctttaaaactttactatgctggggaaaattttggactaaagtgacattcacattatactgacctcatcgcccaaatgatgaatgaatgaactaatgtacactacaagaacatgtcttaataggaaagtagactgttgtctgtagttgtcccattgttttatcattgctgctactatattgacatgaagtagcagtgggtgtgcatgtttgtatattttttctgtgctgttaaataagtccacgcacatctcccatgtgggtagggtagtactgggt

SEQ ID NO: 321019 - DNA, 2612 bp, Homo sapiens
  misc_feature (2)..(3): n is a, c, g, or t
anngtcagtacatttcagtcacccccgcccagccctcctgatcctcctgtcattcctcacatcctgtcattgtcagagattttacagatatagagctgaatcatttcctgccatctcttttaacacacaggcctcccagatctttctaacccaggacctacttggaaaggcatgctgggtctcttccacagactttaagctctccctacaccagaatttaggtgagtgctttgaggacatgaagctattcctcccaccaccagtagccttgggctggcccacgccaactgtggagctggagcgggagggaggagtacagacatggaattttaattctgtaatccagggcttcagttatgtacaacatccatgccatttgatgattccaccactccttttccatctcccagaagcctgctttttaatgcccgcttaatattatcagagccgagcctggaatcaaactgcctctttcaaaacctgccactatatcctggctttgtgacctcagccaagttgcttgactattctcagtctcagtttctgcacctgtcaaatagggtttatgttaacctaactttcagggctgtcaggattaaatgagcatgaaccacataaaatgtttggtgtatagtaagtgtacagtaaatacttccattatcagtccctgcaattctatttttcttccttctctacacagcccctgtctggctttaaaatgtcctgccctgctttttatgagtggatacccccagccctatgtggattagcaagttaagtaatgacactcagagacagttccatctttgtccataacttgctctgtgatccagtgtgcatcactcaaacagactatctcttttctcctacaaaacagacagctgcctctcagataatgttgggggcataggaggaatgggaagcccgctaagagaacagaagtcaaaaacagttgggttctagatgggaggaggtgtgcgtgcacatgtatgtttgtgtttcaggtcttggaatctcagcaggtcagtcacattgcagtgtgtcgcttcacctggctccctcttttaaagattttccttccctctttccaactccctgggtcctggatcctccaacagtgtcagggttagatgccttttatgggccacttgcattagtgtcctgatagaggcttaatcactgctcagaaactgccttctgcccactggcaaagggaggcaggggaaatacatgattctaattaatggtccaggcagagaggacactcagaatttcaggactgaagagtatacatgtgtgtgatggtaaatgggcaaaaatcatcccttggcttctcatgcataatgcatgggcacacagactcaaaccctctctcacacacatacacatatacattgttattccacacacaaggcataatcccagtgtccagtgcacatgcatacacgcacacattcccttcctaggccactgtattgctttcctagggcatcttcttataagacaccagtcgtataaggagcccaccccactcatctgagcttatcaaccaattacattaggaaagactgtatttcctagtaaggtcacattcagtagtactgagggttgggacttcaacacagctttttgggggatcataattcaacccatgacagccactgagattattatatctccagagaataaatgtgtggagttaaaaggaagatacatgtggtacaaggggtggtaaggcaagggtaaaaggggagggaggggattgaactagacacacacagacacatgagcaggactttggggagtgtgttttatatctgtcagatgcctagaacagcacctgaaatatgggactcaatcattttagtccccttctttctataagtgtgtgtgtgcggatatgtgtgctagatgttcttgctgtgttaggaggtgataaacatttgtccatgttatataggtggaaagggtcagactactaaattgtgaagacatcatctgtctgcatttattgagaatgtgaatatgaaacaagctgcaagtattctataaatgttcactgttattagatattgtatgtctttgtgtccttttattcatgaattcttgcacattatgaagaaagagtccatgtggtcagtgtcttacccggtgtagggtaaatgcacctgatagcaataacttaagcacacctttataatgaccctatatggcagatgctcctgaatgtgtgtttcgagctagaaaatccgggagtggccaatcggagattcgtttcttatctataatagacatctgagcccctggcccatcccatgaaacccaggctgtagagaggattgaggccttaagttttgggttaaatgacagttgccaggtgtcgctcattagggaaaggggttaagtgaaaatgctgtataaactgcatgatgtttgcaggcagttgtggttttcctgcccagcctgccaccaccgggccatgcggatatgttgtccagcccaacaccacaggaccatttctgtatgtaagacaattctatccagcccgccacctctggactccctcccctgtatgtaagccctcaataaaaccccacgtctcttttgctggc

SEQ ID NO: 321020 - DNA, 4283 bp, Homo sapiens
atcaaaggtgtcaggaccgaggggactgtctgatttagtaagatgggtcactcgtggccaggcccaaaggccccgccttctattcttgtgctgctcaaacccaaaggccctcttgctgttaccgagaaggaggtccagcagtggtacaaaggcttcatcaaggactgccccagtgggcagctggatgcggcaggcttccagaagatctacaagcaattcttcccgttcggagaccccaccaagtttgccacatttgttttcaacgtctttgatgaaaacaaggacgggcgaattgagttctccgagttcatccaggcgctgtcggtgacctcacggggaaccctggatgagaagctacggtgggccttcaagctctacgacttggacaatgatggctacatcaccaggaatgagatgctggacattgtggatgccatttaccagatggtggggaataccgtggagctcccagaggaggagaacactcctgagaagagggtggaccggatctttgccatgatggataagaatgccgacgggaagctgaccctgcaggagttccaggagggttccaaggcagacccgtccattgtgcaggcgctgtccctctacgacgggctggtatagtcccaggctggagctggatgcctgggaaccactcacctccttctgtgccatgaggccacctcagccctgacaccaaccccgtgcgtccacccagccttcttccgcatccacacacagccggctgcccttgacccgggaggccccggctctcctctcccctgtcctgcacccatcccccgcctgaagccaccggctccaattgccagcaacctctgcttgtccggaaaacgacaacacgaaatggaaaaggctacagccctctgcataaaccaaggacttggctgcctcgcaggcagcctccgttcctcccgctctcttgcgcgtgtgcttttgttttttattttgaacagacgttttaaaagaaaaaaaaacaactaccttctgtcctagaagacacagactgacagatggggtgaaggcctggggacctcagagaactctgccttgccctcgtccctcgtccttcggcagccggagaggctgtgggtgggccgagggtgtctaggggttctgcctggtcaacgttatttgtcgtcccatcttttggcagcaaaaccacctgcgtggctaggatgattaattatgaggatgatgattttttttgtgataacagtattgtgctttttgtggggaaagtgaggtttttttttatatacatatataattgatatctttaatttattggttgttaactgttgctgctgcctggtgtgtcctcagctcccagggctgcgggcccaccgtttacatgtgcacgccctgacccacctgcccacgccgacttgggaggatggtggcctgcagcggccaagaagccaaaaaaaattttttttttttcagatactgtgcttgatttttggagaggggagaggtggaaattcctaaatggctaatgcactgttccctccagcccgaatgcctcctgccaaaccccttttccctgctgcctctgtccccgcatccttgttctcccctgggtccgtaacattttttccgaggatgaacaggggacatctttaggtttctcaactcttgctttggtgtttgccgcagcatggaaaacagggcgcctaaggctgggagctggaagaaggggcattgggtacccaggcagagtcaggagaggtggtctttgaagtaagttagcagaaatcaaggggacccccgcctccttgggctggggaggggatttcaagatagttcatgactctctcccgctctgccttccctccttcctatctgctttttccagtaaactgcatggtgtccttccctggccttctcttggctcaaaggctgggagggagggaaggagagaagagttccaggcaatcccatcaatatagtccctacacctggggctgcggcccacatgtcttcacggaggcttccagctgtgcctgccactgaggcaggtgcggccccaggaccatcaccaggaatgcgaggccaccctggaccagaggtaggagcccaaggtccggcccttgctctttgattgtgggcagcctcctgccctctctgggtctcagttgccccatctgcagagcgaggaggcccgggctggttggtcttgaaggcccttttccatgccgacatcatgtcactctaggcctggggttcagtttcctgtggctggtgatgctgtggttaagtttgcttgaccccagcagcccgagggactgtctgagtcacagcacagcccctattgcgtggctgctggtgtgtggggtcagttccagcagatgaatgtgtcatgtggcacaccttgtcccttcccgcagcatttcctggttccccccagacccttgagcgctctttgggacccagaaggagtccttgcacagggaaggcttgaggtgagaagccgcttcccagactgtcagggccaggcctgggtctagaattcttgctgctgctttgcagagtcaacagcccatcagcccatgttttagaggggacactttggtcctcggttcccaccctcagcaagcaggcctccagcccgaggaaggcctctgccgtagtgacgttgccgtgtggggctgcgtggctgttccccttggctggagcattcagccaaccccagcgtcccccctgaggcgttcattggcagccccctaggactgcacgctggccccacggtaaccccccctcccccaccaacatcctgcagggatggggtcagtggttccaccttcacaggccactttgaagggtggattctttgaggcccctgccagtcggctccctgctcagctgctggcccgggcgacctgggactcagcaccaacggctgaagtttctcagctgggctctgacctggggtctggggcagggaacgaacatggtggctttgggctgagaggatgagggaggtctttcccaggtcaaattactttcctttggcctctgcctgaggctcgatttgcctctctggtccaatgggactgacactgttgtacaacctgacctgtggctgagggtgtctgggcttaagcatgtggaccccttcggtgtgtctggccttcctccatcgtcctgccctttggccttttggtttgaagccacaggtgtggcttctggccttagcagatggtatgcttgcggaccgcagcccagcatgccggtgggcccacagcccgagccagcccagagctgccggaagggccgcccttcccggccctggcggggtgctggacactggccattttcactagagtttgcctggcagggaccgatctctgccccctcctctccccaggcctctggctgcagtgatgccgcagaatcctgagccaggtgcctcctgagcagcccgtgcgcctctccacagcggcgtttgccacccaatgcggctcgcttcagatgctctgatgcagagggcatgcccatagtccctctgcagagcctcgcactggggccagggcaggcaccagccccaggcggccagtcggccacggcctgtcctcttcctcgtagcgtctgctcctcactttgtgttgatggtgacttaggagaatgttccgattttccatgatctaagcaggccacgtttaaaataacatcaaggcaagcgtacgtgtcaccctctgtactgacatctcctcccctgaaatgcttttcagtttgacagcccgtttcctagacaagtgcacctggggtttcaggaactttgtgttttttcggagggggttggtggggaggtcgggatgcctgggatcccttcctggagaggcaggctgtctctggaaaaagcctccattgcccacccgccaggcggaaagtcaccctgttcccagcgcggtttcagcatttaattttaagggagctaaggaagcgcggcgcgccccctggtggtggtaagccgccaacgcacctgggggctgcaaccccaccggacgggtggtccggagggaggctggagcggggaggcgaggagggggctgtgagtcctcagaggccctgggccaccacatttctggcagcgtttcccagacacccctctgctaggccatccctggatagcaagtgaattaacttaagggcactgtgatgggaagccttgcccccctctttttttttttttttttaatatctgcggaataaacccaatggttaatttttgaatgaataaaaggcttttgttgaataaa

SEQ ID NO: 321021 - DNA, 4299 bp, Homo sapiens
  misc_feature (4)..(4): n is a, c, g, or t
  misc_feature (7)..(9): n is a, c, g, or t
ggcncgnnnccggcccggcccgcccggcccagccgctcctgctgggcgccccaaccgggtccggcccgggggggcgggggccgcggccgccgaggatggggaaatccaacagcaagttgaagcccgaagttgtggaggagctgaccaggaagacctactgtacaaaggcttcatcaaggactgccccagtgggcagctggatgcggcaggcttccagaagatctacaagcaattcttcccgttcggagaccccaccaagtttgccacatttgttttcaacgtctttgatgaaaacaaggacgggcgaattgagttctccgagttcatccaggcgctgtcggtgacctcacggggaaccctggatgagaagctacggtgggccttcaagctctacgacttggacaatgatggctacatcaccaggaatgagatgctggacattgtggatgccatttaccagatggtggggaataccgtggagctcccagaggaggagaacactcctgagaagagggtggaccggatctttgccatgatggataagaatgccgacgggaagctgaccctgcaggagttccaggagggttccaaggcagacccgtccattgtgcaggcgctgtccctctacgacgggctggtatagtcccaggctggagctggatgcctgggaaccactcacctccttctgtgccatgaggccacctcagccctgacaccaaccccgtgcgtccacccagccttcttccgcatccacacacagccggctgcccttgacccgggaggccccggctctcctctcccctgtcctgcacccatcccccgcctgaagccaccggctccaattgccagcaacctctgcttgtccggaaaacgacaacacgaaatggaaaaggctacagccctctgcataaaccaaggacttggctgcctcgcaggcagcctccgttcctcccgctctcttgcgcgtgtgcttttgttttttattttgaacagacgttttaaaagaaaaaaaaacaactaccttctgtcctagaagacacagactgacagatggggtgaaggcctggggacctcagagaactctgccttgccctcgtccctcgtccttcggcagccggagaggctgtgggtgggccgagggtgtctaggggttctgcctggtcaacgttatttgtcgtcccatcttttggcagcaaaaccacctgcgtggctaggatgattaattatgaggatgatgattttttttgtgataacagtattgtgctttttgtggggaaagtgaggtttttttttatatacatatataattgatatctttaatttattggttgttaactgttgctgctgcctggtgtgtcctcagctcccagggctgcgggcccaccgtttacatgtgcacgccctgacccacctgcccacgccgacttgggaggatggtggcctgcagcggccaagaagccaaaaaaaattttttttttttcagatactgtgcttgatttttggagaggggagaggtggaaattcctaaatggctaatgcactgttccctccagcccgaatgcctcctgccaaaccccttttccctgctgcctctgtccccgcatccttgttctcccctgggtccgtaacattttttccgaggatgaacaggggacatctttaggtttctcaactcttgctttggtgtttgccgcagcatggaaaacagggcgcctaaggctgggagctggaagaaggggcattgggtacccaggcagagtcaggagaggtggtctttgaagtaagttagcagaaatcaaggggacccccgcctccttgggctggggaggggatttcaagatagttcatgactctctcccgctctgccttccctccttcctatctgctttttccagtaaactgcatggtgtccttccctggccttctcttggctcaaaggctgggagggagggaaggagagaagagttccaggcaatcccatcaatatagtccctacacctggggctgcggcccacatgtcttcacggaggcttccagctgtgcctgccactgaggcaggtgcggccccaggaccatcaccaggaatgcgaggccaccctggaccagaggtaggagcccaaggtccggcccttgctctttgattgtgggcagcctcctgccctctctgggtctcagttgccccatctgcagagcgaggaggcccgggctggttggtcttgaaggcccttttccatgccgacatcatgtcactctaggcctggggttcagtttcctgtggctggtgatgctgtggttaagtttgcttgaccccagcagcccgagggactgtctgagtcacagcacagcccctattgcgtggctgctggtgtgtggggtcagttccagcagatgaatgtgtcatgtggcacaccttgtcccttcccgcagcatttcctggttccccccagacccttgagcgctctttgggacccagaaggagtccttgcacagggaaggcttgaggtgagaagccgcttcccagactgtcagggccaggcctgggtctagaattcttgctgctgctttgcagagtcaacagcccatcagcccatgttttagaggggacactttggtcctcggttcccaccctcagcaagcaggcctccagcccgaggaaggcctctgccgtagtgacgttgccgtgtggggctgcgtggctgttccccttggctggagcattcagccaaccccagcgtcccccctgaggcgttcattggcagccccctaggactgcacgctggccccacggtaaccccccctcccccaccaacatcctgcagggatggggtcagtggttccaccttcacaggccactttgaagggtggattctttgaggcccctgccagtcggctccctgctcagctgctggcccgggcgacctgggactcagcaccaacggctgaagtttctcagctgggctctgacctggggtctggggcagggaacgaacatggtggctttgggctgagaggatgagggaggtctttcccaggtcaaattactttcctttggcctctgcctgaggctcgatttgcctctctggtccaatgggactgacactgttgtacaacctgacctgtggctgagggtgtctgggcttaagcatgtggaccccttcggtgtgtctggccttcctccatcgtcctgccctttggccttttggtttgaagccacaggtgtggcttctggccttagcagatggtatgcttgcggaccgcagcccagcatgccggtgggcccacagcccgagccagcccagagctgccggaagggccgcccttcccggccctggcggggtgctggacactggccattttcactagagtttgcctggcagggaccgatctctgccccctcctctccccaggcctctggctgcagtgatgccgcagaatcctgagccaggtgcctcctgagcagcccgtgcgcctctccacagcggcgtttgccacccaatgcggctcgcttcagatgctctgatgcagagggcatgcccatagtccctctgcagagcctcgcactggggccagggcaggcaccagccccaggcggccagtcggccacggcctgtcctcttcctcgtagcgtctgctcctcactttgtgttgatggtgacttaggagaatgttccgattttccatgatctaagcaggccacgtttaaaataacatcaaggcaagcgtacgtgtcaccctctgtactgacatctcctcccctgaaatgcttttcagtttgacagcccgtttcctagacaagtgcacctggggtttcaggaactttgtgttttttcggagggggttggtggggaggtcgggatgcctgggatcccttcctggagaggcaggctgtctctggaaaaagcctccattgcccacccgccaggcggaaagtcaccctgttcccagcgcggtttcagcatttaattttaagggagctaaggaagcgcggcgcgccccctggtggtggtaagccgccaacgcacctgggggctgcaaccccaccggacgggtggtccggagggaggctggagcggggaggcgaggagggggctgtgagtcctcagaggccctgggccaccacatttctggcagcgtttcccagacacccctctgctaggccatccctggatagcaagtgaattaacttaagggcactgtgatgggaagccttgcccccctctttttttttttttttttaatatctgcggaataaacccaatggttaatttttgaatgaataaaaggcttttgttgaataaa

SEQ ID NO: 321022 - DNA, 4159 bp, Homo sapiens
  misc_feature (4)..(4): n is a, c, g, or t
  misc_feature (7)..(9): n is a, c, g, or t
ggcncgnnnccggcccggcccgcccggcccagccgctcctgctgggcgccccaaccgggtccggcccgggggggcgggggccgcggccgccgaggatggggaaatccaacagcaagttgaagcccgaagttgtggaggagctgaccaggaagacctactttaccgagaaggaggtccagcagtggtacaaaggcttcatcaaggactgccccagtgggcagctggatgcggcaggcttccagaagatctacaagcaattcttcccgttcggagaccccaccaagtttgccacatttgttttcaacgtctttgatgaaaacaaggacgggcgaattgagttctccgagttcatccaggcgctgtcggtgacctcacggggaaccctggatgagaagctacggtgggccttcaagctctacgacttggacaatgatggctacatcaccaggaatgagatgctggacattgtggatgccatttaccagatggtggggaataccgtggagctcccagaggaggagaacactcctgagaagagggtggaccggatctttgccatgatggataagaatgccgacgggaagctgaccctgcaggagttccaggagggttccaaggcagacccgtccattgtgcaggcgctgtccctctacgacgggctggtatagtcccaggctggagctggatgcctgggaaccactcacctccttctgtgccatgaggccacctcagccctgacaccaaccccgtgcgtccacccagccttcttccgcatccacacacagccggctgcccttgacccgggaggccccggctctcctctcccctgtcctgcacccatcccccgcctgaagccaccggctccaattgccagcaacctctgcttgtccggaaaacgacaacacgaaatggaaaaggctacagccctctgcataaaccaaggacttggctgcctcgcaggcagcctccgttcctcccgctctcttgcgcgtgtgcttttgttttttattttgaacagacgttttaaaagaaaaaaaaacaactaccttctgtcctagaagacacagactgacagatggggtgaaggcctggggacctcagagaactctgccttgccctcgtccctcgtccttcggcagccggagaggctgtgggtgggccgagggtgtctaggggttctgcctggtcaacgttatttgtcgtcccatcttttggcagcaaaaccacctgcgtggctaggatgattaattatgaggatgatgattttttttgtgataacagtattgtgctttttgtggggaaagtgaggtttttttttatatacatatataattgatatctttaatttattggttgttaactgttgctgctgcctggtgtgtcctcagctcccagggctgcgggcccaccgtttacatgtgcacgccctgacccacctgcccacgccgacttgggaggatggtggcctgcagcggccaagaagccaaaaaaaattttttttttttcagatactgtgcttgatttttggagaggggagaggtggaaattcctaaatggctaatgcactgttccctccagcccgaatgcctcctgccaaaccccttttccctgctgcctctgtccccgcatccttgttctcccctgggtccgtaacattttttccgaggatgaacaggggacatctttaggtttctcaactcttgctttggtgtttgccgcagcatggaaaacagggcgcctaaggctgggagctggaagaaggggcattgggtacccaggcagagtcaggagaggtggtctttgaagtaagttagcagaaatcaaggggacccccgcctccttgggctggggaggggatttcaagatagttcatgactctctcccgctctgccttccctccttcctatctgctttttccagtaaactgcatggtgtccttccctggccttctcttggctcaaaggctgggagggagggaaggagagaagagttccaggcaatcccatcaatatagtccctacacctggggctgcggcccacatgtcttcacggaggcttccagctgtgcctgccactgaggcaggtgcggccccaggaccatcaccaggaatgcgaggccaccctggaccagaggtaggagcccaaggtccggcccttgctctttgattgtgggcagcctcctgccctctctgggtctcagttgccccatctgcagagcgaggaggcccgggctggttggtcttgaaggcccttttccatgccgacatcatgtcactctaggcctggggttcagtttcctgtggctggtgatgctgtggttaagtttgcttgaccccagcagcccgagggactgtctgagtcacagcacagcccctattgcgtggctgctggtgtgtggggtcagttccagcagatgaatgtgtcatgtggcacaccttgtcccttcccgcagcatttcctggttccccccagacccttgagcgctctttgggacccagaaggagtccttgcacagggaaggcttgaggtgagaagccgcttcccagactgtcagggccaggcctgggtctagaattcttgctgctgctttgcagagtcaacagcccatcagcccatgttttagaggggacactttggtcctcggttcccaccctcagcaagcaggcctccagcccgaggaaggcctctgccgtagtgacgttgccgtgtggggctgcgtggctgttccccttggctggagcattcagccaaccccagcgtcccccctgaggcgttcattggcagccccctaggactgcacgctggccccacggtaaccccccctcccccaccaacatcctgcagggatggggtcagtggttccaccttcacaggccactttgaagggtggattctttgaggcccctgccagtcggctccctgctcagctgctggcccgggcgacctgggactcagcaccaacggctgaagtttctcagctgggctctgacctggggtctggggcagggaacgaacatggtggctttgggctgagaggatgagggaggtctttcccaggtcaaattactttcctttggcctctgcctgaggctcgatttgcctctctggtccaatgggactgacactgttgtacaacctgacctgtggctgagggtgtctgggcttaagcatgtggaccccttcggtgtgtctggccttcctccatcgtcctgccctttggccttttggtttgaagccacaggtgtggcttctggccttagcagatggtatgcttgcggaccgcagcccagcatgccggtgggcccacagcccgagccagcccagagctgccggaagggccgcccttcccggccctggcggggtgctggacactggccattttcactagagtttgcctggcagggaccgatctctgccccctcctctccccaggcctctggctgcagtgatgccgcagaatcctgagccaggtgcctcctgagcagcccgtgcgcctctccacagcggcgtttgccacccaatgcggctcgcttcagatgctctgatgcagagggcatgcccatagtccctctgcagagcctcgcactggggccagggcaggcaccagccccaggcggccagtcggccacggcctgtcctcttcctcgtagcgtctgctcctcactttgtgttgatggtgacttaggagaatgttccgattttccatgatctaagcaggccacgtttaaaataacatcaaggcaagcgtacgtgtcaccctctgtactgacatctcctcccctgaaatgcttttcagtttgacagcccgtttcctagacaagtgcacctggggtttcaggaactttgtgttttttcggagcctgccacttgggggagaaattggtataatgcttgcaaaaacaaacaaacaaaaggcaatgtcttctggttgtggttatttcctttcctgcttgcctccccagccccctttgagtctctttttggggtgccgtcctgtctgaacctgccggtgtgtgtctctggcgccagggtcagggcgaggcccaggggtggacaggggccgtgtagcatgccccagcctccccaagctcctgctgtatgtcgtccatgtcacgccaattaaacacgcttcctggacttgtcctcgcctccctgtgtg

SEQ ID NO: 321023 - DNA, 4396 bp, Homo sapiens
  misc_feature (4)..(4): n is a, c, g, or t
  misc_feature (7)..(9): n is a, c, g, or t
ggcncgnnnccggcccggcccgcccggcccagccgctcctgctgggcgccccaaccgggtccggcccgggggggcgggggccgcggccgccgaggatggggaaatccaacagcaagttgaagcccgaagttgtggaggagctgaccaggaagacctactttaccgagaaggaggtccagcagtggtacaaaggcttcatcaaggactgccccagtgggcagctggatgcggcaggcttccagaagatctacaagcaattcttcccgttcggagaccccaccaagtttgccacatttgttttcaacgtctttgatgaaaacaaggacgggcgaattgagttctccgagttcatccaggcgctgtcggtgacctcacggggaaccctggatgagaagctacggtgggccttcaagctctacgacttggacaatgatggctacatcaccaggaatgagatgctggacattgtggatgccatttaccagatggtggggaataccgtggagctcccagaggaggagaacactcctgagaagagggtggaccggatctttgccatgatggataagaatgccgacgggaagctgaccctgcaggagttccaggagggttccaaggcagacccgtccattgtgcaggcgctgtccctctacgacgggctggtatagtcccaggctggagctggatgcctgggaaccactcacctccttctgtgccatgaggccacctcagccctgacaccaaccccgtgcgtccacccagccttcttccgcatccacacacagccggctgcccttgacccgggaggccccggctctcctctcccctgtcctgcacccatcccccgcctgaagccaccggctccaattgccagcaacctctgcttgtccggaaaacgacaacacgaaatggaaaaggctacagccctctgcataaaccaaggacttggctgcctcgcaggcagcctccgttcctcccgctctcttgcgcgtgtgcttttgttttttattttgaacagacgttttaaaagaaaaaaaaacaactaccttctgtcctagaagacacagactgacagatggggtgaaggcctggggacctcagagaactctgccttgccctcgtccctcgtccttcggcagccggagaggctgtgggtgggccgagggtgtctaggggttctgcctggtcaacgttatttgtcgtcccatcttttggcagcaaaaccacctgcgtggctaggatgattaattatgaggatgatgattttttttgtgataacagtattgtgctttttgtggggaaagtgaggtttttttttatatacatatataattgatatctttaatttattggttgttaactgttgctgctgcctggtgtgtcctcagctcccagggctgcgggcccaccgtttacatgtgcacgccctgacccacctgcccacgccgacttgggaggatggtggcctgcagcggccaagaagccaaaaaaaattttttttttttcagatactgtgcttgatttttggagaggggagaggtggaaattcctaaatggctaatgcactgttccctccagcccgaatgcctcctgccaaaccccttttccctgctgcctctgtccccgcatccttgttctcccctgggtccgtaacattttttccgaggatgaacaggggacatctttaggtttctcaactcttgctttggtgtttgccgcagcatggaaaacagggcgcctaaggctgggagctggaagaaggggcattgggtacccaggcagagtcaggagaggtggtctttgaagtaagttagcagaaatcaaggggacccccgcctccttgggctggggaggggatttcaagatagttcatgactctctcccgctctgccttccctccttcctatctgctttttccagtaaactgcatggtgtccttccctggccttctcttggctcaaaggctgggagggagggaaggagagaagagttccaggcaatcccatcaatatagtccctacacctggggctgcggcccacatgtcttcacggaggcttccagctgtgcctgccactgaggcaggtgcggccccaggaccatcaccaggaatgcgaggccaccctggaccagaggtaggagcccaaggtccggcccttgctctttgattgtgggcagcctcctgccctctctgggtctcagttgccccatctgcagagcgaggaggcccgggctggttggtcttgaaggcccttttccatgccgacatcatgtcactctaggcctggggttcagtttcctgtggctggtgatgctgtggttaagtttgcttgaccccagcagcccgagggactgtctgagtcacagcacagcccctattgcgtggctgctggtgtgtggggtcagttccagcagatgaatgtgtcatgtggcacaccttgtcccttcccgcagcatttcctggttccccccagacccttgagcgctctttgggacccagaaggagtccttgcacagggaaggcttgaggtgagaagccgcttcccagactgtcagggccaggcctgggtctagaattcttgctgctgctttgcagagtcaacagcccatcagcccatgttttagaggggacactttggtcctcggttcccaccctcagcaagcaggcctccagcccgaggaaggcctctgccgtagtgacgttgccgtgtggggctgcgtggctgttccccttggctggagcattcagccaaccccagcgtcccccctgaggcgttcattggcagccccctaggactgcacgctggccccacggtaaccccccctcccccaccaacatcctgcagggatggggtcagtggttccaccttcacaggccactttgaagggtggattctttgaggcccctgccagtcggctccctgctcagctgctggcccgggcgacctgggactcagcaccaacggctgaagtttctcagctgggctctgacctggggtctggggcagggaacgaacatggtggctttgggctgagaggatgagggaggtctttcccaggtcaaattactttcctttggcctctgcctgaggctcgatttgcctctctggtccaatgggactgacactgttgtacaacctgacctgtggctgagggtgtctgggcttaagcatgtggaccccttcggtgtgtctggccttcctccatcgtcctgccctttggccttttggtttgaagccacaggtgtggcttctggccttagcagatggtatgcttgcggaccgcagcccagcatgccggtgggcccacagcccgagccagcccagagctgccggaagggccgcccttcccggccctggcggggtgctggacactggccattttcactagagtttgcctggcagggaccgatctctgccccctcctctccccaggcctctggtgcaaccccaccggacgggtggtccggagggaggctggagcggggaggcgaggagggggctgtgagtcctcagaggccctgggccaccacatttctggcagcgtttcccagacacccctctgctaggccatccctggatagcaagtgaattaacttaagggcactgtgatgggaagccttgcccccctctttttttttttttttttaatatctgcggaataaacccaatggttaatttttgaatgaataaaaggcttttgttgaataaacagctggtcccatcttctgtcttggcatcttagcatccaggctcaggctctgccccttctccaggatggggtagccccgagtcgccctccccagtctgcacattccctgttgtccctgttcctgcagtggctcccggccccagggaggcccacctcactcccagcctgactcggtggctggcttccttcaggactttgcgcaagtcagttctgctcattgggtctcaatttccccatcccttggatgggagcaagagtctctgctgggcctgccttgcaggggcctggtgagacccaaatgtgagtgtcatcatcaaagcccctcacagaagtggaggacggtgcccaagagtagcggtttggactgctgctgcctcccacccggagcctgccacttgggggagaaattggtataatgcttgcaaaaacaaacaaacaaaaggcaatgtcttctggttgtggttatttcctttcctgcttgcctccccagccccctttgagtctctttttggggtgccgtcctgtctgaacctgccggtgtgtgtctctggcgccagggtcagggcgaggcccaggggtggacaggggccgtgtagcatgccccagcctccccaagctcctgctgtatgtcgtccatgtcacgccaattaaacacgcttcctggacttgtcctcgcctccctgtgtg

SEQ ID NO: 321024 - DNA, 1110 bp, Homo sapiens
cggctaggtggaggctgggtgccacaggtgtggcttctggccttagcagatggtatgcttgcggaccgcagcccagcatgccggtgggcccacagcccgagccagcccagagctgccggaagggccgcccttcccggccctggcggggtgctggacactggccattttcactagagtttgcctggcagggaccgatctctgccccctcctctccccaggcctctggctgcagtgatgccgcagaatcctgagccaggtgcctcctgagcagcccgtgcgcctctccacagcggcgtttgccacccaatgcggctcgcttcagatgctctgatgcagagggcatgcccatagtccctctgcagagcctcgcactggggccagggcaggcaccagccccaggcggccagtcggccacggcctgtcctcttcctcgtagcgtctgctcctcactttgtgttgatggtgacttaggagaatgttccgattttccatgatctaagcaggccacgtttaaaataacatcaaggcaagcgtacgtgtcaccctctgtactgacatctcctcccctgaaatgcttttcagtttgacagcccgtttcctagacaagtgcacctggggtttcaggaactttgtgttttttcggagggggttggtggggaggtcgggatgcctgggatcccttcctggagaggcaggctgtctctggaaaaagcctccattgcccacccgccaggcggaaagtcaccctgttcccagcgcggtttcagcatttaattttaagggagctaaggaagcgcggcgcgccccctggtggtggtaagccgccaacgcacctgggggctgcaaccccaccggacgggtggtccggagggaggctggagcggggaggcgaggagggggctgtgagtcctcagaggccctgggccaccacatttctggcagcgtttcccagacacccctctgctaggccatccctggatagcaagtgaattaacttaagggcactgtgatgggaagccttgcccccctctttttttttttttttttaatatctgcggaataaacccaatggttaatttttgaatgaataaaaggcttttgttgaataaa

SEQ ID NO: 321025 - DNA, 4324 bp, Homo sapiens
  misc_feature (4)..(4): n is a, c, g, or t
  misc_feature (7)..(9): n is a, c, g, or t
ggcncgnnnccggcccggcccgcccggcccagccgctcctgctgggcgccccaaccgggtccggcccgggggggcgggggccgcggccgccgaggatggggaaatccaacagcaagttgaagcccgaagttgtggaggagctgaccaggaagacctactttaccgagaaggaggtccagcagtggtacaaaggcttcatcaaggactgccccagtgggcagctggatgcggcaggcttccagaagatctacaagcaattcttcccgttcggagaccccaccaagtttgccacatttgttttcaacgtctttgatgaaaacaaggacgggcgaattgagttctccgagttcatccaggcgctgtcggtgacctcacggggaaccctggatgagaagctacggtgggccttcaagctctacgacttggacaatgatggctacatcaccaggaatgagatgctggacattgtggatgccatttaccagatggtggggaataccgtggagctcccagaggaggagaacactcctgagaagagggtggaccggatctttgccatgatggataagaatgccgacgggaagctgaccctgcaggagttccaggagggttccaaggcagacccgtccattgtgcaggcgctgtccctctacgacgggctggtatagtcccaggctggagctggatgcctgggaaccactcacctccttctgtgccatgaggccacctcagccctgacaccaaccccgtgcgtccacccagccttcttccgcatccacacacagccggctgcccttgacccgggaggccccggctctcctctcccctgtcctgcacccatcccccgcctgaagccaccggctccaattgccagcaacctctgcttgtccggaaaacgacaacacgaaatggaaaaggctacagccctctgcataaaccaaggacttggctgcctcgcaggcagcctccgttcctcccgctctcttgcgcgtgtgcttttgttttttattttgaacagacgttttaaaagaaaaaaaaacaactaccttctgtcctagaagacacagactgacagatggggtgaaggcctggggacctcagagaactctgccttgccctcgtccctcgtccttcggcagccggagaggctgtgggtgggccgagggtgtctaggggttctgcctggtcaacgttatttgtcgtcccatcttttggcagcaaaaccacctgcgtggctaggatgattaattatgaggatgatgattttttttgtgataacagtattgtgctttttgtggggaaagtgaggtttttttttatatacatatataattgatatctttaatttattggttgttaactgttgctgctgcctggtgtgtcctcagctcccagggctgcgggcccaccgtttacatgtgcacgccctgacccacctgcccacgccgacttgggaggatggtggcctgcagcggccaagaagccaaaaaaaattttttttttttcagatactgtgcttgatttttggagaggggagaggtggaaattcctaaatggctaatgcactgttccctccagcccgaatgcctcctgccaaaccccttttccctgctgcctctgtccccgcatccttgttctcccctgggtccgtaacattttttccgaggatgaacaggggacatctttaggtttctcaactcttgctttggtgtttgccgcagcatggaaaacagggcgcctaaggctgggagctggaagaaggggcattgggtacccaggcagagtcaggagaggtggtctttgaagtaagttagcagaaatcaaggggacccccgcctccttgggctggggaggggatttcaagatagttcatgactctctcccgctctgccttccctccttcctatctgctttttccagtaaactgcatggtgtccttccctggccttctcttggctcaaaggctgggagggagggaaggagagaagagttccaggcaatcccatcaatatagtccctacacctggggctgcggcccacatgtcttcacggaggcttccagctgtgcctgccactgaggcaggtgcggccccaggaccatcaccaggaatgcgaggccaccctggaccagaggtaggagcccaaggtccggcccttgctctttgattgtgggcagcctcctgccctctctgggtctcagttgccccatctgcagagcgaggaggcccgggctggttggtcttgaaggcccttttccatgccgacatcatgtcactctaggcctggggttcagtttcctgtggctggtgatgctgtggttaagtttgcttgaccccagcagcccgagggactgtctgagtcacagcacagcccctattgcgtggctgctggtgtgtggggtcagttccagcagatgaatgtgtcatgtggcacaccttgtcccttcccgcagcatttcctggttccccccagacccttgagcgctctttgggacccagaaggagtccttgcacagggaaggcttgaggtgagaagccgcttcccagactgtcagggccaggcctgggtctagaattcttgctgctgctttgcagagtcaacagcccatcagcccatgttttagaggggacactttggtcctcggttcccaccctcagcaagcaggcctccagcccgaggaaggcctctgccgtagtgacgttgccgtgtggggctgcgtggctgttccccttggctggagcattcagccaaccccagcgtcccccctgaggcgttcattggcagccccctaggactgcacgctggccccacggtaaccccccctcccccaccaacatcctgcagggatggggtcagtggttccaccttcacaggccactttgaagggtggattctttgaggcccctgccagtcggctccctgctcagctgctggcccgggcgacctgggactcagcaccaacggctgaagtttctcagctgggctctgacctggggtctggggcagggaacgaacatggtggctttgggctgagaggatgagggaggtctttcccaggtcaaattactttcctttggcctctgcctgaggctcgatttgcctctctggtccaatgggactgacactgttgtacaacctgacctgtggctgagggtgtctgggcttaagcatgtggaccccttcggtgtgtctggccttcctccatcgtcctgccctttggccttttggtttgaagccacaggtgtggcttctggccttagcagatggtatgcttgcggaccgcagcccagcatgccggtgggcccacagcccgagccagcccagagctgccggaagggccgcccttcccggccctggcggggtgctggacactggccattttcactagagtttgcctggcagggaccgatctctgccccctcctctccccaggcctctggctgcagtgatgccgcagaatcctgagccaggtgcctcctgagcagcccgtgcgcctctccacagcggcgtttgccacccaatgcggctcgcttcagatgctctgatgcagagggcatgcccatagtccctctgcagagcctcgcactggggccagggcaggcaccagccccaggcggccagtcggccacggcctgtcctcttcctcgtagcgtctgctcctcactttgtgttgatggtgacttaggagaatgttccgattttccatgatctaagcaggccacgtttaaaataacatcaaggcaagcgtacgtgtcaccctctgtactgacatctcctcccctgaaatgcttttcagtttgacagcccgtttcctagacaagtgcacctggggtttcaggaactttgtgttttttcggagggggttggtggggaggtcgggatgcctgggatcccttcctggagaggcaggctgtctctggaaaaagcctccattgcccacccgccaggcggaaagtcaccctgttcccagcgcggtttcagcatttaattttaagggagctaaggaagcgcggcgcgccccctggtggtggtaagccgccaacgcacctgggggctgcaaccccaccggacgggtggtccggagggaggctggagcggggaggcgaggagggggctgtgagtcctcagaggccctgggccaccacatttctggcagcgtttcccagacacccctctgctaggccatccctggatagcaagtgaattaacttaagggcactgtgatgggaagccttgcccccctctttttttttttttttttaatatctgcggaataaacccaatggttaatttttgaatgaataaaaggcttttgttgaataaa

SEQ ID NO: 321026 - DNA, 5011 bp, Homo sapiens
  misc_feature (4)..(4): n is a, c, g, or t
  misc_feature (7)..(9): n is a, c, g, or t
ggcncgnnnccggcccggcccgcccggcccagccgctcctgctgggcgccccaaccgggtccggcccgggggggcgggggccgcggccgccgaggatggggaaatccaacagcaagttgaagcccgaagttgtggaggagctgaccaggaagacctactttaccgagaaggaggtccagcagtggtacaaaggcttcatcaaggactgccccagtgggcagctggatgcggcaggcttccagaagatctacaagcaattcttcccgttcggagaccccaccaagtttgccacatttgttttcaacgtctttgatgaaaacaaggacgggcgaattgagttctccgagttcatccaggcgctgtcggtgacctcacggggaaccctggatgagaagctacggtgggccttcaagctctacgacttggacaatgatggctacatcaccaggaatgagatgctggacattgtggatgccatttaccagatggtggggaataccgtggagctcccagaggaggagaacactcctgagaagagggtggaccggatctttgccatgatggataagaatgccgacgggaagctgaccctgcaggagttccaggagggttccaaggcagacccgtccattgtgcaggcgctgtccctctacgacgggctggtatagtcccaggctggagctggatgcctgggaaccactcacctccttctgtgccatgaggccacctcagccctgacaccaaccccgtgcgtccacccagccttcttccgcatccacacacagccggctgcccttgacccgggaggccccggctctcctctcccctgtcctgcacccatcccccgcctgaagccaccggctccaattgccagcaacctctgcttgtccggaaaacgacaacacgaaatggaaaaggctacagccctctgcataaaccaaggacttggctgcctcgcaggcagcctccgttcctcccgctctcttgcgcgtgtgcttttgttttttattttgaacagacgttttaaaagaaaaaaaaacaactaccttctgtcctagaagacacagactgacagatggggtgaaggcctggggacctcagagaactctgccttgccctcgtccctcgtccttcggcagccggagaggctgtgggtgggccgagggtgtctaggggttctgcctggtcaacgttatttgtcgtcccatcttttggcagcaaaaccacctgcgtggctaggatgattaattatgaggatgatgattttttttgtgataacagtattgtgctttttgtggggaaagtgaggtttttttttatatacatatataattgatatctttaatttattggttgttaactgttgctgctgcctggtgtgtcctcagctcccagggctgcgggcccaccgtttacatgtgcacgccctgacccacctgcccacgccgacttgggaggatggtggcctgcagcggccaagaagccaaaaaaaattttttttttttcagatactgtgcttgatttttggagaggggagaggtggaaattcctaaatggctaatgcactgttccctccagcccgaatgcctcctgccaaaccccttttccctgctgcctctgtccccgcatccttgttctcccctgggtccgtaacattttttccgaggatgaacaggggacatctttaggtttctcaactcttgctttggtgtttgccgcagcatggaaaacagggcgcctaaggctgggagctggaagaaggggcattgggtacccaggcagagtcaggagaggtggtctttgaagtaagttagcagaaatcaaggggacccccgcctccttgggctggggaggggatttcaagatagttcatgactctctcccgctctgccttccctccttcctatctgctttttccagtaaactgcatggtgtccttccctggccttctcttggctcaaaggctgggagggagggaaggagagaagagttccaggcaatcccatcaatatagtccctacacctggggctgcggcccacatgtcttcacggaggcttccagctgtgcctgccactgaggcaggtgcggccccaggaccatcaccaggaatgcgaggccaccctggaccagaggtaggagcccaaggtccggcccttgctctttgattgtgggcagcctcctgccctctctgggtctcagttgccccatctgcagagcgaggaggcccgggctggttggtcttgaaggcccttttccatgccgacatcatgtcactctaggcctggggttcagtttcctgtggctggtgatgctgtggttaagtttgcttgaccccagcagcccgagggactgtctgagtcacagcacagcccctattgcgtggctgctggtgtgtggggtcagttccagcagatgaatgtgtcatgtggcacaccttgtcccttcccgcagcatttcctggttccccccagacccttgagcgctctttgggacccagaaggagtccttgcacagggaaggcttgaggtgagaagccgcttcccagactgtcagggccaggcctgggtctagaattcttgctgctgctttgcagagtcaacagcccatcagcccatgttttagaggggacactttggtcctcggttcccaccctcagcaagcaggcctccagcccgaggaaggcctctgccgtagtgacgttgccgtgtggggctgcgtggctgttccccttggctggagcattcagccaaccccagcgtcccccctgaggcgttcattggcagccccctaggactgcacgctggccccacggtaaccccccctcccccaccaacatcctgcagggatggggtcagtggttccaccttcacaggccactttgaagggtggattctttgaggcccctgccagtcggctccctgctcagctgctggcccgggcgacctgggactcagcaccaacggctgaagtttctcagctgggctctgacctggggtctggggcagggaacgaacatggtggctttgggctgagaggatgagggaggtctttcccaggtcaaattactttcctttggcctctgcctgaggctcgatttgcctctctggtccaatgggactgacactgttgtacaacctgacctgtggctgagggtgtctgggcttaagcatgtggaccccttcggtgtgtctggccttcctccatcgtcctgccctttggccttttggtttgaagccacaggtgtggcttctggccttagcagatggtatgcttgcggaccgcagcccagcatgccggtgggcccacagcccgagccagcccagagctgccggaagggccgcccttcccggccctggcggggtgctggacactggccattttcactagagtttgcctggcagggaccgatctctgccccctcctctccccaggcctctggctgcagtgatgccgcagaatcctgagccaggtgcctcctgagcagcccgtgcgcctctccacagcggcgtttgccacccaatgcggctcgcttcagatgctctgatgcagagggcatgcccatagtccctctgcagagcctcgcactggggccagggcaggcaccagccccaggcggccagtcggccacggcctgtcctcttcctcgtagcgtctgctcctcactttgtgttgatggtgacttaggagaatgttccgattttccatgatctaagcaggccacgtttaaaataacatcaaggcaagcgtacgtgtcaccctctgtactgacatctcctcccctgaaatgcttttcagtttgacagcccgtttcctagacaagtgcacctggggtttcaggaactttgtgttttttcggagggggttggtggggaggtcgggatgcctgggatcccttcctggagaggcaggctgtctctggaaaaagcctccattgcccacccgccaggcggaaagtcaccctgttcccagcgcggtttcagcatttaattttaagggagctaaggaagcgcggcgcgccccctggtggtggtaagccgccaacgcacctgggggctgcaaccccaccggacgggtggtccggagggaggctggagcggggaggcgaggagggggctgtgagtcctcagaggccctgggccaccacatttctggcagcgtttcccagacacccctctgctaggccatccctggatagcaagtgaattaacttaagggcactgtgatgggaagccttgcccccctctttttttttttttttttaatatctgcggaataaacccaatggttaatttttgaatgaataaaaggcttttgttgaataaacagctggtcccatcttctgtcttggcatcttagcatccaggctcaggctctgccccttctccaggatggggtagccccgagtcgccctccccagtctgcacattccctgttgtccctgttcctgcagtggctcccggccccagggaggcccacctcactcccagcctgactcggtggctggcttccttcaggactttgcgcaagtcagttctgctcattgggtctcaatttccccatcccttggatgggagcaagagtctctgctgggcctgccttgcaggggcctggtgagacccaaatgtgagtgtcatcatcaaagcccctcacagaagtggaggacggtgcccaagagtagcggtttggactgctgctgcctcccacccggagcctgccacttgggggagaaattggtataatgcttgcaaaaacaaacaaacaaaaggcaatgtcttctggttgtggttatttcctttcctgcttgcctccccagccccctttgagtctctttttggggtgccgtcctgtctgaacctgccggtgtgtgtctctggcgccagggtcagggcgaggcccaggggtggacaggggccgtgtagcatgccccagcctccccaagctcctgctgtatgtcgtccatgtcacgccaattaaacacgcttcctggacttgtcctcgcctccctgtgtg

SEQ ID NO: 321027 - DNA, 4093 bp, Homo sapiens
  misc_feature (4)..(4): n is a, c, g, or t
  misc_feature (7)..(9): n is a, c, g, or t
ggcncgnnnccggcccggcccgcccggcccagccgctcctgctgggcgccccaaccgggtccggcccgggggggcgggggccgcggccgccgaggatggggaaatccaacagcaagttgaagcccgaagttgtggaggagctgaccaggaagacctactttaccgagaaggaggtccagcagtggtacaaaggcttcatcaaggactgccccagtgggcagctggatgcggcaggcttccagaagatctacaagcaattcttcccgttcggagaccccaccaagtttgccacatttgttttcaacgtctttgatgaaaacaaggacgggcgaattgagttctccgagttcatccaggcgctgtcggtgacctcacggggaaccctggatgagaagctacggtgggccttcaagctctacgacttggacaatgatggctacatcaccaggaatgagatgctggacattgtggatgccatttaccagatggtggggaataccgtggagctcccagaggaggagaacactcctgagaagagggtggaccggatctttgccatgatggataagaatgccgacgggaagctgaccctgcaggagttccaggagggttccaaggcagacccgtccattgtgcaggcgctgtccctctacgacgggctggtatagtcccaggctggagctggatgcctgggaaccactcacctccttctgtgccatgaggccacctcagccctgacaccaaccccgtgcgtccacccagccttcttccgcatccacacacagccggctgcccttgacccgggaggccccggctctcctctcccctgtcctgcacccatcccccgcctgaagccaccggctccaattgccagcaacctctgcttgtccggaaaacgacaacacgaaatggaaaaggctacagccctctgcataaaccaaggacttggctgcctcgcaggcagcctccgttcctcccgctctcttgcgcgtgtgcttttgttttttattttgaacagacgttttaaaagaaaaaaaaacaactaccttctgtcctagaagacacagactgacagatggggtgaaggcctggggacctcagagaactctgccttgccctcgtccctcgtccttcggcagccggagaggctgtgggtgggccgagggtgtctaggggttctgcctggtcaacgttatttgtcgtcccatcttttggcagcaaaaccacctgcgtggctaggatgattaattatgaggatgatgattttttttgtgataacagtattgtgctttttgtggggaaagtgaggtttttttttatatacatatataattgatatctttaatttattggttgttaactgttgctgctgcctggtgtgtcctcagctcccagggctgcgggcccaccgtttacatgtgcacgccctgacccacctgcccacgccgacttgggaggatggtggcctgcagcggccaagaagccaaaaaaaattttttttttttcagatactgtgcttgatttttggagaggggagaggtggaaattcctaaatggctaatgcactgttccctccagcccgaatgcctcctgccaaaccccttttccctgctgcctctgtccccgcatccttgttctcccctgggtccgtaacattttttccgaggatgaacaggggacatctttaggtttctcaactcttgctttggtgtttgccgcagcatggaaaacagggcgcctaaggctgggagctggaagaaggggcattgggtacccaggcagagtcaggagaggtggtctttgaagtaagttagcagaaatcaaggggacccccgcctccttgggctggggaggggatttcaagatagttcatgactctctcccgctctgccttccctccttcctatctgctttttccagtaaactgcatggtgtccttccctggccttctcttggctcaaaggctgggagggagggaaggagagaagagttccaggcaatcccatcaatatagtccctacacctggggctgcggcccacatgtcttcacggaggcttccagctgtgcctgccactgaggcaggtgcggccccaggaccatcaccaggaatgcgaggccaccctggaccagaggtaggagcccaaggtccggcccttgctctttgattgtgggcagcctcctgccctctctgggtctcagttgccccatctgcagagcgaggaggcccgggctggttggtcttgaaggcccttttccatgccgacatcatgtcactctaggcctggggttcagtttcctgtggctggtgatgctgtggttaagtttgcttgaccccagcagcccgagggactgtctgagtcacagcacagcccctattgcgtggctgctggtgtgtggggtcagttccagcagatgaatgtgtcatgtggcacaccttgtcccttcccgcagcatttcctggttccccccagacccttgagcgctctttgggacccagaaggagtccttgcacagggaaggcttgaggtgagaagccgcttcccagactgtcagggccaggcctgggtctagaattcttgctgctgctttgcagagtcaacagcccatcagcccatgttttagaggggacactttggtcctcggttcccaccctcagcaagcaggcctccagcccgaggaaggcctctgccgtagtgacgttgccgtgtggggctgcgtggctgttccccttggctggagcattcagccaaccccagcgtcccccctgaggcgttcattggcagccccctaggactgcacgctggccccacggtaaccccccctcccccaccaacatcctgcagggatggggtcagtggttccaccttcacaggccactttgaagggtggattctttgaggcccctgccagtcggctccctgctcagctgctggcccgggcgacctgggactcagcaccaacggctgaagtttctcagctgggctctgacctggggtctggggcagggaacgaacatggtggctttgggctgagaggatgagggaggtctttcccaggtcaaattactttcctttggcctctgcctgaggctcgatttgcctctctggtccaatgggactgacactgttgtacaacctgacctgtggctgagggtgtctgggcttaagcatgtggaccccttcggtgtgtctggccttcctccatcgtcctgccctttggccttttggtttgaagccacaggtgtggcttctggccttagcagatggtatgcttgcggaccgcagcccagcatgccggtgggcccacagcccgagccagcccagagctgccggaagggccgcccttcccggccctggcggggtgctggacactggccattttcactagagtttgcctggcagggaccgatctctgccccctcctctccccaggcctctggctgcagtgatgccgcagaatcctgagccaggtgcctcctgagcagcccgtgcgcctctccacagcggcgtttgccacccaatgcggctcgcttcagatgctctgatgcagagggcatgcccatagtccctctgcagagcctcgcactggggccagggcaggcaccagccccaggcggccagtcggccacggcctgtcctcttcctcgtagcgtctgctcctcactttgtgttgatggtgacttaggagaatgttccgattttccatgatctaagcaggccacgtttaaaataacatcaaggcaagcgtacgtgtcaccctctgtactgacatctcctcccctgaaatgcttttcagtttgacagcccgtttcctagacaagtgcacctggggtttcaggaactttgtgttttttcggagggggttggtggggaggtcgggatgcctgggatcccttcctggagaggcaggctgtctctggaaaaagcctccattgcccacccgccaggcggaaagtcaccctgttcccagcgcggtttcagcatttaattttaagggagctaaggaagcgcggcgcgcccctgtgtgtagcgccacgccctggggtgaccacggcgtgtcgggcgtgccggggccgaggtgtatccaaggcgc

SEQ ID NO: 321028 - DNA, 1773 bp, Homo sapiens
gatgccgcagaatcctgagccaggtgcctcctgagcagcccgtgcgcctctccacagcggcgttgccacccaatgcggctcgcttcagatgctctgatgcagagggcatgcccatagtccctctgcagagcctcgcactggggccaggcaggcaccagccccaggcggccagtcggccacggctgtcctcttcctcgtagcgtctgctcctcactttgtgttgatggtgacttaggagaatgttccgattttccatgatctaagcaggccacgtttaaaacaacatcctgcagggatggggtcagtggttccaccttcacaggccactttgaagggtggattctttgaggcccctgccagtcggctccctgctcagctgctggcccgggcgacctgggactcagcaccaacggctgaagtttctcagctgggctctgacctggggtctggggcagggaacgaacatggtggctttgggctgagaggatgagggaggtctttcccaggtcaaattactttcctttggcctctgcctgaggctcgatttgcctctctggtccaatgggactgacactgttgtacaacctgacctgtggctgagggtgtctgggcttaagcatgtggaccccttcggtgtgtctggccttcctccatcgtcctgccctttggccttttggtttgaagccacaggtgtggcttctggccttagcagatggtatgcttgcggaccgcagcccagcatgccggtgggcccacagcccgagccagcccagagctgccggaagggccgcccttcccggccctggcggggtgctggacactggccattttcactagagtttgcctggcagggaccgatctctgccccctcctctccccaggcctctggctgcagtgatgccgcagaatcctgagccaggtgcctcctgagcagcccgtgcgcctctccacagcggcgtttgccacccaatgcggctcgcttcagatgctctgatgcagagggcatgcccatagtccctctgcagagcctcgcactggggccagggcaggcaccagccccaggcggccagtcggccacggcctgtcctcttcctcgtagcgtctgctcctcactttgtgttgatggtgacttaggagaatgttccgattttccatgatctaagcaggccacgtttaaaataacatcaaggcaagcgtacgtgtcaccctctgtactgacatctcctcccctgaaatgcttttcagtttgacagcccgtttcctagacaagtgcacctggggtttcaggaactttgtgttttttcggagggggttggtggggaggtcgggatgcctgggatcccttcctggagaggcaggctgtctctggaaaaagcctccattgcccacccgccaggcggaaagtcaccctgttcccagcgcggtttcagcatttaattttaagggagctaaggaagcgcggcgcgccccctggtggtggtaagccgccaacgcacctgggggctgcaaccccaccggacgggtggtccggagggaggctggagcggggaggcgaggagggggctgtgagtcctcagaggccctgggccaccacatttctggcagcgtttcccagacacccctctgctaggccatccctggatagcaagtgaattaacttaagggcactgtgatgggaagccttgcccccctctttttttttttttttttaatatctgcggaataaacccaatggttaatttttgaatgaataaaaggcttttgttgaataaa

SEQ ID NO: 321029 - DNA, 657 bp, Homo sapiens
tatatttacccttaggaatagaagtgaccgaagaatccggattgaaaccagcatcctatatacagctccacaggatgtgcttctcttcatggtaattttccatatatatcatctactttgatttctgccccgttttaatgtccatataaatgtttcagtccaatttgtaagtgttgagtccactgatgtagaagttctgacttgtaaaccattcatcctgctttagtcatatgatagtaccgatgcaattagctcctctcccaccaccgtgggggatttctccctgagatgaggtgtgctttgaccagctgcatgtggcttgattgcattcctgtttctcttagttccactggatcttgttttcttttatttcgttatattacctgagctcagggtagttccgttcatctttagaaagagctcatctcttccatccttagaaggatctcatcagagaactcatatgtaatcaatcaggtaaaagaaatactgatgtacttctgagagactggtgagaggtgggtcataggaagcccataggtctgaggaccgagtcagtgtcttggggatggggctgttccatatgattatttttgtgtggcataaaagatgtaaaaaaaaaaaatggtcctttacatgcaaagaccctagcttcct

SEQ ID NO: 321030 - DNA, 303 bp, Homo sapiens
tcttctttatatattcaaacaatataccacagtgttactatatccatatccacaaaataggagattttgtatatatattattagatttatacataagtatttcaatatggggggtgctaatataatggtagtatgttttaatttccacttgttcattgctggcatatagaaagcaaatgacttttgtatattaaccttgtatcctgcaatgttgctataattaattgcttattagttccagtggttattttgtagatacttttggattttctatatagacgatcatgtcatcagccaacaaca

SEQ ID NO: 321031 - DNA, 8492 bp, Homo sapiens
cactctgcgctgctgctaaaggggcagcaacggcggccagcgctgtgcgcgccatagcgaggctcgctcgcccgacgcgcactccgggtcggtccccagagctctgtggaggtgactcgagtgggcagggccgggcggcgctgtcggctgggagggcggggaggaggcgatgaggagacgagcagccgccgccgccgccgccgctgctcaccgcccgccgcggccgtagcgggagtcggggcggggctgggccagctgtacccctgacgggccgcgaacccagacaaaggaggaggagccgccccagaagcgggccagcgccgccgggaaaggaggtcgccgcccggggtcgcccgggcttgcgggtcgccgcgcttcctctgcgggcgctgcgggaggcgagggccgcctcggcggaggaagccgaccccggggtctccgccagcccgccggcgccgcctccgagccgcctcggccgtagcctcggcccgggcgggaggcggcggccgccggcgaggcgaggcggcccgcgccctgcctgtcaggccaccggcccggcccgcgggctgcccccgatgcggaggcgctgtcgccggggccatgcagcaggcgccgcagccttacgagttcttcagcgaggagaacagtccgaaatggcggggactgttggtctcggccctgcggaaggtcagtgctaggggcggggcggccggcgggtggcccgtggccccccgagcttctaacggggagcaggtcgtccctcccacagggctcgagtccccggggccgagccgtttctcgttggctggcaatggggggctcacaattgcctgttgcattctgaaggacgtttctcaagttttttttttttgcctggtcccggaaggaaggttttgttatgatcataaaactggatttcatgttgcagtcatttcgtcaggcaacttccgccgttgaccaatttgttgtcctcaggctggaatcgggcaagagaaagtcccgctggtatttagacagtttctaaaacaaaagcacattttcaggccgggttcaggaacaagtgcatcccactctctcagctaatgaagagtctctctattatattgaagagctgatttttcagctgcttaataaattatgcatggcccagccaaggactgttcaagatgtagaggagcgagttcagaagacctttcctcacccaattgataaatgggccattgctgatgcacaatctgctatagaaaaacgaaaacgaagaaatcctcttttactgcctgtggacaaaatccatccttcgttgaaggaagtattagggtacaaagtggactaccatgtatccctatatattgtggctgtactagagtatatctcagctgatattttaaaattggctggtaattatgtttttaatatccggcattatgaaatatctcagcaggacattaaagtgtcaatgtgtgcggataaggttttgatggacatgtttgatcaggatgacataggtttggtttctctctgtgaagatgaacctagttcttctggtgaattaaactactatgatcttgtcagaactgaaatcgcagaagaaagacagtatctacgggaattaaatatgatcataaaagtgtttcgagaagcctttctttctgatagaaagctgtttaaaccttctgatatcgaaaagatttttagtaacatttcagatatacatgaattgactgtgaaacttttaggtttgattgaagacacagttgaaatgactgatgaaagcagtcctcatcccttagctggcagctgttttgaagatttggcagaagagcaagcatttgatccttatgaaacattatcacaggacattctttcaccagagtttcatgaacatttcaataaattgatggccagacctgcagttgctctacactttcagtccattgctgatggttttaaagaggcagttcgttatgtccttccacgtcttatgctggtgccagtgtatcactgttggcactactttgagttactaaagcaattgaaagcatgtagtgaagaacaagaagacagagaatgtttgaaccaagctattactgctctcatgaatctccaaggtagcatggaccgaatttacaagcagtattcacctagacgtcgacctggagatcctgtttgccctttttatagtcaccaattaagaagcaaacacctggctatcaaaaaaatgaatgaaattcagaaaaatatcgatggatgggaaggcaaagatattggacagtgttgtaatgaattcattatggagggaccattgacaagaatcggtgccaaacatgaacggcatatttttctgtttgatggcttaatgatcagttgtaaacctaatcatggccagactcggcttccaggttacagtagtgcagaatacaggttaaaagaaaaatttgtcatgaggaaaatacaaatttgtgataaagaagatacttgtgagcacaagcatgcatttgaattagtatccaaagatgagaacagcataatatttgctgctaagtctgctgaagaaaaaaacaactggatggcagcccttatttctcttcattatcgtagtactctagatcgaatgttagattcagtattattgaaagaagaaaatgagcaaccactgagattaccaagtcctgaagtatatcgttttgtagtaaaagactctgaggaaaacattgtttttgaagacaacttgcaaagtagaagtggcatccccattattaaaggaggaactgtagtgaaattaattgaaaggttaacatatcatatgtatgcagatcccaattttgttcgtacttttcttaccacatatcgttcattttgtaaaccacaggaattgctgagcttactgattgaacggtttgaaattccagagccagaacctactgacgcagacaaattggcaatagagaaaggcgagcagccaatcagtgcagaccttaaaagatttcgcaaggaatatgtccaaccagtacaacttaggatcttaaatgtatttcggcattgggttgaacatcatttttatgactttgaaagagacttggaattgcttgaaagactagaatccttcatttcaagtgtaagagggaaagctatgaaaaaatgggtagagtcaattgctaagatcatcaggaggaagaagcaagctcaggcaaatggagtaagccataatattacctttgaaagtccacctccaccaattgaatggcatatcagcaaaccaggacagtttgaaacatttgatctcatgacacttcatccaatagaaattgcacgtcagctgacacttttggagtctgatctttacaggaaagttcaaccgtctgaacttgtagggagtgtgtggaccaaagaagataaagaaataaattctccaaatttattaaaaatgattcgccataccacaaatctcaccctctggtttgaaaaatgcattgtggaagcagaaaattttgaagaacgggtggcagtactaagtagaattatagaaattctgcaagtttttcaagatttgaataatttcaatggcgtattggagatagtcagtgcagtaaattcagtgtcagtatacagactagaccatacctttgaggcactgcaggaaaggaaaaggaaaattttggacgaagctgtggaattaagtcaagatcactttaaaaaatacctagtaaaacttaagtcaatcaatccaccttgtgtgcctttttttggaatatatttaacaaatattctgaagaccgaagaagggaataatgattttttaaaaaagaaagggaaagatttaatcaatttcagtaagaggaggaaagtagctgaaattactggagaaattcagcagtatcagaatcagccttactgtttacggatagaaccagatatgaggagattctttgaaaaccttaaccccatgggaagtgcatctgaaaaagagtttacagattatttgttcaacaagtcactagaaattgaacctcgaaactgcaaacagccacctcgatttcctaggaaatcaactttttccttaaaatctcctggaataaggcctaacacaggccgacatggctctacctcaggtactttacgaggtcacccaacaccattagaaagagaaccatgtaaaataagctttagtcggattgctgaaactgagctggaatcaacagtgtcagcaccaacctctccaaatacaccatctactccaccagtatctgcttcttcagaccttagtgtatttttagatgtggatctcaacagctcctgtggcagcaatagcatctttgctccagtgcttttgccacattcaaagtctttctttagttcatgtggtagtttacataaactaagtgaagagcccctgattcctcctcctcttcctcctcgaaaaaagtttgatcatgatgcttcaaattccaagggaaatatgaaatctgatgatgatcctcctgctattccaccgagacagcctcctcctccaaaggtaaaacccagagttcctgttcctactggtgcatttgatgggcctctgcatagtccacctccgccaccaccaagagatcctcttcctgatacccctccaccagttccccttcggcctccagaacactttataaactgtccatttaatcttcagccacctccactggggcatcttcacagagattcagactggctcagagacattagtacgtgtccaaattcgccaagcactcctcctagcacaccctctccaagggtaccgcgtcgatgctatgtgctcagttctagtcagaataatcttgctcatcctccagctccccctgttccaccaaggcagaattcaagccctcatctgccaaaactgccaccaaagacttacaaacgggagctttcgcaccccccattgtacagactgcctttgctagaaaatgcagaaactccccaatgaccttagccatatgtagtcattgacactggaatggtatttgtaaagttttttttttaatttattcaaaaaaagacatagtattttagtactttttacaaataatgctcttacaaaaatgctactgatcaaataagcttttaagaattggaaaaataaaaatacaaaagtccttcaccattatcctcaggtgatcagtagcattgccttgtcttggatcctcagtgctgccaaaaggccagtataaagaatttatatttgcactgtaaactctgcaaaaatatggtttaaagtgacatgattgcactgaaaagggatagtgcttttgtgaaatttttcaaatttgagtaatagatgcctttttaaggcagtgaatttacacaaatatgggaggggtatatggtgttactgatttttaaacctctttgaccatcttctagtttttacttctagtttttacatctaggagaattgtgaataacaccaactgttcttaaactctttaatgccatgtcttaaatgccggtatttgctgctgaagacaaaaatgaaaagtaggatgaaaataatagaatggcactgtaagtgtttattattttgtcaaaatgtaaacaaagactacataacccaatgatggagggaaaaagggcatgtatctcattcagatgtgccttttgtttttgcagactatgacgtctttagctaatgaattgcctattgttatggaaaacagttaatatgccatgtatgtacagttttgtttatattgtatatttaaagatactgctaataacctatataaatttaagtgacttgaggcctataatacaatctgctactttactaattcataaattcaaaaaaaattctatggcataggaaccaactgccttgccttcaagacctagtaactttctctataaatctcgtgttaactgaaattttttttaaatatattttttagattggtaatatttaaaccagcaaatacttaaagctttattaaacattttaatcagataagtgagtaaagcttttatttgccatttggatgccttcgttcaaagtgatagagtgttttgctgatagtgctgtagcagcagttgtaaagtagccaaaagccacgttgtttatttactggtttgtggccttttactgtgctttgtatcagagttcttaacaagattaataaatcaccccagtcttaatttttaaaagacttttaaaatatgtgttttcattataaggaacaaagggggagattgttgagtcctatagacacacacacacacacacacaattttttcttcactgttaaatgtgagctgcaggcttctagcaaccacttttatgaattcatacaaaaaactaggagcatactaggaacttgaaaaggaagattgtaagattatagccatctttggtaggatcttggaagctgattgcatttaagccttgtaactactatgtaaatcaagtgtccaacttggtaaactctgaggttggctttgttttttaaagagcagattataatagttttgtctgggaaagtgatttaaacggcctcttcgttaagccaaacgtgtgatttagggtagagggaggctgccaagcgcgtcgggtaagcaggggccccacgctcggccccgcccaggtaacgctgccttccgggctttgttaactcgcgcgcgctgcgtcgccaactcagcggcgggcagggggcggagccgcagggcggggcggtgcgcgttgatgtgacgtccctgcgcgcgccgctttctgttgccgggcgcaatggcggatacgctggagtcctcgctggaggacccactgcggagctttgtgcgagttttggagaagcgggatggtacagtgctacgactacagcagtatagctccggtggcgtgggttgcgttgtgtgggacgctgccattgtcctttctaaatacctggaaacgcccgagttttctggcgacggggcccacgcgctgagccggcggtcggtgctggagctgggttcgggcaccggggccgtggggctcatggctgctaccctcggggctgatgttgtagtcaccgatcttgaggaattgcaagacttgctgaagatgaatattaatatgaacaagcatcttgtcactggttctgttcaagccaaggggggaagaaatagaaggctttccttctccacccgacttcatactgatggccgactgcatatactatgaagagtctttggagccattgctgaaaactctaaaagatatcagcggatttgaaacttgtattatatgttgttatgaacaacgaacaatggggaaaaatccagaaattgagaaaaaatattttgagctccttcagctagattttgactttgaaaaaattcctttggaaaaacatgatgaagagtatcgaagtgaagatattcatattatatacatcagaaagaaaaaatcgaaatttccatcgtgaagcctttaatcatcttacccaaggctctaacaacctgggtaaactaaagatgtgaatagagcatgtgaatacagcatgggaagattgtgttcacagatttttttttccggcacgtccttagagatccgatgtatagatgatgaccaccaggggctgtctgcaatacgaaaaattcctgcttgcctgcctgcctgccaatggccctgaatccagcttaggttacttagttcagcatcaagttcttcttaaatgttgggaatcagttattcaaataaaaattggtattgaggcgaggctgaaatctgccaaaaacagccaacatgatttgactggaccttttacaggaagctagagataaatttctgaagagaactatctgctattatataataatgttttaaattcaaactagtaaattttagtttgtcttcagagtttaaaaggttttcattttgtacataattatacaatatttatcatttgtattttccacttcatttcttttaaaatatctttaatactgaaatgttcttttaattttaaaaagaactgagatattgtcttgtatacttatattggccaaagttttcttttcctccaccatacatatctatgtgatttaatcagtaaattgtactgtaatgagttgctaagaagacaaatcagaagattggaggaacaaaagatatctttacagatttttcatttgagcatggagtgagaatagaaagaccagtttcaggcttatgcacttacgtggctcatgcactttatgtatatgttccaggaaaatctggcttaaaaatactggtattgtttacatgaagcagtgaaaggtttttgaataactacaaatgtagttctatatgtatataccaaatgaatttctgttctgtgtctctctgttttatgttatgaagccattcgctcatatacaataatctgtcaaggactttaatcatacttgttccaaagagtagtaaccggatggaattctggtatttacaggcattggtgctagatggtacattttatgtgttaaaataaacattgtttttgaga

SEQ ID NO: 321032 - DNA, 7927 bp, Homo sapiens
cactctgcgctgctgctaaaggggcagcaacggcggccagcgctgtgcgcgccatagcgaggctcgctcgcccgacgcgcactccgggtcggtccccagagctctgtggaggtgactcgagtgggcagggccgggcggcgctgtcggctgggagggcggggaggaggcgatgaggagacgagcagccgccgccgccgccgccgctgctcaccgcccgccgcggccgtagcgggagtcggggcggggctgggccagctgtacccctgacgggccgcgaacccagacaaaggaggaggagccgccccagaagcgggccagcgccgccgggaaaggaggtcgccgcccggggtcgcccgggcttgcgggtcgccgcgcttcctctgcgggcgctgcgggaggcgagggccgcctcggcggaggaagccgaccccggggtctccgccagcccgccggcgccgcctccgagccgcctcggccgtagcctcggcccgggcgggaggcggcggccgccggcgaggcgaggcggcccgcgccctgcctgtcaggccaccggcccggcccgcgggctgcccccgatgcggaggcgctgtcgccggggccatgcagcaggcgccgcagccttacgagttcttcagcgaggagaacagtccgaaatggcggggactgttggtctcggccctgcggaaggttcaggaacaagtgcatcccactctctcagctaatgaagagtctctctattatattgaagagctgatttttcagctgcttaataaattatgcatggcccagccaaggactgttcaagatgtagaggagcgagttcagaagacctttcctcacccaattgataaatgggccattgctgatgcacaatctgctatagaaaaacgaaaacgaagaaatcctcttttactgcctgtggacaaaatccatccttcgttgaaggaagtattagggtacaaagtggactaccatgtatccctatatattgtggctgtactagagtatatctcagctgatattttaaaattggctggtaattatgtttttaatatccggcattatgaaatatctcagcaggacattaaagtgtcaatgtgtgcggataaggatatcgaaaagatttttagtaacatttcagatatacatgaattgactgtgaaacttttaggtttgattgaagacacagttgaaatgactgatgaaagcagtcctcatcccttagctggcagctgttttgaagatttggcagaagagcaagcatttgatccttatgaaacattatcacaggacattctttcaccagagtttcatgaacatttcaataaattgatggccagacctgcagttgctctacactttcagtccattgctgatggttttaaagaggcagttcgttatgtccttccacgtcttatgctggtgccagtgtatcactgttggcactactttgagttactaaagcaattgaaagcatgtagtgaagaacaagaagacagagaatgtttgaaccaagctattactgctctcatgaatctccaaggtagcatggaccgaatttacaagcagtattcacctagacgtcgacctggagatcctgtttgccctttttatagtcaccaattaagaagcaaacacctggctatcaaaaaaatgaatgaaattcagaaaaatatcgatggatgggaaggcaaagatattggacagtgttgtaatgaattcattatggagggaccattgacaagaatcggtgccaaacatgaacggcatatttttctgtttgatggcttaatgatcagttgtaaacctaatcatggccagactcggcttccaggttacagtagtgcagaatacaggttaaaagaaaaatttgtcatgaggaaaatacaaatttgtgataaagaagatacttgtgagcacaagcatgcatttgaattagtatccaaagatgagaacagcataatatttgctgctaagtctgctgaagaaaaaaacaactggatggcagcccttatttctcttcattatcgtagtactctagatcgaatgttagattcagtattattgaaagaagaaaatgagcaaccactgagattaccaagtcctgaagtatatcgttttgtagtaaaagactctgaggaaaacattgtttttgaagacaacttgcaaagtagaagtggcatccccattattaaaggaggaactgtagtgaaattaattgaaaggttaacatatcatatgtatgcagatcccaattttgttcgtacttttcttaccacatatcgttcattttgtaaaccacaggaattgctgagcttactgattgaacggtttgaaattccagagccagaacctactgacgcagacaaattggcaatagagaaaggcgagcagccaatcagtgcagaccttaaaagatttcgcaaggaatatgtccaaccagtacaacttaggatcttaaatgtatttcggcattgggttgaacatcatttttatgactttgaaagagacttggaattgcttgaaagactagaatccttcatttcaagtgtaagagggaaagctatgaaaaaatgggtagagtcaattgctaagatcatcaggaggaagaagcaagctcaggcaaatggagtaagccataatattacctttgaaagtccacctccaccaattgaatggcatatcagcaaaccaggacagtttgaaacatttgatctcatgacacttcatccaatagaaattgcacgtcagctgacacttttggagtctgatctttacaggaaagttcaaccgtctgaacttgtagggagtgtgtggaccaaagaagataaagaaataaattctccaaatttattaaaaatgattcgccataccacaaatctcaccctctggtttgaaaaatgcattgtggaagcagaaaattttgaagaacgggtggcagtactaagtagaattatagaaattctgcaagtttttcaagatttgaataatttcaatggcgtattggagatagtcagtgcagtaaattcagtgtcagtatacagactagaccatacctttgaggcactgcaggaaaggaaaaggaaaattttggacgaagctgtggaattaagtcaagatcactttaaaaaatacctagtaaaacttaagtcaatcaatccaccttgtgtgcctttttttggaatatatttaacaaatattctgaagaccgaagaagggaataatgattttttaaaaaagaaagggaaagatttaatcaatttcagtaagaggaggaaagtagctgaaattactggagaaattcagcagtatcagaatcagccttactgtttacggatagaaccagatatgaggagattctttgaaaaccttaaccccatgggaagtgcatctgaaaaagagtttacagattatttgttcaacaagtcactagaaattgaacctcgaaactgcaaacagccacctcgatttcctaggaaatcaactttttccttaaaatctcctggaataaggcctaacacaggccgacatggctctacctcaggtactttacgaggtcacccaacaccattagaaagagaaccatgtaaaataagctttagtcggattgctgaaactgagctggaatcaacagtgtcagcaccaacctctccaaatacaccatctactccaccagtatctgcttcttcagaccttagtgtatttttagatgtggatctcaacagctcctgtggcagcaatagcatctttgctccagtgcttttgccacattcaaagtctttctttagttcatgtggtagtttacataaactaagtgaagagcccctgattcctcctcctcttcctcctcgaaaaaagtttgatcatgatgcttcaaattccaagggaaatatgaaatctgatgatgatcctcctgctattccaccgagacagcctcctcctccaaaggtaaaacccagagttcctgttcctactggtgcatttgatgggcctctgcatagtccacctccgccaccaccaagagatcctcttcctgatacccctccaccagttccccttcggcctccagaacactttataaactgtccatttaatcttcagccacctccactggggcatcttcacagagattcagactggctcagagacattagtacgtgtccaaattcgccaagcactcctcctagcacaccctctccaagggtaccgcgtcgatgctatgtgctcagttctagtcagaataatcttgctcatcctccagctccccctgttccaccaaggcagaattcaagccctcatctgccaaaactgccaccaaagacttacaaacgggagctttcgcaccccccattgtacagactgcctttgctagaaaatgcagaaactccccaatgaccttagccatatgtagtcattgacactggaatggtatttgtaaagttttttttttaatttattcaaaaaaagacatagtattttagtactttttacaaataatgctcttacaaaaatgctactgatcaaataagcttttaagaattggaaaaataaaaatacaaaagtccttcaccattatcctcaggtgatcagtagcattgccttgtcttggatcctcagtgctgccaaaaggccagtataaagaatttatatttgcactgtaaactctgcaaaaatatggtttaaagtgacatgattgcactgaaaagggatagtgcttttgtgaaatttttcaaatttgagtaatagatgcctttttaaggcagtgaatttacacaaatatgggaggggtatatggtgttactgatttttaaacctctttgaccatcttctagtttttacttctagtttttacatctaggagaattgtgaataacaccaactgttcttaaactctttaatgccatgtcttaaatgccggtatttgctgctgaagacaaaaatgaaaagtaggatgaaaataatagaatggcactgtaagtgtttattattttgtcaaaatgtaaacaaagactacataacccaatgatggagggaaaaagggcatgtatctcattcagatgtgccttttgtttttgcagactatgacgtctttagctaatgaattgcctattgttatggaaaacagttaatatgccatgtatgtacagttttgtttatattgtatatttaaagatactgctaataacctatataaatttaagtgacttgaggcctataatacaatctgctactttactaattcataaattcaaaaaaaattctatggcataggaaccaactgccttgccttcaagacctagtaactttctctataaatctcgtgttaactgaaattttttttaaatatattttttagattggtaatatttaaaccagcaaatacttaaagctttattaaacattttaatcagataagtgagtaaagcttttatttgccatttggatgccttcgttcaaagtgatagagtgttttgctgatagtgctgtagcagcagttgtaaagtagccaaaagccacgttgtttatttactggtttgtggccttttactgtgctttgtatcagagttcttaacaagattaataaatcaccccagtcttaatttttaaaagacttttaaaatatgtgttttcattataaggaacaaagggggagattgttgagtcctatagacacacacacacacacacacaattttttcttcactgttaaatgtgagctgcaggcttctagcaaccacttttatgaattcatacaaaaaactaggagcatactaggaacttgaaaaggaagattgtaagattatagccatctttggtaggatcttggaagctgattgcatttaagccttgtaactactatgtaaatcaagtgtccaacttggtaaactctgaggttggctttgttttttaaagagcagattataatagttttgtctgggaaagtgatttaaacggcctcttcgttaagccaaacgtgtgatttagggtagagggaggctgccaagcgcgtcgggtaagcaggggccccacgctcggccccgcccaggtaacgctgccttccgggctttgttaactcgcgcgcgctgcgtcgccaactcagcggcgggcagggggcggagccgcagggcggggcggtgcgcgttgatgtgacgtccctgcgcgcgccgctttctgttgccgggcgcaatggcggatacgctggagtcctcgctggaggacccactgcggagctttgtgcgagttttggagaagcgggatggtacagtgctacgactacagcagtatagctccggtggcgtgggttgcgttgtgtgggacgctgccattgtcctttctaaatacctggaaacgcccgagttttctggcgacggggcccacgcgctgagccggcggtcggtgctggagctgggttcgggcaccggggccgtggggctcatggctgctaccctcggggctgatgttgtagtcaccgatcttgaggaattgcaagacttgctgaagatgaatattaatatgaacaagcatcttgtcactggttctgttcaagccaaggggggaagaaatagaaggctttccttctccacccgacttcatactgatggccgactgcatatactatgaagagtctttggagccattgctgaaaactctaaaagatatcagcggatttgaaacttgtattatatgttgttatgaacaacgaacaatggggaaaaatccagaaattgagaaaaaatattttgagctccttcagctagattttgactttgaaaaaattcctttggaaaaacatgatgaagagtatcgaagtgaagatattcatattatatacatcagaaagaaaaaatcgaaatttccatcgtgaagcctttaatcatcttacccaaggctctaacaacctgggtaaactaaagatgtgaatagagcatgtgaatacagcatgggaagattgtgttcacagatttttttttccggcacgtccttagagatccgatgtatagatgatgaccaccaggggctgtctgcaatacgaaaaattcctgcttgcctgcctgcctgccaatggccctgaatccagcttaggttacttagttcagcatcaagttcttcttaaatgttgggaatcagttattcaaataaaaattggtattgaggcgaggctgaaatctgccaaaaacagccaacatgatttgactggaccttttacaggaagctagagataaatttctgaagagaactatctgctattatataataatgttttaaattcaaactagtaaattttagtttgtcttcagagtttaaaaggttttcattttgtacataattatacaatatttatcatttgtattttccacttcatttcttttaaaatatctttaatactgaaatgttcttttaattttaaaaagaactgagatattgtcttgtatacttatattggccaaagttttcttttcctccaccatacatatctatgtgatttaatcagtaaattgtactgtaatgagttgctaagaagacaaatcagaagattggaggaacaaaagatatctttacagatttttcatttgagcatggagtgagaatagaaagaccagtttcaggcttatgcacttacgtggctcatgcactttatgtatatgttccaggaaaatctggcttaaaaatactggtattgtttacatgaagcagtgaaaggtttttgaataactacaaatgtagttctatatgtatataccaaatgaatttctgttctgtgtctctctgttttatgttatgaagccattcgctcatatacaataatctgtcaaggactttaatcatacttgttccaaagagtagtaaccggatggaattctggtatttacaggcattggtgctagatggtacattttatgtgttaaaataaacattgtttttgaga

SEQ ID NO: 321033 - DNA, 8272 bp, Homo sapiens
cactctgcgctgctgctaaaggggcagcaacggcggccagcgctgtgcgcgccatagcgaggctcgctcgcccgacgcgcactccgggtcggtccccagagctctgtggaggtgactcgagtgggcagggccgggcggcgctgtcggctgggagggcggggaggaggcgatgaggagacgagcagccgccgccgccgccgccgctgctcaccgcccgccgcggccgtagcgggagtcggggcggggctgggccagctgtacccctgacgggccgcgaacccagacaaaggaggaggagccgccccagaagcgggccagcgccgccgggaaaggaggtcgccgcccggggtcgcccgggcttgcgggtcgccgcgcttcctctgcgggcgctgcgggaggcgagggccgcctcggcggaggaagccgaccccggggtctccgccagcccgccggcgccgcctccgagccgcctcggccgtagcctcggcccgggcgggaggcggcggccgccggcgaggcgaggcggcccgcgccctgcctgtcaggccaccggcccggcccgcgggctgcccccgatgcggaggcgctgtcgccggggccatgcagcaggcgccgcagccttacgagttcttcagcgaggagaacagtccgaaatggcggggactgttggtctcggccctgcggaagatggagtctcgcttttttgccaggctggggtgtagtggtgcaatcttggctcactgcaacctccacctctcaggttcaagtgattctcctgcctcagcctcccgagtagctgggactacaggcgtgtgccaccacgcccaggttcaggaacaagtgcatcccactctctcagctaatgaagagtctctctattatattgaagagctgatttttcagctgcttaataaattatgcatggcccagccaaggactgttcaagatgtagaggagcgagttcagaagacctttcctcacccaattgataaatgggccattgctgatgcacaatctgctatagaaaaacgaaaacgaagaaatcctcttttactgcctgtggacaaaatccatccttcgttgaaggaagtattagggtacaaagtggactaccatgtatccctatatattgtggctgtactagagtatatctcagctgatattttaaaattggctggtaattatgtttttaatatccggcattatgaaatatctcagcaggacattaaagtgtcaatgtgtgcggataaggttttgatggacatgtttgatcaggatgacataggtttggtttctctctgtgaagatgaacctagttcttctggtgaattaaactactatgatcttgtcagaactgaaatcgcagaagaaagacagtatctacgggaattaaatatgatcataaaagtgtttcgagaagcctttctttctgatagaaagctgtttaaaccttctgatatcgaaaagatttttagtaacatttcagatatacatgaattgactgtgaaacttttaggtttgattgaagacacagttgaaatgactgatgaaagcagtcctcatcccttagctggcagctgttttgaagatttggcagaagagcaagcatttgatccttatgaaacattatcacaggacattctttcaccagagtttcatgaacatttcaataaattgatggccagacctgcagttgctctacactttcagtccattgctgatggttttaaagaggcagttcgttatgtccttccacgtcttatgctggtgccagtgtatcactgttggcactactttgagttactaaagcaattgaaagcatgtagtgaagaacaagaagacagagaatgtttgaaccaagctattactgctctcatgaatctccaaggtagcatggaccgaatttacaagcagtattcacctagacgtcgacctggagatcctgtttgccctttttatagtcaccaattaagaagcaaacacctggctatcaaaaaaatgaatgaaattcagaaaaatatcgatggatgggaaggcaaagatattggacagtgttgtaatgaattcattatggagggaccattgacaagaatcggtgccaaacatgaacggcatatttttctgtttgatggcttaatgatcagttgtaaacctaatcatggccagactcggcttccaggttacagtagtgcagaatacaggttaaaagaaaaatttgtcatgaggaaaatacaaatttgtgataaagaagatacttgtgagcacaagcatgcatttgaattagtatccaaagatgagaacagcataatatttgctgctaagtctgctgaagaaaaaaacaactggatggcagcccttatttctcttcattatcgtagtactctagatcgaatgttagattcagtattattgaaagaagaaaatgagcaaccactgagattaccaagtcctgaagtatatcgttttgtagtaaaagactctgaggaaaacattgtttttgaagacaacttgcaaagtagaagtggcatccccattattaaaggaggaactgtagtgaaattaattgaaaggttaacatatcatatgtatgcagatcccaattttgttcgtacttttcttaccacatatcgttcattttgtaaaccacaggaattgctgagcttactgattgaacggtttgaaattccagagccagaacctactgacgcagacaaattggcaatagagaaaggcgagcagccaatcagtgcagaccttaaaagatttcgcaaggaatatgtccaaccagtacaacttaggatcttaaatgtatttcggcattgggttgaacatcatttttatgactttgaaagagacttggaattgcttgaaagactagaatccttcatttcaagtgtaagagggaaagctatgaaaaaatgggtagagtcaattgctaagatcatcaggaggaagaagcaagctcaggcaaatggagtaagccataatattacctttgaaagtccacctccaccaattgaatggcatatcagcaaaccaggacagtttgaaacatttgatctcatgacacttcatccaatagaaattgcacgtcagctgacacttttggagtctgatctttacaggaaagttcaaccgtctgaacttgtagggagtgtgtggaccaaagaagataaagaaataaattctccaaatttattaaaaatgattcgccataccacaaatctcaccctctggtttgaaaaatgcattgtggaagcagaaaattttgaagaacgggtggcagtactaagtagaattatagaaattctgcaagtttttcaagatttgaataatttcaatggcgtattggagatagtcagtgcagtaaattcagtgtcagtatacagactagaccatacctttgaggcactgcaggaaaggaaaaggaaaattttggacgaagctgtggaattaagtcaagatcactttaaaaaatacctagtaaaacttaagtcaatcaatccaccttgtgtgcctttttttggaatatatttaacaaatattctgaagaccgaagaagggaataatgattttttaaaaaagaaagggaaagatttaatcaatttcagtaagaggaggaaagtagctgaaattactggagaaattcagcagtatcagaatcagccttactgtttacggatagaaccagatatgaggagattctttgaaaaccttaaccccatgggaagtgcatctgaaaaagagtttacagattatttgttcaacaagtcactagaaattgaacctcgaaactgcaaacagccacctcgatttcctaggaaatcaactttttccttaaaatctcctggaataaggcctaacacaggccgacatggctctacctcaggtactttacgaggtcacccaacaccattagaaagagaaccatgtaaaataagctttagtcggattgctgaaactgagctggaatcaacagtgtcagcaccaacctctccaaatacaccatctactccaccagtatctgcttcttcagaccttagtgtatttttagatgtggatctcaacagctcctgtggcagcaatagcatctttgctccagtgcttttgccacattcaaagtctttctttagttcatgtggtagtttacataaactaagtgaagagcccctgattcctcctcctcttcctcctcgaaaaaagtttgatcatgatgcttcaaattccaagggaaatatgaaatctgatgatgatcctcctgctattccaccgagacagcctcctcctccaaaggtaaaacccagagttcctgttcctactggtgcatttgatgggcctctgcatagtccacctccgccaccaccaagagatcctcttcctgatacccctccaccagttccccttcggcctccagaacactttataaactgtccatttaatcttcagccacctccactggggcatcttcacagagattcagactggctcagagacattagtacgtgtccaaattcgccaagcactcctcctagcacaccctctccaagggtaccgcgtcgatgctatgtgctcagttctagtcagaataatcttgctcatcctccagctccccctgttccaccaaggcagaattcaagccctcatctgccaaaactgccaccaaagacttacaaacgggagctttcgcaccccccattgtacagactgcctttgctagaaaatgcagaaactccccaatgaccttagccatatgtagtcattgacactggaatggtatttgtaaagttttttttttaatttattcaaaaaaagacatagtattttagtactttttacaaataatgctcttacaaaaatgctactgatcaaataagcttttaagaattggaaaaataaaaatacaaaagtccttcaccattatcctcaggtgatcagtagcattgccttgtcttggatcctcagtgctgccaaaaggccagtataaagaatttatatttgcactgtaaactctgcaaaaatatggtttaaagtgacatgattgcactgaaaagggatagtgcttttgtgaaatttttcaaatttgagtaatagatgcctttttaaggcagtgaatttacacaaatatgggaggggtatatggtgttactgatttttaaacctctttgaccatcttctagtttttacttctagtttttacatctaggagaattgtgaataacaccaactgttcttaaactctttaatgccatgtcttaaatgccggtatttgctgctgaagacaaaaatgaaaagtaggatgaaaataatagaatggcactgtaagtgtttattattttgtcaaaatgtaaacaaagactacataacccaatgatggagggaaaaagggcatgtatctcattcagatgtgccttttgtttttgcagactatgacgtctttagctaatgaattgcctattgttatggaaaacagttaatatgccatgtatgtacagttttgtttatattgtatatttaaagatactgctaataacctatataaatttaagtgacttgaggcctataatacaatctgctactttactaattcataaattcaaaaaaaattctatggcataggaaccaactgccttgccttcaagacctagtaactttctctataaatctcgtgttaactgaaattttttttaaatatattttttagattggtaatatttaaaccagcaaatacttaaagctttattaaacattttaatcagataagtgagtaaagcttttatttgccatttggatgccttcgttcaaagtgatagagtgttttgctgatagtgctgtagcagcagttgtaaagtagccaaaagccacgttgtttatttactggtttgtggccttttactgtgctttgtatcagagttcttaacaagattaataaatcaccccagtcttaatttttaaaagacttttaaaatatgtgttttcattataaggaacaaagggggagattgttgagtcctatagacacacacacacacacacacaattttttcttcactgttaaatgtgagctgcaggcttctagcaaccacttttatgaattcatacaaaaaactaggagcatactaggaacttgaaaaggaagattgtaagattatagccatctttggtaggatcttggaagctgattgcatttaagccttgtaactactatgtaaatcaagtgtccaacttggtaaactctgaggttggctttgttttttaaagagcagattataatagttttgtctgggaaagtgatttaaacggcctcttcgttaagccaaacgtgtgatttagggtagagggaggctgccaagcgcgtcgggtaagcaggggccccacgctcggccccgcccaggtaacgctgccttccgggctttgttaactcgcgcgcgctgcgtcgccaactcagcggcgggcagggggcggagccgcagggcggggcggtgcgcgttgatgtgacgtccctgcgcgcgccgctttctgttgccgggcgcaatggcggatacgctggagtcctcgctggaggacccactgcggagctttgtgcgagttttggagaagcgggatggtacagtgctacgactacagcagtatagctccggtggcgtgggttgcgttgtgtgggacgctgccattgtcctttctaaatacctggaaacgcccgagttttctggcgacggggcccacgcgctgagccggcggtcggtgctggagctgggttcgggcaccggggccgtggggctcatggctgctaccctcggggctgatgttgtagtcaccgatcttgaggaattgcaagacttgctgaagatgaatattaatatgaacaagcatcttgtcactggttctgttcaagccaaggggggaagaaatagaaggctttccttctccacccgacttcatactgatggccgactgcatatactatgaagagtctttggagccattgctgaaaactctaaaagatatcagcggatttgaaacttgtattatatgttgttatgaacaacgaacaatggggaaaaatccagaaattgagaaaaaatattttgagctccttcagctagattttgactttgaaaaaattcctttggaaaaacatgatgaagagtatcgaagtgaagatattcatattatatacatcagaaagaaaaaatcgaaatttccatcgtgaagcctttaatcatcttacccaaggctctaacaacctgggtaaactaaagatgtgaatagagcatgtgaatacagcatgggaagattgtgttcacagatttttttttccggcacgtccttagagatccgatgtatagatgatgaccaccaggggctgtctgcaatacgaaaaattcctgcttgcctgcctgcctgccaatggccctgaatccagcttaggttacttagttcagcatcaagttcttcttaaatgttgggaatcagttattcaaataaaaattggtattgaggcgaggctgaaatctgccaaaaacagccaacatgatttgactggaccttttacaggaagctagagataaatttctgaagagaactatctgctattatataataatgttttaaattcaaactagtaaattttagtttgtcttcagagtttaaaaggttttcattttgtacataattatacaatatttatcatttgtattttccacttcatttcttttaaaatatctttaatactgaaatgttcttttaattttaaaaagaactgagatattgtcttgtatacttatattggccaaagttttcttttcctccaccatacatatctatgtgatttaatcagtaaattgtactgtaatgagttgctaagaagacaaatcagaagattggaggaacaaaagatatctttacagatttttcatttgagcatggagtgagaatagaaagaccagtttcaggcttatgcacttacgtggctcatgcactttatgtatatgttccaggaaaatctggcttaaaaatactggtattgtttacatgaagcagtgaaaggtttttgaataactacaaatgtagttctatatgtatataccaaatgaatttctgttctgtgtctctctgttttatgttatgaagccattcgctcatatacaataatctgtcaaggactttaatcatacttgttccaaagagtagtaaccggatggaattctggtatttacaggcattggtgctagatggtacattttatgtgttaaaataaacattgtttttgaga

SEQ ID NO: 321034 - DNA, 8238 bp, Homo sapiens
cactctgcgctgctgctaaaggggcagcaacggcggccagcgctgtgcgcgccatagcgaggctcgctcgcccgacgcgcactccgggtcggtccccagagctctgtggaggtgactcgagtgggcagggccgggcggcgctgtcggctgggagggcggggaggaggcgatgaggagacgagcagccgccgccgccgccgccgctgctcaccgcccgccgcggccgtagcgggagtcggggcggggctgggccagctgtacccctgacgggccgcgaacccagacaaaggaggaggagccgccccagaagcgggccagcgccgccgggaaaggaggtcgccgcccggggtcgcccgggcttgcgggtcgccgcgcttcctctgcgggcgctgcgggaggcgagggccgcctcggcggaggaagccgaccccggggtctccgccagcccgccggcgccgcctccgagccgcctcggccgtagcctcggcccgggcgggaggcggcggccgccggcgaggcgaggcggcccgcgccctgcctgtcaggccaccggcccggcccgcgggctgcccccgatgcggaggcgctgtcgccggggccatgcagcaggcgccgcagccttacgagttcttcagcgaggagaacagtccgaaatggcggggactgttggtctcggccctgcggaaggttcaggaacaagtgcatcccactctctcagctaatgaagagtctctctattatattgaagagctgatttttcagctgcttaataaattatgcatggcccagccaaggactgttcaagatgtagaggagcgagttcagaagacctttcctcacccaattgataaatgggccattgctgatgcacaatctgctatagaaaaacgaaaacgaagaaatcctcttttactgcctgtggacaaaatccatccttcgttgaaggaagtattagggtacaaagtggactaccatgtatccctatatattgtggctgtactagagtatatctcagctgatattttaaaattggctggtaattatgtttttaatatccggcattatgaaatatctcagcaggacattaaagtgtcaatgtgtgcggataaggttttgatggacatgtttgatcaggatgacataggtttggtttctctctgtgaagatgaacctagttcttctggtgaattaaactactatgatcttgtcagaactgaaatcgcagaagaaagacagtatctacgggaattaaatatgatcataaaagtgtttcgagaagcctttctttctgatagaaagctgtttaaaccttctgatatcgaaaagatttttagtaacatttcagatatacatgaattgactgtgaaacttttaggtttgattgaagacacagttgaaatgactgatgaaagcagtcctcatcccttagctggcagctgttttgaagatttggcagaagagcaagcatttgatccttatgaaacattatcacaggacattctttcaccagagtttcatgaacatttcaataaattgatggccagacctgcagttgctctacactttcagtccattgctgatggttttaaagaggcagttcgttatgtccttccacgtcttatgctggtgccagtgtatcactgttggcactactttgagttactaaagcaattgaaagcatgtagtgaagaacaagaagacagagaatgtttgaaccaagctattactgctctcatgaatctccaaggtagcatggaccgaatttacaagcagtattcacctagacgtcgacctggagatcctgtttgccctttttatagtcaccaattaagaagcaaacacctggctatcaaaaaaatgaatgaaattcagaaaaatatcgatggatgggaaggcaaagatattggacagtgttgtaatgaattcattatggagggaccattgacaagaatcggtgccaaacatgaacggcatatttttctgtttgatggcttaatgatcagttgtaaacctaatcatggccagactcggcttccaggttacagtagtgcagaatacaggttaaaagaaaaatttgtcatgaggaaaatacaaatttgtgataaagaagatacttgtgagcacaagcatgcatttgaattagtatccaaagatgagaacagcataatatttgctgctaagtctgctgaagaaaaaaacaactggatggcagcccttatttctcttcattatcgtagtactctagatcgaatgttagattcagtattattgaaagaagaaaatgagcaaccactgagattaccaagtcctgaagtatatcgttttgtagtaaaagactctgaggaaaacattgtttttgaagacaacttgcaaagtagaagtggcatccccattattaaaggaggaactgtagtgaaattaattgaaaggttaacatatcatatgtatgcagatcccaattttgttcgtacttttcttaccacatatcgttcattttgtaaaccacaggaattgctgagcttactgattgaacggtttgaaattccagagccagaacctactgacgcagacaaattggcaatagagaaaggcgagcagccaatcagtgcagaccttaaaagatttcgcaaggaatatgtccaaccagtacaacttaggatcttaaatgtatttcggcattgggttgaacatcatttttatgactttgaaagagacttggaattgcttgaaagactagaatccttcatttcaagtgtaagagggaaagctatgaaaaaatgggtagagtcaattgctaagatcatcaggaggaagaagcaagctcaggcaaatggagtaagccataatattacctttgaaagtccacctccaccaattgaatggcatatcagcaaaccaggacagtttgaaacatttgatctcatgacacttcatccaatagaaattgcacgtcagctgacacttttggagtctgatctttacaggaaagttcaaccgtctgaacttgtagggagtgtgtggaccaaagaagataaagaaataaattctccaaatttattaaaaatgattcgccataccacaaatctcaccctctggtttgaaaaatgcattgtggaagcagaaaattttgaagaacgggtggcagtactaagtagaattatagaaattctgcaagtttttcaagatttgaataatttcaatggcgtattggagatagtcagtgcagtaaattcagtgtcagtatacagactagaccatacctttgaggcactgcaggaaaggaaaaggaaaattttggacgaagctgtggaattaagtcaagatcactttaaaaaatacctagtaaaacttaagtcaatcaatccaccttgtgtgcctttttttggaatatatttaacaaatattctgaagaccgaagaagggaataatgattttttaaaaaagaaagggaaagatttaatcaatttcagtaagaggaggaaagtagctgaaattactggagaaattcagcagtatcagaatcagccttactgtttacggatagaaccagatatgaggagattctttgaaaaccttaaccccatgggaagtgcatctgaaaaagagtttacagattatttgttcaacaagtcactagaaattgaacctcgaaactgcaaacagccacctcgatttcctaggaaatcaactttttccttaaaatctcctggaataaggcctaacacaggccgacatggctctacctcaggtactttacgaggtcacccaacaccattagaaagagaaccatgtaaaataagctttagtcggattgctgaaactgagctggaatcaacagtgtcagcaccaacctctccaaatacaccatctactccaccagtatctgcttcttcagaccttagtgtatttttagatgtggatctcaacagctcctgtggcagcaatagcatctttgctccagtgcttttgccacattcaaagtctttctttagttcatgtggtagtttacataaactaagtgaagagcccctgattcctcctcctcttcctcctcgaaaaaagtttgatcatgatgcttcaaattccaagggaaatatgaaatctgatgatgatcctcctgctattccaccgagacagcctcctcctccaaaggtaaaacccagagttcctgttcctactggtgcatttgatgggcctctgcatagtccacctccgccaccaccaagagatcctcttcctgatacccctccaccagttccccttcggcctccagaacactttataaactgtccatttaatcttcagccacctccactggggcatcttcacagagattcagactggctcagagacattagtacgtgtccaaattcgccaagcactcctcctagcacaccctctccaagggtaccgcgtcgatgctatgtgctcagttctagtcagaataatcttgctcatcctccagctccccctgttccaccaaggcagaattcaagccctcatctgccaaaactgccaccaaagacttacaaacgggagctttcgcaccccccattgtacagactgcctttgctagaaaatgcagaaactccccaatgaccttagccatatgtagtcattgacactggaatggtatttgtaaagttttttttttaatttattcaaaaaaagacatagtattttagtactttttacaaataatgctcttacaaaaatgctactgatcaaataagcttttaagaattggaaaaataaaaatacaaaagtccttcaccattatcctcaggtgatcagtagcattgccttgtcttggatcctcagtgctgccaaaaggccagtataaagaatttatatttgcactgtaaactctgcaaaaatatggtttaaagtgacatgattgcactgaaaagggatagtgcttttgtgaaatttttcaaatttgagtaatagatgcctttttaaggcagtgaatttacacaaatatgggaggggtatatggtgttactgatttttaaacctctttgaccatcttctagtttttacttctagtttttacatctaggagaattgtgaataacaccaactgttcttaaactctttaatgccatgtcttaaatgccggtatttgctgctgaagacaaaaatgaaaagtaggatgaaaataatagaatggcactgtaagtgtttattattttgtcaaaatgtaaacaaagactacataacccaatgatggagggaaaaagggcatgtatctcattcagatgtgccttttgtttttgcagactatgacgtctttagctaatgaattgcctattgttatggaaaacagttaatatgccatgtatgtacagttttgtttatattgtatatttaaagatactgctaataacctatataaatttaagtgacttgaggcctataatacaatctgctactttactaattcataaattcaaaaaaaattctatggcataggaaccaactgccttgccttcaagacctagtaactttctctataaatctcgtgttaactgaaattttttttaaatatattttttagattggtaatatttaaaccagcaaatacttaaagctttattaaacattttaatcagataagtgagtaaagcttttatttgccatttggatgccttcgttcaaagtgatagagtgttttgctgatagtgctgtagcagcagttgtaaagtagccaaaagccacgttgtttatttactggtttgtggccttttactgtgctttgtatcagagttcttaacaagattaataaatcaccccagtcttaatttttaaaagacttttaaaatatgtgttttcattataaggaacaaagggggagattgttgagtcctatagacacacacacacacacacacaattttttcttcactgttaaatgtgagctgcaggcttctagcaaccacttttatgaattcatacaaaaaactaggagcatactaggaacttgaaaaggaagattgtaagattatagccatctttggtaggatcttggaagctgattgcatttaagccttgtaactactatgtaaatcaagtgtccaacttggtaaactctgaggttggctttgttttttaaagagcagattataatagttttgtctgggaaagtgatttaaacggcctcttcgttaagccaaacgtgtgatttagggtagagggaggctgccaagcgcgtcgggtaagcaggggccccacgctcggccccgcccaggtaacgctgccttccgggctttgttaactcgcgcgcgctgcgtcgccaactcagcggcgggcagggggcggagccgcagggcggggcggtgcgcgttgatgtgacgtccctgcgcgcgccgctttctgttgccgggcgcaatggcggatacgctggagtcctcgctggaggacccactgcggagctttgtgcgagttttggagaagcgggatggtacagtgctacgactacagcagtatagctccggtggcgtgggttgcgttgtgtgggacgctgccattgtcctttctaaatacctggaaacgcccgagttttctggcgacggggcccacgcgctgagccggcggtcggtgctggagctgggttcgggcaccggggccgtggggctcatggctgctaccctcgggtaagagctggcgggcgggcgggatgtgggggcgccttcttgctggggaaatccggattacaggctttcccccctgtgcctacacctcagtcgacgttattttatagggctgatgttgtagtcaccgatcttgaggaattgcaagacttgctgaagatgaatattaatatgaacaagcatcttgtcactggttctgttcaagccaaggggggaagaaatagaaggctttccttctccacccgacttcatactgatggccgactgcatatactatgaagagtctttggagccattgctgaaaactctaaaagatatcagcggatttgaaacttgtattatatgttgttatgaacaacgaacaatggggaaaaatccagaaattgagaaaaaatattttgagctccttcagctagattttgactttgaaaaaattcctttggaaaaacatgatgaagagtatcgaagtgaagatattcatattatatacatcagaaagaaaaaatcgaaatttccatcgtgaagcctttaatcatcttacccaaggctctaacaacctgggtaaactaaagatgtgaatagagcatgtgaatacagcatgggaagattgtgttcacagatttttttttccggcacgtccttagagatccgatgtatagatgatgaccaccaggggctgtctgcaatacgaaaaattcctgcttgcctgcctgcctgccaatggccctgaatccagcttaggttacttagttcagcatcaagttcttcttaaatgttgggaatcagttattcaaataaaaattggtattgaggcgaggctgaaatctgccaaaaacagccaacatgatttgactggaccttttacaggaagctagagataaatttctgaagagaactatctgctattatataataatgttttaaattcaaactagtaaattttagtttgtcttcagagtttaaaaggttttcattttgtacataattatacaatatttatcatttgtattttccacttcatttcttttaaaatatctttaatactgaaatgttcttttaattttaaaaagaactgagatattgtcttgtatacttatattggccaaagttttcttttcctccaccatacatatctatgtgatttaatcagtaaattgtactgtaatgagttgctaagaagacaaatcagaagattggaggaacaaaagatatctttacagatttttcatttgagcatggagtgagaatagaaagaccagtttcaggcttatgcacttacgtggctcatgcactttatgtatatgttccaggaaaatctggcttaaaaatactggtattgtttacatgaagcagtgaaaggtttttgaataactacaaatgtagttctatatgtatataccaaatgaatttctgttctgtgtctctctgttttatgttatgaagccattcgctcatatacaataatctgtcaaggactttaatcatacttgttccaaagagtagtaaccggatggaattctggtatttacaggcattggtgctagatggtacattttatgtgttaaaataaacattgtttttgaga

SEQ ID NO: 321035 - DNA, 8026 bp, Homo sapiens
cactctgcgctgctgctaaaggggcagcaacggcggccagcgctgtgcgcgccatagcgaggctcgctcgcccgacgcgcactccgggtcggtccccagagctctgtggaggtgactcgagtgggcagggccgggcggcgctgtcggctgggagggcggggaggaggcgatgaggagacgagcagccgccgccgccgccgccgctgctcaccgcccgccgcggccgtagcgggagtcggggcggggctgggccagctgtacccctgacgggccgcgaacccagacaaaggaggaggagccgccccagaagcgggccagcgccgccgggaaaggaggtcgccgcccggggtcgcccgggcttgcgggtcgccgcgcttcctctgcgggcgctgcgggaggcgagggccgcctcggcggaggaagccgaccccggggtctccgccagcccgccggcgccgcctccgagccgcctcggccgtagcctcggcccgggcgggaggcggcggccgccggcgaggcgaggcggcccgcgccctgcctgtcaggccaccggcccggcccgcgggctgcccccgatgcggaggcgctgtcgccggggccatgcagcaggcgccgcagccttacgagttcttcagcgaggagaacagtccgaaatggcggggactgttggtctcggccctgcggaaggttcaggaacaagtgcatcccactctctcagctaatgaagagtctctctattatattgaagagctgatttttcagctgcttaataaattatgcatggcccagccaaggactgttcaagatgtagaggagcgagttcagaagacctttcctcacccaattgataaatgggccattgctgatgcacaatctgctatagaaaaacgaaaacgaagaaatcctcttttactgcctgtggacaaaatccatccttcgttgaaggaagtattagggtacaaagtggactaccatgtatccctatatattgtggctgtactagagtatatctcagctgatattttaaaattggctggtaattatgtttttaatatccggcattatgaaatatctcagcaggacattaaagtgtcaatgtgtgcggataaggttttgatggacatgtttgatcaggatgacataggtttggtttctctctgtgaagatgaacctagttcttctggtgaattaaactactatgatcttgtcagaactgaaatcgcagaagaaagacagtatctacgggaattaaatatgatcataaaagtgtttcgagaagcctttctttctgatagaaagctgtttaaaccttctgatatcgaaaagatttttagtaacatttcagatatacatgaattgactgtgaaacttttaggtttgattgaagacacagttgaaatgactgatgaaagcagtcctcatcccttagctggcagctgttttgaagatttggcagaagagcaagcatttgatccttatgaaacattatcacaggacattctttcaccagagtttcatgaacatttcaataaattgatggccagacctgcagttgctctacactttcagtccattgctgatggttttaaagaggcagttcgttatgtccttccacgtcttatgctggtgccagtgtatcactgttggcactactttgagttactaaagcaattgaaagcatgtagtgaagaacaagaagacagagaatgtttgaaccaagctattactgctctcatgaatctccaaggtagcatggaccgaatttacaagcagtattcacctagacgtcgacctggagatcctgtttgccctttttatagtcaccaattaagaagcaaacacctggctatcaaaaaaatgaatgaaattcagaaaaatatcgatggatgggaaggcaaagatattggacagtgttgtaatgaattcattatggagggaccattgacaagaatcggtgccaaacatgaacggcatatttttctgtttgatggcttaatgatcagttgtaaacctaatcatggccagactcggcttccaggttacagtagtgcagaatacaggttaaaagaaaaatttgtcatgaggaaaatacaaatttgtgataaagaagatacttgtgagcacaagcatgcatttgaattagtatccaaagatgagaacagcataatatttgctgctaagtctgctgaagaaaaaaacaactggatggcagcccttatttctcttcattatcgtagtactctagatcgaatgttagattcagtattattgaaagaagaaaatgagcaaccactgagattaccaagtcctgaagtatatcgttttgtagtaaaagactctgaggaaaacattgtttttgaagacaacttgcaaagtagaagtggcatccccattattaaaggaggaactgtagtgaaattaattgaaaggttaacatatcatatgtatgcagatcccaattttgttcgtacttttcttaccacatatcgttcattttgtaaaccacaggaattgctgagcttactgattgaacggtttgaaattccagagccagaacctactgacgcagacaaattggcaatagagaaaggcgagcagccaatcagtgcagaccttaaaagatttcgcaaggaatatgtccaaccagtacaacttaggatcttaaatgtatttcggcattgggttgaacatcatttttatgactttgaaagagacttggaattgcttgaaagactagaatccttcatttcaagtgtaagagggaaagctatgaaaaaatgggtagagtcaattgctaagatcatcaggaggaagaagcaagctcaggcaaatggagtaagccataatattacctttgaaagtccacctccaccaattgaatggcatatcagcaaaccaggacagtttgaaacatttgatctcatgacacttcatccaatagaaattgcacgtcagctgacacttttggagtctgatctttacaggaaagttcaaccgtctgaacttgtagggagtgtgtggaccaaagaagataaagaaataaattctccaaatttattaaaaatgattcgccataccacaaatctcaccctctggtttgaaaaatgcattgtggaagcagaaaattttgaagaacgggtggcagtactaagtagaattatagaaattctgcaagtttttcaagatttgaataatttcaatggcgtattggagatagtcagtgcagtaaattcagtgtcagtatacagactagaccatacctttgaggcactgcaggaaaggaaaaggaaaattttggacgaagctgtggaattaagtcaagatcactttaaaaaatacctagtaaaacttaagtcaatcaatccaccttgtgtgcctttttttggaatatatttaacaaatattctgaagaccgaagaagggaataatgattttttaaaaaagaaagggaaagatttaatcaatttcagtaagaggaggaaagtagctgaaattactggagaaattcagcagtatcagaatcagccttactgtttacggatagaaccagatatgaggagattctttgaaaaccttaaccccatgggaagtgcatctgaaaaagagtttacagattatttgttcaacaagtcactagaaattgaacctcgaaactgcaaacagccacctcgatttcctaggaaatcaactttttccttaaaatctcctggaataaggcctaacacaggccgacatggctctacctcaggtactttacgaggtcacccaacaccattagaaagagaaccatgtaaaataagctttagtcggattgctgaaactgagctggaatcaacagtgtcagcaccaacctctccaaatacaccatctactccaccagtatctgcttcttcagaccttagtgtatttttagatgtggatctcaacagctcctgtggcagcaatagcatctttgctccagtgcttttgccacattcaaagtctttctttagttcatgtggtagtttacataaactaagtgaagagcccctgattcctcctcctcttcctcctcgaaaaaagtttgatcatgatgcttcaaattccaagggaaatatgaaatctgatgatgatcctcctgctattccaccgagacagcctcctcctccaaaggtaaaacccagagttcctgttcctactggtgcatttgatgggcctctgcatagtccacctccgccaccaccaagagatcctcttcctgatacccctccaccagttccccttcggcctccagaacactttataaactgtccatttaatcttcagccacctccactggggcatcttcacagagattcagactggctcagagacattagtacgtgtccaaattcgccaagcactcctcctagcacaccctctccaagggtaccgcgtcgatgctatgtgctcagttctagtcagaataatcttgctcatcctccagctccccctgttccaccaaggcagaattcaagccctcatctgccaaaactgccaccaaagacttacaaacgggagctttcgcaccccccattgtacagactgcctttgctagaaaatgcagaaactccccaatgaccttagccatatgtagtcattgacactggaatggtatttgtaaagttttttttttaatttattcaaaaaaagacatagtattttagtactttttacaaataatgctcttacaaaaatgctactgatcaaataagcttttaagaattggaaaaataaaaatacaaaagtccttcaccattatcctcaggtgatcagtagcattgccttgtcttggatcctcagtgctgccaaaaggccagtataaagaatttatatttgcactgtaaactctgcaaaaatatggtttaaagtgacatgattgcactgaaaagggatagtgcttttgtgaaatttttcaaatttgagtaatagatgcctttttaaggcagtgaatttacacaaatatgggaggggtatatggtgttactgatttttaaacctctttgaccatcttctagtttttacttctagtttttacatctaggagaattgtgaataacaccaactgttcttaaactctttaatgccatgtcttaaatgccggtatttgctgctgaagacaaaaatgaaaagtaggatgaaaataatagaatggcactgtaagtgtttattattttgtcaaaatgtaaacaaagactacataacccaatgatggagggaaaaagggcatgtatctcattcagatgtgccttttgtttttgcagactatgacgtctttagctaatgaattgcctattgttatggaaaacagttaatatgccatgtatgtacagttttgtttatattgtatatttaaagatactgctaataacctatataaatttaagtgacttgaggcctataatacaatctgctactttactaattcataaattcaaaaaaaattctatggcataggaaccaactgccttgccttcaagacctagtaactttctctataaatctcgtgttaactgaaattttttttaaatatattttttagattggtaatatttaaaccagcaaatacttaaagctttattaaacattttaatcagataagtgagtaaagcttttatttgccatttggatgccttcgttcaaagtgatagagtgttttgctgatagtgctgtagcagcagttgtaaagtagccaaaagccacgttgtttatttactggtttgtggccttttactgtgctttgtatcagagttcttaacaagattaataaatcaccccagtcttaatttttaaaagacttttaaaatatgtgttttcattataaggaacaaagggggagattgttgagtcctatagacacacacacacacacacacaattttttcttcactgttaaatgtgagctgcaggcttctagcaaccacttttatgaattcatacaaaaaactaggagcatactaggaacttgaaaaggaagattgtaagattatagccatctttggtaggatcttggaagctgattgcatttaagccttgtaactactatgtaaatcaagtgtccaacttggtaaactctgaggttggctttgttttttaaagagcagattataatagttttgtctgggaaagtgatttaaacggcctcttcgttaagccaaacgtgtgatttagggtagagggaggctgccaagcgcgtcgggtaagcaggggccccacgctcggccccgcccaggtaacgctgccttccgggctttgttaactcgcgcgcgctgcgtcgccaactcagcggcgggcagggggcggagccgcagggcggggcggtgcgcgttgatgtgacgtccctgcgcgcgccgctttctgttgccgggcgcaatggcggatacgctggagtcctcgctggaggacccactgcggagctttgtgcgagttttggagaagcgggatggtacagtgctacgactacagcagtatagctccggtggcgtgggttgcgttgtgtgggacgctgccattgtcctttctaaatacctggaaacgcccgagttttctggcgacggggcccacgcgctgagccggcggtcggtgctggagctgggttcgggcaccggggccgtggggctcatggctgctaccctcggggctgatgttgtagtcaccgatcttgaggaattgcaagacttgctgaagatgaatattaatatgaacaagcatcttgtcactggttctgttcaagccaaggggggaagaaatagaaggctttccttctccacccgacttcatactgatggccgactgcatatactatgaagagtctttggagccattgctgaaaactctaaaagatatcagcggatttgaaacttgtattatatgttgttatgaacaacgaacaatggggaaaaatccagaaattgagaaaaaatattttgagaaatttccatcgtgaagcctttaatcatcttacccaaggctctaacaacctgggtaaactaaagatgtgaatagagcatgtgaatacagcatgggaagattgtgttcacagatttttttttccggcacgtccttagagatccgatgtatagatgatgaccaccaggggctgtctgcaatacgaaaaattcctgcttgcctgcctgcctgccaatggccctgaatccagcttaggttacttagttcagcatcaagttcttcttaaatgttgggaatcagttattcaaataaaaattggtattgaggcgaggctgaaatctgccaaaaacagccaacatgatttgactggaccttttacaggaagctagagataaatttctgaagagaactatctgctattatataataatgttttaaattcaaactagtaaattttagtttgtcttcagagtttaaaaggttttcattttgtacataattatacaatatttatcatttgtattttccacttcatttcttttaaaatatctttaatactgaaatgttcttttaattttaaaaagaactgagatattgtcttgtatacttatattggccaaagttttcttttcctccaccatacatatctatgtgatttaatcagtaaattgtactgtaatgagttgctaagaagacaaatcagaagattggaggaacaaaagatatctttacagatttttcatttgagcatggagtgagaatagaaagaccagtttcaggcttatgcacttacgtggctcatgcactttatgtatatgttccaggaaaatctggcttaaaaatactggtattgtttacatgaagcagtgaaaggtttttgaataactacaaatgtagttctatatgtatataccaaatgaatttctgttctgtgtctctctgttttatgttatgaagccattcgctcatatacaataatctgtcaaggactttaatcatacttgttccaaagagtagtaaccggatggaattctggtatttacaggcattggtgctagatggtacattttatgtgttaaaataaacattgtttttgaga

SEQ ID NO: 321036 - DNA, 4276 bp, Homo sapiens
acaaagcaagataaagagttaggacctaagacttaaattaaaacatctcatatataaaaatattaaacccagccctgaattaatctaggagtactcataatctgataattaacccagattagtttattttgagcctctgaatttaacttgacaagtaagaatttttcagacttaaaaatttttttttttaatttttcagaatagaggtataatttaattacttttttttttgagggaaatatgaaatctgatgatgatcctcctgctattccaccgagacagcctcctcctccaaaggtaaaacccagagttcctgttcctactggtgcatttgatgggcctctgcatagtccacctccgccaccaccaagagatcctcttcctgatacccctccaccagttccccttcggcctccagaacactttataaactgtccatttaatcttcagccacctccactggggcatcttcacagagattcagactggctcagagacattagtacgtgtccaaattcgccaagcactcctcctagcacaccctctccaagggtaccgcgtcgatgctatgtgctcagttctagtcagaataatcttgctcatcctccagctccccctgttccaccaaggcagaattcaagccctcatctgccaaaactgccaccaaagacttacaaacgggagctttcgcaccccccattgtacagactgcctttgctagaaaatgcagaaactccccaatgaccttagccatatgtagtcattgacactggaatggtatttgtaaagttttttttttaatttattcaaaaaaagacatagtattttagtactttttacaaataatgctcttacaaaaatgctactgatcaaataagcttttaagaattggaaaaataaaaatacaaaagtccttcaccattatcctcaggtgatcagtagcattgccttgtcttggatcctcagtgctgccaaaaggccagtataaagaatttatatttgcactgtaaactctgcaaaaatatggtttaaagtgacatgattgcactgaaaagggatagtgcttttgtgaaatttttcaaatttgagtaatagatgcctttttaaggcagtgaatttacacaaatatgggaggggtatatggtgttactgatttttaaacctctttgaccatcttctagtttttacttctagtttttacatctaggagaattgtgaataacaccaactgttcttaaactctttaatgccatgtcttaaatgccggtatttgctgctgaagacaaaaatgaaaagtaggatgaaaataatagaatggcactgtaagtgtttattattttgtcaaaatgtaaacaaagactacataacccaatgatggagggaaaaagggcatgtatctcattcagatgtgccttttgtttttgcagactatgacgtctttagctaatgaattgcctattgttatggaaaacagttaatatgccatgtatgtacagttttgtttatattgtatatttaaagatactgctaataacctatataaatttaagtgacttgaggcctataatacaatctgctactttactaattcataaattcaaaaaaaattctatggcataggaaccaactgccttgccttcaagacctagtaactttctctataaatctcgtgttaactgaaattttttttaaatatattttttagattggtaatatttaaaccagcaaatacttaaagctttattaaacattttaatcagataagtgagtaaagcttttatttgccatttggatgccttcgttcaaagtgatagagtgttttgctgatagtgctgtagcagcagttgtaaagtagccaaaagccacgttgtttatttactggtttgtggccttttactgtgctttgtatcagagttcttaacaagattaataaatcaccccagtcttaatttttaaaagacttttaaaatatgtgttttcattataaggaacaaagggggagattgttgagtcctatagacacacacacacacacacacaattttttcttcactgttaaatgtgagctgcaggcttctagcaaccacttttatgaattcatacaaaaaactaggagcatactaggaacttgaaaaggaagattgtaagattatagccatctttggtaggatcttggaagctgattgcatttaagccttgtaactactatgtaaatcaagtgtccaacttggtaaactctgaggttggctttgttttttaaagagcagattataatagttttgtctgggaaagtgatttaaacggcctcttcgttaagccaaacgtgtgatttagggtagagggaggctgccaagcgcgtcgggtaagcaggggccccacgctcggccccgcccaggtaacgctgccttccgggctttgttaactcgcgcgcgctgcgtcgccaactcagcggcgggcagggggcggagccgcagggcggggcggtgcgcgttgatgtgacgtccctgcgcgcgccgctttctgttgccgggcgcaatggcggatacgctggagtcctcgctggaggacccactgcggagctttgtgcgagttttggagaagcgggatggtacagtgctacgactacagcagtatagctccggtggcgtgggttgcgttgtgtgggacgctgccattgtcctttctaaatacctggaaacgcccgagttttctggcgacggggcccacgcgctgagccggcggtcggtgctggagctgggttcgggcaccggggccgtggggctcatggctgctaccctcggggctgatgttgtagtcaccgatcttgaggaattgcaagacttgctgaagatgaatattaatatgaacaagcatcttgtcactggttctgttcaagccaaggggggaagaaatagaaggctttccttctccacccgacttcatactgatggccgactgcatatactatgaagagtctttggagccattgctgaaaactctaaaagatatcagcggatttgaaacttgtattatatgttgttatgaacaacgaacaatggggaaaaatccagaaattgagaaaaaatattttgagctccttcagctagattttgactttgaaaaaattcctttggaaaaacatgatgaagagtatcgaagtgaagatattcatattatatacatcagaaagaaaaaatcgaaatttccatcgtgaagcctttaatcatcttacccaaggctctaacaacctgggtaaactaaagatgtgaatagagcatgtgaatacagcatgggaagattgtgttcacagatttttttttccggcacgtccttagagatccgatgtatagatgatgaccaccaggggctgtctgcaatacgaaaaattcctgcttgcctgcctgcctgccaatggccctgaatccagcttaggttacttagttcagcatcaagttcttcttaaatgttgggaatcagttattcaaataaaaattggtattgaggcgaggctgaaatctgccaaaaacagccaacatgatttgactggaccttttacaggaagctagagataaatttctgaagagaactatctgctattatataataatgttttaaattcaaactagtaaattttagtttgtcttcagagtttaaaaggttttcattttgtacataattatacaatatttatcatttgtattttccacttcatttcttttaaaatatctttaatactgaaatgttcttttaattttaaaaagaactgagatattgtcttgtatacttatattggccaaagttttcttttcctccaccatacatatctatgtgatttaatcagtaaattgtactgtaatgagttgctaagaagacaaatcagaagattggaggaacaaaagatatctttacagatttttcatttgagcatggagtgagaatagaaagaccagtttcaggcttatgcacttacgtggctcatgcactttatgtatatgttccaggaaaatctggcttaaaaatactggtattgtttacatgaagcagtgaaaggtttttgaataactacaaatgtagttctatatgtatataccaaatgaatttctgttctgtgtctctctgttttatgttatgaagccattcgctcatatacaataatctgtcaaggactttaatcatacttgttccaaagagtagtaaccggatggaattctggtatttacaggcattggtgctagatggtacattttatgtgttaaaataaacattgtttttgaga

SEQ ID NO: 321037 - DNA, 7398 bp, Homo sapiens
cactctgcgctgctgctaaaggggcagcaacggcggccagcgctgtgcgcgccatagcgaggctcgctcgcccgacgcgcactccgggtcggtccccagagctctgtggaggtgactcgagtgggcagggccgggcggcgctgtcggctgggagggcggggaggaggcgatgaggagacgagcagccgccgccgccgccgccgctgctcaccgcccgccgcggccgtagcgggagtcggggcggggctgggccagctgtacccctgacgggccgcgaacccagacaaaggaggaggagccgccccagaagcgggccagcgccgccgggaaaggaggtcgccgcccggggtcgcccgggcttgcgggtcgccgcgcttcctctgcgggcgctgcgggaggcgagggccgcctcggcggaggaagccgaccccggggtctccgccagcccgccggcgccgcctccgagccgcctcggccgtagcctcggcccgggcgggaggcggcggccgccggcgaggcgaggcggcccgcgccctgcctgtcaggccaccggcccggcccgcgggctgcccccgatgcggaggcgctgtcgccggggccatgcagcaggcgccgcagccttacgagttcttcagcgaggagaacagtccgaaatggcggggactgttggtctcggccctgcggaaggttcaggaacaagtgcatcccactctctcagctaatgaagagtctctctattatattgaagagctgatttttcagctgcttaataaattatgcatggcccagccaaggactgttcaagatgtagaggagcgagttcagaagacctttcctcacccaattgataaatgggccattgctgatgcacaatctgctatagaaaaacgaaaacgaagaaatcctcttttactgcctgtggacaaaatccatccttcgttgaaggaagtattagggtacaaagtggactaccatgtatccctatatattgtggctgtactagagtatatctcagctgatattttaaaattggctggtaattatgtttttaatatccggcattatgaaatatctcagcaggacattaaagtgtcaatgtgtgcggataaggttttgatggacatgtttgatcaggatgacataggtttggtttctctctgtgaagatgaacctagttcttctggtgaattaaactactatgatcttgtcagaactgaaatcgcagaagaaagacagtatctacgggaattaaatatgatcataaaagtgtttcgagaagcctttctttctgatagaaagctgtttaaaccttctgatatcgaaaagatttttagtaacatttcagatatacatgaattgactgtgaaacttttaggtttgattgaagacacagttgaaatgactgatgaaagcagtcctcatcccttagctggcagctgttttgaagatttggcagaagagcaagcatttgatccttatgaaacattatcacaggacattctttcaccagagtttcatgaacatttcaataaattgatggccagacctgcagttgctctacactttcagtccattgctgatggttttaaagaggcagttcgttatgtccttccacgtcttatgctggtgccagtgtatcactgttggcactactttgagttactaaagcaattgaaagcatgtagtgaagaacaagaagacagagaatgtttgaaccaagctattactgctctcatgaatctccaaggtagcatggaccgaatttacaagcagtattcacctagacgtcgacctggagatcctgtttgccctttttatagtcaccaattaagaagcaaacacctggctatcaaaaaaatgaatgaaattcagaaaaatatcgatggatgggaaggcaaagatattggacagtgttgtaatgaattcattatggagggaccattgacaagaatcggtgccaaacatgaacggcatatttttctgtttgatggcttaatgatcagttgtaaacctaatcatggccagactcggcttccaggttacagtagtgcagaatacaggttaaaagaaaaatttgtcatgaggaaaatacaaatttgtgataaagaagatacttgtgagcacaagcatgcatttgaattagtatccaaagatgagaacagcataatatttgctgctaagtctgctgaagaaaaaaacaactggatggcagcccttatttctcttcattatcgtagtactctagatcgaatgttagattcagtattattgaaagaagaaaatgagcaaccactgagattaccaagtcctgaagtatatcgttttgtagtaaaagactctgaggaaaacattgtttttgaagacaacttgcaaagtagaagtggcatccccattattaaaggaggaactgtagtgaaattaattgaaaggttaacatatcatatgtatgcagatcccaattttgttcgtacttttcttaccacatatcgttcattttgtaaaccacaggaattgctgagcttactgattgaacggtttgaaattccagagccagaacctactgacgcagacaaattggcaatagagaaaggcgagcagccaatcagtgcagaccttaaaagatttcgcaaggaatatgtccaaccagtacaacttaggatcttaaatgtatttcggcattgggttgaacatcatttttatgactttgaaagagacttggaattgcttgaaagactagaatccttcatttcaagtgtaagagggaaagctatgaaaaaatgggtagagtcaattgctaagatcatcaggaggaagaagcaagctcaggcaaatggagtaagccataatattacctttgaaagtccacctccaccaattgaatggcatatcagcaaaccaggacagtttgaaacatttgatctcatgacacttcatccaatagaaattgcacgtcagctgacacttttggagtctgatctttacaggaaagttcaaccgtctgaacttgtagggagtgtgtggaccaaagaagataaagaaataaattctccaaatttattaaaaatgattcgccataccacaaatctcaccctctggtttgaaaaatgcattgtggaagcagaaaattttgaagaacgggtggcagtactaagtagaattatagaaattctgcaagtttttcaagatttgaataatttcaatggcgtattggagatagtcagtgcagtaaattcagtgtcagtatacagactagaccatacctttgaggcactgcaggaaaggaaaaggaaaattttggacgaagctgtggaattaagtcaagatcactttaaaaaatacctagtaaaacttaagtcaatcaatccaccttgtgtgcctttttttggaatatatttaacaaatattctgaagaccgaagaagggaataatgattttttaaaaaagaaagggaaagatttaatcaatttcagtaagaggaggaaagtagctgaaattactggagaaattcagcagtatcagaatcagccttactgtttacggatagaaccagatatgaggagattctttgaaaaccttaaccccatgggaagtgcatctgaaaaagagtttacagattatttgttcaacaagtcactagaaattgaacctcgaaactgcaaacagccacctcgatttcctaggaaatcaactttttccttaaaatctcctggaataaggcctaacacaggccgacatggctctacctcaggtactttacgaggtcacccaacaccattagaaagagaaccatgtaaaataagctttagtcggattgctgaaactgagctggaatcaacagtgtcagcaccaacctctccaaatacaccatctactccaccagtatctgcttcttcagaccttagtgtatttttagatgtggatctcaacagctcctgtggcagcaatagcatctttgctccagtgcttttgccacattcaaagtctttctttagttcatgtggtagtttacataaactaagtgaagagcccctgattcctcctcctcttcctcctcgaaaaaagtttgatcatgatgcttcaaattccaagggaaatatgaaatctgatgatgatcctcctgctattccaccgagacagcctcctcctccaaaggtaaaacccagagttcctgttcctactggtgcatttgatgggcctctgcatagtccacctccgccaccaccaagagatcctcttcctgatacccctccaccagttccccttcggcctccagaacactttataaactgtccatttaatcttcagccacctccactggggcatcttcacagagattcagactggctcagagacattagtacgtgtccaaattcgccaagcactcctcctagcacaccctctccaagggtaccgcgtcgatgctatgtgctcagttctagtcagaataatcttgctcatcctccagctccccctgttccaccaaggcagaattcaagccctcatctgccaaaactgccaccaaagacttacaaacgggagctttcgcaccccccattgtacagactgcctttgctagaaaatgcagaaactccccaatgaccttagccatatgtagtcattgacactggaatggtatttgtaaagttttttttttaatttattcaaaaaaagacatagtattttagtactttttacaaataatgctcttacaaaaatgctactgatcaaataagcttttaagaattggaaaaataaaaatacaaaagtccttcaccattatcctcaggtgatcagtagcattgccttgtcttggatcctcagtgctgccaaaaggccagtataaagaatttatatttgcactgtaaactctgcaaaaatatggtttaaagtgacatgattgcactgaaaagggatagtgcttttgtgaaatttttcaaatttgagtaatagatgcctttttaaggcagtgaatttacacaaatatgggaggggtatatggtgttactgatttttaaacctctttgaccatcttctagtttttacttctagtttttacatctaggagaattgtgaataacaccaactgttcttaaactctttaatgccatgtcttaaatgccggtatttgctgctgaagacaaaaatgaaaagtaggatgaaaataatagaatggcactgtaagtgtttattattttgtcaaaatgtaaacaaagactacataacccaatgatggagggaaaaagggcatgtatctcattcagatgtgccttttgtttttgcagactatgacgtctttagctaatgaattgcctattgttatggaaaacagttaatatgccatgtatgtacagttttgtttatattgtatatttaaagatactgctaataacctatataaatttaagtgacttgaggcctataatacaatctgctactttactaattcataaattcaaaaaaaattctatggcataggaaccaactgccttgccttcaagacctagtaactttctctataaatctcgtgttaactgaaattttttttaaatatattttttagattggtaatatttaaaccagcaaatacttaaagctttattaaacattttaatcagataagtgagtaaagcttttatttgccatttggatgccttcgttcaaagtgatagagtgttttgctgatagtgctgtagcagcagttgtaaagtagccaaaagccacgttgtttatttactggtttgtggccttttactgtgctttgtatcagagttcttaacaagattaataaatcaccccagtcttaatttttaaaagacttttaaaatatgtgttttcattataaggaacaaagggggagattgttgagtcctatagacacacacacacacacacacaattttttcttcactgttaaatgtgagctgcaggcttctagcaaccacttttatgaattcatacaaaaaactaggagcatactaggaacttgaaaaggaagattgtaagattatagccatctttggtaggatcttggaagctgattgcatttaagccttgtaactactatgtaaatcaagtgtccaacttggtaaactctgaggttggctttgttttttaaagagcagattataatagttttgtctgggaaagtgatttaaacggcctcttcgttaagccaaacgtgtgatttagggtagagggaggctgccaagcgcgtcgggtaagcaggggccccacgctcggccccgcccaggtaacgctgccttccgggctttgttaactcgcgcgcgctgcgtcgccaactcagcggcgggcagggggcggagccgcagggcggggcggtgcgcgttgatgtgacgtccctgcgcgcgccgctttctgttgccgggcgcaatggcggatacgctggagtcctcgctggaggacccactgcggagctttgtgcgagttttggagaagcgggatggtacagtgctacgactacagcagtatagctccggtggcgtgggttgcgttgtgtgggacgctgccattgtcctttctaaatacctggaaacgcccgagttttctggcgacggggcccacgcgctgagccggcggtcggtgctggagctgggttcgggcaccggggccgtggggctcatggctgctaccctcgggtaagagctggcgggcgggcgggatgtgggggcgccttcttgctggggaaatccggattacaggctttcccccctgtgcctacacctcagtcgacgttattttatagggctgatgttgtagtcaccgatcttgaggaattgcaagacttgctgaagatgaatattaatatgaacaagcatcttgtcactggttctgttcaagccaaggggggaagaaatagaaggctttccttctccacccgacttcatactgatggccgactgcatatactatgaagagtctttggagccattgctgaaaactctaaaagatatcagcggatttgaaacttgtattatatgttgttatgaacaacgaacaatggggaaaaatccagaaattgagaaaaaatattttgaggaggtaagtattaagtactctattatctttgtagtgatttcccttcaggggggctgtatgtgactcttcaagtatattatggtaattttgggtggggaaaacatgctgtttgtgtgaagctgaggaaaggatcttcacagcccatgattctacgaagctcccctttttcatcttttctgatactttatttcatttctaattagttgatctatggctacagaagaatgttaatacgggtgccactcctttttaagaacagttttcagtgtttattaaacatgatgctgcctttggggaacatctcaatgatgtatgtattacctttggagaatacgtgataga

SEQ ID NO: 321038 - DNA, 5810 bp, Homo sapiens
cactctgcgctgctgctaaaggggcagcaacggcggccagcgctgtgcgcgccatagcgaggctcgctcgcccgacgcgcactccgggtcggtccccagagctctgtggaggtgactcgagtgggcagggccgggcggcgctgtcggctgggagggcggggaggaggcgatgaggagacgagcagccgccgccgccgccgccgctgctcaccgcccgccgcggccgtagcgggagtcggggcggggctgggccagctgtacccctgacgggccgcgaacccagacaaaggaggaggagccgccccagaagcgggccagcgccgccgggaaaggaggtcgccgcccggggtcgcccgggcttgcgggtcgccgcgcttcctctgcgggcgctgcgggaggcgagggccgcctcggcggaggaagccgaccccggggtctccgccagcccgccggcgccgcctccgagccgcctcggccgtagcctcggcccgggcgggaggcggcggccgccggcgaggcgaggcggcccgcgccctgcctgtcaggccaccggcccggcccgcgggctgcccccgatgcggaggcgctgtcgccggggccatgcagcaggcgccgcagccttacgagttcttcagcgaggagaacagtccgaaatggcggggactgttggtctcggccctgcggaaggttcaggaacaagtgcatcccactctctcagctaatgaagagtctctctattatattgaagagctgatttttcagctgcttaataaattatgcatggcccagccaaggactgttcaagatgtagaggagcgagttcagaagacctttcctcacccaattgataaatgggccattgctgatgcacaatctgctatagaaaaacgaaaacgaagaaatcctcttttactgcctgtggacaaaatccatccttcgttgaaggaagtattagggtacaaagtggactaccatgtatccctatatattgtggctgtactagagtatatctcagctgatattttaaaattggctggtaattatgtttttaatatccggcattatgaaatatctcagcaggacattaaagtgtcaatgtgtgcggataaggttttgatggacatgtttgatcaggatgacataggtttggtttctctctgtgaagatgaacctagttcttctggtgaattaaactactatgatcttgtcagaactgaaatcgcagaagaaagacagtatctacgggaattaaatatgatcataaaagtgtttcgagaagcctttctttctgatagaaagctgtttaaaccttctgatatcgaaaagatttttagtaacatttcagatatacatgaattgactgtgaaacttttaggtttgattgaagacacagttgaaatgactgatgaaagcagtcctcatcccttagctggcagctgttttgaagatttggcagaagagcaagcatttgatccttatgaaacattatcacaggacattctttcaccagagtttcatgaacatttcaataaattgatggccagacctgcagttgctctacactttcagtccattgctgatggttttaaagaggcagttcgttatgtccttccacgtcttatgctggtgccagtgtatcactgttggcactactttgagttactaaagcaattgaaagcatgtagtgaagaacaagaagacagagaatgtttgaaccaagctattactgctctcatgaatctccaaggtagcatggaccgaatttacaagcagtattcacctagacgtcgacctggagatcctgtttgccctttttatagtcaccaattaagaagcaaacacctggctatcaaaaaaatgaatgaaattcagaaaaatatcgatggatgggaaggcaaagatattggacagtgttgtaatgaattcattatggagggaccattgacaagaatcggtgccaaacatgaacggcatatttttctgtttgatggcttaatgatcagttgtaaacctaatcatggccagactcggcttccaggttacagtagtgcagaatacaggttaaaagaaaaatttgtcatgaggaaaatacaaatttgtgataaagaagatacttgtgagcacaagcatgcatttgaattagtatccaaagatgagaacagcataatatttgctgctaagtctgctgaagaaaaaaacaactggatggcagcccttatttctcttcattatcgtagtactctagatcgaatgttagattcagtattattgaaagaagaaaatgagcaaccactgagattaccaagtcctgaagtatatcgttttgtagtaaaagactctgaggaaaacattgtttttgaagacaacttgcaaagtagaagtggcatccccattattaaaggaggaactgtagtgaaattaattgaaaggttaacatatcatatgtatgcagatcccaattttgttcgtacttttcttaccacatatcgttcattttgtaaaccacaggaattgctgagcttactgattgaacggtttgaaattccagagccagaacctactgacgcagacaaattggcaatagagaaaggcgagcagccaatcagtgcagaccttaaaagatttcgcaaggaatatgtccaaccagtacaacttaggatcttaaatgtatttcggcattgggttgaacatcatttttatgactttgaaagagacttggaattgcttgaaagactagaatccttcatttcaagtgtaagagggaaagctatgaaaaaatgggtagagtcaattgctaagatcatcaggaggaagaagcaagctcaggcaaatggagtaagccataatattacctttgaaagtccacctccaccaattgaatggcatatcagcaaaccaggacagtttgaaacatttgatctcatgacacttcatccaatagaaattgcacgtcagctgacacttttggagtctgatctttacaggaaagttcaaccgtctgaacttgtagggagtgtgtggaccaaagaagataaagaaataaattctccaaatttattaaaaatgattcgccataccacaaatctcaccctctggtttgaaaaatgcattgtggaagcagaaaattttgaagaacgggtggcagtactaagtagaattatagaaattctgcaagtttttcaagatttgaataatttcaatggcgtattggagatagtcagtgcagtaaattcagtgtcagtatacagactagaccatacctttgaggcactgcaggaaaggaaaaggaaaattttggacgaagctgtggaattaagtcaagatcactttaaaaaatacctagtaaaacttaagtcaatcaatccaccttgtgtgcctttttttggaatatatttaacaaatattctgaagaccgaagaagggaataatgattttttaaaaaagaaagggaaagatttaatcaatttcagtaagaggaggaaagtagctgaaattactggagaaattcagcagtatcagaatcagccttactgtttacggatagaaccagatatgaggagattctttgaaaaccttaaccccatgggaagtgcatctgaaaaagagtttacagattatttgttcaacaagtcactagaaattgaacctcgaaactgcaaacagccacctcgatttcctaggaaatcaactttttccttaaaatctcctggaataaggcctaacacaggccgacatggctctacctcaggtactttacgaggtcacccaacaccattagaaagagaaccatgtaaaataagctttagtcggattgctgaaactgagctggaatcaacagtgtcagcaccaacctctccaaatacaccatctactccaccagtatctgcttcttcagaccttagtgtatttttagatgtggatctcaacagctcctgtggcagcaatagcatctttgctccagtgcttttgccacattcaaagtctttctttagttcatgtggtagtttacataaactaagtgaagagcccctgattcctcctcctcttcctcctcgaaaaaagtttgatcatgatgcttcaaattccaagggaaatatgaaatctgatgatgatcctcctgctattccaccgagacagcctcctcctccaaaggtaaaacccagagttcctgttcctactggtgcatttgatgggcctctgcatagtccacctccgccaccaccaagagatcctcttcctgatacccctccaccagttccccttcggcctccagaacactttataaactgtccatttaatcttcagccacctccactggggcatcttcacagagattcagactggctcagagacattagtacgtgtccaaattcgccaagcactcctcctagcacaccctctccaagggtaccgcgtcgatgctatgtgctcagttctagtcagaataatcttgctcatcctccagctccccctgttccaccaaggcagaattcaagccctcatctgccaaaactgccaccaaagacttacaaacgggagctttcgcaccccccattgtacagactgcctttgctagaaaatgcagaaactccccaatgaccttagccatatgtagtcattgacactggaatggtatttgtaaagttttttttttaatttattcaaaaaaagacatagtattttagtactttttacaaataatgctcttacaaaaatgctactgatcaaataagcttttaagaattggaaaaataaaaatacaaaagtccttcaccattatcctcaggtgatcagtagcattgccttgtcttggatcctcagtgctgccaaaaggccagtataaagaatttatatttgcactgtaaactctgcaaaaatatggtttaaagtgacatgattgcactgaaaagggatagtgcttttgtgaaatttttcaaatttgagtaatagatgcctttttaaggcagtgaatttacacaaatatgggaggggtatatggtgttactgatttttaaacctctttgaccatcttctagtttttacttctagtttttacatctaggagaattgtgaataacaccaactgttcttaaactctttaatgccatgtcttaaatgccggtatttgctgctgaagacaaaaatgaaaagtaggatgaaaataatagaatggcactgtaagtgtttattattttgtcaaaatgtaaacaaagactacataacccaatgatggagggaaaaagggcatgtatctcattcagatgtgccttttgtttttgcagactatgacgtctttagctaatgaattgcctattgttatggaaaacagttaatatgccatgtatgtacagttttgtttatattgtatatttaaagatactgctaataacctatataaatttaagtgacttgaggcctataatacaatctgctactttactaattcataaattcaaaaaaaattctatggcataggaaccaactgccttgccttcaagacctagtaactttctctataaatctcgtgttaactgaaattttttttaaatatattttttagattggtaatatttaaaccagcaaatacttaaagctttattaaacattttaatcagataagtgagtaaagcttttatttgccatttggatgccttcgttcaaagtgatagagtgttttgctgatagtgctgtagcagcagttgtaaagtagccaaaagccacgttgtttatttactggtttgtggccttttactgtgctttgtatcagagttcttaacaagattaataaatcaccccagtcttaattttta

SEQ ID NO: 321039 - DNA, 5661 bp, Homo sapiens
cactctgcgctgctgctaaaggggcagcaacggcggccagcgctgtgcgcgccatagcgaggctcgctcgcccgacgcgcactccgggtcggtccccagagctctgtggaggtgactcgagtgggcagggccgggcggcgctgtcggctgggagggcggggaggaggcgatgaggagacgagcagccgccgccgccgccgccgctgctcaccgcccgccgcggccgtagcgggagtcggggcggggctgggccagctgtacccctgacgggccgcgaacccagacaaaggaggaggagccgccccagaagcgggccagcgccgccgggaaaggaggtcgccgcccggggtcgcccgggcttgcgggtcgccgcgcttcctctgcgggcgctgcgggaggcgagggccgcctcggcggaggaagccgaccccggggtctccgccagcccgccggcgccgcctccgagccgcctcggccgtagcctcggcccgggcgggaggcggcggccgccggcgaggcgaggcggcccgcgccctgcctgtcaggccaccggcccggcccgcgggctgcccccgatgcggaggcgctgtcgccggggccatgcagcaggcgccgcagccttacgagttcttcagcgaggagaacagtccgaaatggcggggactgttggtctcggccctgcggaaggttcaggaacaagtgcatcccactctctcagctaatgaagagtctctctattatattgaagagctgatttttcagctgcttaataaattatgcatggcccagccaaggactgttcaagatgtagaggagcgagttcagaagacctttcctcacccaattgataaatgggccattgctgatgcacaatctgctatagaaaaacgaaaacgaagaaatcctcttttactgcctgtggacaaaatccatccttcgttgaaggaagtattagggtacaaagtggactaccatgtatccctatatattgtggctgtactagagtatatctcagctgatattttaaaattggctggtaattatgtttttaatatccggcattatgaaatatctcagcaggacattaaagtgtcaatgtgtgcggataaggttttgatggacatgtttgatcaggatgacataggtttggtttctctctgtgaagatgaacctagttcttctggtgaattaaactactatgatcttgtcagaactgaaatcgcagaagaaagacagtatctacgggaattaaatatgatcataaaagtgtttcgagaagcctttctttctgatagaaagctgtttaaaccttctgatatcgaaaagatttttagtaacatttcagatatacatgaattgactgtgaaacttttaggtttgattgaagacacagttgaaatgactgatgaaagcagtcctcatcccttagctggcagctgttttgaagatttggcagaagagcaagcatttgatccttatgaaacattatcacaggacattctttcaccagagtttcatgaacatttcaataaattgatggccagacctgcagttgctctacactttcagtccattgctgatggttttaaagaggcagttcgttatgtccttccacgtcttatgctggtgccagtgtatcactgttggcactactttgagttactaaagcaattgaaagcatgtagtgaagaacaagaagacagagaatgtttgaaccaagctattactgctctcatgaatctccaaggtagcatggaccgaatttacaagcagtattcacctagacgtcgacctggagatcctgtttgccctttttatagtcaccaattaagaagcaaacacctggctatcaaaaaaatgaatgaaattcagaaaaatatcgatggatgggaaggcaaagatattggacagtgttgtaatgaattcattatggagggaccattgacaagaatcggtgccaaacatgaacggcatatttttctgtttgatggcttaatgatcagttgtaaacctaatcatggccagactcggcttccaggttacagtagtgcagaatacaggttaaaagaaaaatttgtcatgaggaaaatacaaatttgtgataaagaagatacttgtgagcacaagcatgcatttgaattagtatccaaagatgagaacagcataatatttgctgctaagtctgctgaagaaaaaaacaactggatggcagcccttatttctcttcattatcgtagtactctagatcgaatgttagattcagtattattgaaagaagaaaatgagcaaccactgagattaccaagtcctgaagtatatcgttttgtagtaaaagactctgaggaaaacattgtttttgaagacaacttgcaaagtagaagtggcatccccattattaaaggaggaactgtagtgaaattaattgaaaggttaacatatcatatgtatgcagatcccaattttgttcgtacttttcttaccacatatcgttcattttgtaaaccacaggaattgctgagcttactgattgaacggtttgaaattccagagccagaacctactgacgcagacaaattggcaatagagaaaggcgagcagccaatcagtgcagaccttaaaagatttcgcaaggaatatgtccaaccagtacaacttaggatcttaaatgtatttcggcattgggttgaacatcatttttatgactttgaaagagacttggaattgcttgaaagactagaatccttcatttcaagtgtaagagggaaagctatgaaaaaatgggtagagtcaattgctaagatcatcaggaggaagaagcaagctcaggcaaatggagtaagccataatattacctttgaaagtccacctccaccaattgaatggcatatcagcaaaccaggacagtttgaaacatttgatctcatgacacttcatccaatagaaattgcacgtcagctgacacttttggagtctgatctttacaggaaagttcaaccgtctgaacttgtagggagtgtgtggaccaaagaagataaagaaataaattctccaaatttattaaaaatgattcgccataccacaaatctcaccctctggtttgaaaaatgcattgtggaagcagaaaattttgaagaacgggtggcagtactaagtagaattatagaaattctgcaagtttttcaagatttgaataatttcaatggcgtattggagatagtcagtgcagtaaattcagtgtcagtatacagactagaccatacctttgaggcactgcaggaaaggaaaaggaaaattttggacgaagctgtggaattaagtcaagatcactttaaaaaatacctagtaaaacttaagtcaatcaatccaccttgtgtgcctttttttggaatatatttaacaaatattctgaagaccgaagaagggaataatgattttttaaaaaagaaagggaaagatttaatcaatttcagtaagaggaggaaagtagctgaaattactggagaaattcagcagtatcagaatcagccttactgtttacggatagaaccagatatgaggagattctttgaaaaccttaaccccatgggaagtgcatctgaaaaagagtttacagattatttgttcaacaagtcactagaaattgaacctcgaaactgcaaacagccacctcgatttcctaggaaatcaactttttccttaaaatctcctggaataaggcctaacacaggccgacatggctctacctcaggtactttacgaggtcacccaacaccattagaaagagaaccatgtaaaataagctttagtcggattgctgaaactgagctggaatcaacagtgtcagcaccaacctctccaaatacaccatctactccaccagtatctgcttcttcagaccttagtgtatttttagatgtggatctcaacagctcctgtggcagcaatagcatctttgctccagtgcttttgccacattcaaagtctttctttagttcatgtggtagtttacataaactaagtgaagagcccctgattcctcctcctcttcctcctcgaaaaaagtttgatcatgatgcttcaaattccaagggaaatatgaaatctgatgatgatcctcctgctattccaccgagacagcctcctcctccaaaggtaaaacccagagttcctgttcctactggtgcatttgatgggcctctgcatagtccacctccgccaccaccaagagatcctcttcctgatacccctccaccagttccccttcggcctccagaacactttataaactgtccatttaatcttcagccacctccactggggcatcttcacagagattcagactggctcagagacattagtacgtgtccaaattcgccaagcactcctcctagcacaccctctccaagggtaccgcgtcgatgctatgtgctcagttctagtcagaataatcttgctcatcctccagctccccctgttccaccaaggcagaattcaagccctcatctgccaaaactgccaccaaagacttacaaacgggagctttcgcaccccccattgtacagactgcctttgctagaaaatgcagaaactccccaatgaccttagccatatgtagtcattgacactggaatggtatttgtaaagttttttttttaatttattcaaaaaaagacatagtattttagtactttttacaaataatgctcttacaaaaatgctactgatcaaataagcttttaagaattggaaaaataaaaatacaaaagtccttcaccattatcctcaggtgatcagtagcattgccttgtcttggatcctcagtgctgccaaaaggccagtataaagaatttatatttgcactgtaaactctgcaaaaatatggtttaaagtgacatgattgcactgaaaagggatagtgcttttgtgaaatttttcaaatttgagtaatagatgcctttttaaggcagtgaatttacacaaatatgggaggggtatatggtgttactgatttttaaacctctttgaccatcttctagtttttacttctagtttttacatctaggagaattgtgaataacaccaactgttcttaaactctttaatgccatgtcttaaatgccggtatttgctgctgaagacaaaaatgaaaagtaggatgaaaataatagaatggcactgtaagtgtttattattttgtcaaaatgtaaacaaagactacatgccctttttccctccatcatttgtgtaaactgattaatcagtttacacaaggcaaaaactatcgaacagttggttttagtgtgttgtataactttgctgtatatcaaactaattttgacaagttttcatcctaagcctcaaatcatgtaattaataatttgcctgtttatttatgacctaattgtgattcttttattaataaaagctaatgggaagaggatccctgattaagctgatgactagacctacaattaattttcctgcagtatatgaagtattgtaccagagtattaaaagatatgtaatattttattgataaatctatcctttaaaaggaatacgttttaggatgtcatcattttgatgtgactcatgtacatgttgataatatgctgtttattatacatttagtgttcaagagattcacgtaattgctttttg

SEQ ID NO: 321040 - DNA, 4229 bp, Homo sapiens
cactctgcgctgctgctaaaggggcagcaacggcggccagcgctgtgcgcgccatagcgaggctcgctcgcccgacgcgcactccgggtcggtccccagagctctgtggaggtgactcgagtgggcagggccgggcggcgctgtcggctgggagggcggggaggaggcgatgaggagacgagcagccgccgccgccgccgccgctgctcaccgcccgccgcggccgtagcgggagtcggggcggggctgggccagctgtacccctgacgggccgcgaacccagacaaaggaggaggagccgccccagaagcgggccagcgccgccgggaaaggaggtcgccgcccggggtcgcccgggcttgcgggtcgccgcgcttcctctgcgggcgctgcgggaggcgagggccgcctcggcggaggaagccgaccccggggtctccgccagcccgccggcgccgcctccgagccgcctcggccgtagcctcggcccgggcgggaggcggcggccgccggcgaggcgaggcggcccgcgccctgcctgtcaggccaccggcccggcccgcgggctgcccccgatgcggaggcgctgtcgccggggccatgcagcaggcgccgcagccttacgagttcttcagcgaggagaacagtccgaaatggcggggactgttggtctcggccctgcggaaggttcaggaacaagtgcatcccactctctcagctaatgaagagtctctctattatattgaagagctgatttttcagctgcttaataaattatgcatggcccagccaaggactgttcaagatgtagaggagcgagttcagaagacctttcctcacccaattgataaatgggccattgctgatgcacaatctgctatagaaaaacgaaaacgaagaaatcctcttttactgcctgtggacaaaatccatccttcgttgaaggaagtattagggtacaaagtggactaccatgtatccctatatattgtggctgtactagagtatatctcagctgatattttaaaattggctggtaattatgtttttaatatccggcattatgaaatatctcagcaggacattaaagtgtcaatgtgtgcggataaggttttgatggacatgtttgatcaggatgacataggtttggtttctctctgtgaagatgaacctagttcttctggtgaattaaactactatgatcttgtcagaactgaaatcgcagaagaaagacagtatctacgggaattaaatatgatcataaaagtgtttcgagaagcctttctttctgatagaaagctgtttaaaccttctgatatcgaaaagatttttagtaacatttcagatatacatgaattgactgtgaaacttttaggtttgattgaagacacagttgaaatgactgatgaaagcagtcctcatcccttagctggcagctgttttgaagatttggcagaagagcaagcatttgatccttatgaaacattatcacaggacattctttcaccagagtttcatgaacatttcaataaattgatggccagacctgcagttgctctacactttcagtccattgctgatggttttaaagaggcagttcgttatgtccttccacgtcttatgctggtgccagtgtatcactgttggcactactttgagttactaaagcaattgaaagcatgtagtgaagaacaagaagacagagaatgtttgaaccaagctattactgctctcatgaatctccaaggtagcatggaccgaatttacaagcagtattcacctagacgtcgacctggagatcctgtttgccctttttatagtcaccaattaagaagcaaacacctggctatcaaaaaaatgaatgaaattcagaaaaatatcgatggatgggaaggcaaagatattggacagtgttgtaatgaattcattatggagggaccattgacaagaatcggtgccaaacatgaacggcatatttttctgtttgatggcttaatgatcagttgtaaacctaatcatggccagactcggcttccaggttacagtagtgcagaatacaggttaaaagaaaaatttgtcatgaggaaaatacaaatttgtgataaagaagatacttgtgagcacaagcatgcatttgaattagtatccaaagatgagaacagcataatatttgctgctaagtctgctgaagaaaaaaacaactggatggcagcccttatttctcttcattatcgtagtactctagatcgaatgttagattcagtattattgaaagaagaaaatgagcaaccactgagattaccaagtcctgaagtatatcgttttgtagtaaaagactctgaggaaaacattgtttttgaagacaacttgcaaagtagaagtggcatccccattattaaaggaggaactgtagtgaaattaattgaaaggttaacatatcatatgtatgcagatcccaattttgttcgtacttttcttaccacatatcgttcattttgtaaaccacaggaattgctgagcttactgattgaacggtttgaaattccagagccagaacctactgacgcagacaaattggcaatagagaaaggcgagcagccaatcagtgcagaccttaaaagatttcgcaaggaatatgtccaaccagtacaacttaggatcttaaatgtatttcggcattgggttgaacatcatttttatgactttgaaagagacttggaattgcttgaaagactagaatccttcatttcaagtgtaagaggtatattatataaaggtttgattgaatcttatattgaacatgagtttatgttcaaatttgtgtgactttaagaaactaaaacatttctctctcttttttttttttgaaacagagctttgctttgttgtccaggctgggttgcagtgagccaagatcgcaccactgcactccagcctgggtgacagagtgagactctcaaaaaaaaagtaaccagcattctgacttctgtcacccacaggtcagttcatattattgaatttgaagtatgtctcttttaaatttatagctccttcagctagattttgactttgaaaaaattcctttggaaaaacatgatgaagagtatcgaagtgaagatattcatattatatacatcagaaagaaaaaatcgaaatttccatcgtgaagcctttaatcatcttacccaaggctctaacaacctgggtaaactaaagatgtgaatagagcatgtgaatacagcatgggaagattgtgttcacagatttttttttccggcacgtccttagagatccgatgtatagatgatgaccaccaggggctgtctgcaatacgaaaaattcctgcttgcctgcctgcctgccaatggccctgaatccagcttaggttacttagttcagcatcaagttcttcttaaatgttgggaatcagttattcaaataaaaattggtattgaggcgaggctgaaatctgccaaaaacagccaacatgatttgactggaccttttacaggaagctagagataaatttctgaagagaactatctgctattatataataatgttttaaattcaaactagtaaattttagtttgtcttcagagtttaaaaggttttcattttgtacataattatacaatatttatcatttgtattttccacttcatttcttttaaaatatctttaatactgaaatgttcttttaattttaaaaagaactgagatattgtcttgtatacttatattggccaaagttttcttttcctccaccatacatatctatgtgatttaatcagtaaattgtactgtaatgagttgctaagaagacaaatcagaagattggaggaacaaaagatatctttacagatttttcatttgagcatggagtgagaatagaaagaccagtttcaggcttatgcacttacgtggctcatgcactttatgtatatgttccaggaaaatctggcttaaaaatactggtattgtttacatgaagcagtgaaaggtttttgaataactacaaatgtagttctatatgtatataccaaatgaatttctgttctgtgtctctctgttttatgttatgaagccattcgctcatatacaataatctgtcaaggactttaatcatacttgttccaaagagtagtaaccggatggaattctggtatttacaggcattggtgctagatggtacattttatgtgttaaaataaacattgtttttgaga

SEQ ID NO: 321041 - DNA, 1674 bp, Homo sapiens
gttgacccttgtatgtaaagctattatcgtggcattagagaaggaagaagtgtaattgaacacttatgtttcactaaaatgtgtttctttccattttatcaggatcttaaatgtatttcggcattgggttgaacatcatttttatgactttgaaagagacttggaattgcttgaaagactagaatccttcatttcaagtgtaagaggtatattatataaaggtttgattgaatcttatattgaacatgagtttatgttcaaatttgtgtgactttaagaaactaaaacatttctctctcttttttttttttgaaacagagctttgctttgttgtccaggctgggttgcagtgagccaagatcgcaccactgcactccagcctgggtgacagagtgagactctcaaaaaaaaagtaaccagcattctgacttctgtcacccacaggtcagttcatattattgaatttgaagtatgtctcttttaaatttatagctccttcagctagattttgactttgaaaaaattcctttggaaaaacatgatgaagagtatcgaagtgaagatattcatattatatacatcagaaagaaaaaatcgaaatttccatcgtgaagcctttaatcatcttacccaaggctctaacaacctgggtaaactaaagatgtgaatagagcatgtgaatacagcatgggaagattgtgttcacagatttttttttccggcacgtccttagagatccgatgtatagatgatgaccaccaggggctgtctgcaatacgaaaaattcctgcttgcctgcctgcctgccaatggccctgaatccagcttaggttacttagttcagcatcaagttcttcttaaatgttgggaatcagttattcaaataaaaattggtattgaggcgaggctgaaatctgccaaaaacagccaacatgatttgactggaccttttacaggaagctagagataaatttctgaagagaactatctgctattatataataatgttttaaattcaaactagtaaattttagtttgtcttcagagtttaaaaggttttcattttgtacataattatacaatatttatcatttgtattttccacttcatttcttttaaaatatctttaatactgaaatgttcttttaattttaaaaagaactgagatattgtcttgtatacttatattggccaaagttttcttttcctccaccatacatatctatgtgatttaatcagtaaattgtactgtaatgagttgctaagaagacaaatcagaagattggaggaacaaaagatatctttacagatttttcatttgagcatggagtgagaatagaaagaccagtttcaggcttatgcacttacgtggctcatgcactttatgtatatgttccaggaaaatctggcttaaaaatactggtattgtttacatgaagcagtgaaaggtttttgaataactacaaatgtagttctatatgtatataccaaatgaatttctgttctgtgtctctctgttttatgttatgaagccattcgctcatatacaataatctgtcaaggactttaatcatacttgttccaaagagtagtaaccggatggaattctggtatttacaggcattggtgctagatggtacattttatgtgttaaaataaacattgtttttgaga

SEQ ID NO: 321042 - DNA, 1133 bp, Homo sapiens
gtctgctggaaggactactttggtttaatgagaaagcaggtatatgactgcctcagaaatttccatcgtgaagcctttaatcatcttacccaaggctctaacaacctgggtaaactaaagatgtgaatagagcatgtgaatacagcatgggaagattgtgttcacagatttttttttccggcacgtccttagagatccgatgtatagatgatgaccaccaggggctgtctgcaatacgaaaaattcctgcttgcctgcctgcctgccaatggccctgaatccagcttaggttacttagttcagcatcaagttcttcttaaatgttgggaatcagttattcaaataaaaattggtattgaggcgaggctgaaatctgccaaaaacagccaacatgatttgactggaccttttacaggaagctagagataaatttctgaagagaactatctgctattatataataatgttttaaattcaaactagtaaattttagtttgtcttcagagtttaaaaggttttcattttgtacataattatacaatatttatcatttgtattttccacttcatttcttttaaaatatctttaatactgaaatgttcttttaattttaaaaagaactgagatattgtcttgtatacttatattggccaaagttttcttttcctccaccatacatatctatgtgatttaatcagtaaattgtactgtaatgagttgctaagaagacaaatcagaagattggaggaacaaaagatatctttacagatttttcatttgagcatggagtgagaatagaaagaccagtttcaggcttatgcacttacgtggctcatgcactttatgtatatgttccaggaaaatctggcttaaaaatactggtattgtttacatgaagcagtgaaaggtttttgaataactacaaatgtagttctatatgtatataccaaatgaatttctgttctgtgtctctctgttttatgttatgaagccattcgctcatatacaataatctgtcaaggactttaatcatacttgttccaaagagtagtaaccggatggaattctggtatttacaggcattggtgctagatggtacattttatgtgttaaaataaacattgtttttgaga

SEQ ID NO: 321043 - DNA, 3958 bp, Homo sapiens
cactctgcgctgctgctaaaggggcagcaacggcggccagcgctgtgcgcgccatagcgaggctcgctcgcccgacgcgcactccgggtcggtccccagagctctgtggaggtgactcgagtgggcagggccgggcggcgctgtcggctgggagggcggggaggaggcgatgaggagacgagcagccgccgccgccgccgccgctgctcaccgcccgccgcggccgtagcgggagtcggggcggggctgggccagctgtacccctgacgggccgcgaacccagacaaaggaggaggagccgccccagaagcgggccagcgccgccgggaaaggaggtcgccgcccggggtcgcccgggcttgcgggtcgccgcgcttcctctgcgggcgctgcgggaggcgagggccgcctcggcggaggaagccgaccccggggtctccgccagcccgccggcgccgcctccgagccgcctcggccgtagcctcggcccgggcgggaggcggcggccgccggcgaggcgaggcggcccgcgccctgcctgtcaggccaccggcccggcccgcgggctgcccccgatgcggaggcgctgtcgccggggccatgcagcaggcgccgcagccttacgagttcttcagcgaggagaacagtccgaaatggcggggactgttggtctcggccctgcggaaggttcaggaacaagtgcatcccactctctcagctaatgaagagtctctctattatattgaagagctgatttttcagctgcttaataaattatgcatggcccagccaaggactgttcaagatgtagaggagcgagttcagaagacctttcctcacccaattgataaatgggccattgctgatgcacaatctgctatagaaaaacgaaaacgaagaaatcctcttttactgcctgtggacaaaatccatccttcgttgaaggaagtattagggtacaaagtggactaccatgtatccctatatattgtggctgtactagagtatatctcagctgatattttaaaattggctggtaattatgtttttaatatccggcattatgaaatatctcagcaggacattaaagtgtcaatgtgtgcggataaggttttgatggacatgtttgatcaggatgacataggtttggtttctctctgtgaagatgaacctagttcttctggtgaattaaactactatgatcttgtcagaactgaaatcgcagaagaaagacagtatctacgggaattaaatatgatcataaaagtgtttcgagaagcctttctttctgatagaaagctgtttaaaccttctgatatcgaaaagatttttagtaacatttcagatatacatgaattgactgtgaaacttttaggtttgattgaagacacagttgaaatgactgatgaaagcagtcctcatcccttagctggcagctgttttgaagatttggcagaagagcaagcatttgatccttatgaaacattatcacaggacattctttcaccagagtttcatgaacatttcaataaattgatggccagacctgcagttgctctacactttcagtccattgctgatggttttaaagaggcagttcgttatgtccttccacgtcttatgctggtgccagtgtatcactgttggcactactttgagttactaaagcaattgaaagcatgtagtgaagaacaagaagacagagaatgtttgaaccaagctattactgctctcatgaatctccaaggtagcatggaccgaatttacaagcagtattcacctagacgtcgacctggagatcctgtttgccctttttatagtcaccaattaagaagcaaacacctggctatcaaaaaaatgaatgaaattcagaaaaatatcgatggatgggaaggcaaagatattggacagtgttgtaatgaattcattatggagggaccattgacaagaatcggtgccaaacatgaacggcatatttttctgtttgatggcttaatgatcagttgtaaacctaatcatggccagactcggcttccaggttacagtagtgcagaatacaggttaaaagaaaaatttgtcatgaggaaaatacaaatttgtgataaagaagatacttgtgagcacaagcatgcatttgaattagtatccaaagatgagaacagcataatatttgctgctaagtctgctgaagaaaaaaacaactggatggcagcccttatttctcttcattatcgtagtactctagatcgaatgttagattcagtattattgaaagaagaaaatgagcaaccactgagattaccaagtcctgaagtatatcgttttgtagtaaaagactctgaggaaaacattgtttttgaagacaacttgcaaagtagaagtggcatccccattattaaaggaggaactgtagtgaaattaattgaaaggttaacatatcatatgtatgcagatcccaattttgttcgtacttttcttaccacatatcgttcattttgtaaaccacaggaattgctgagcttactgattgaacggtttgaaattccagagccagaacctactgacgcagacaaattggcaatagagaaaggcgagcagccaatcagtgcagaccttaaaagatttcgcaaggaatatgtccaaccagtacaacttaggatcttaaatgtatttcggcattgggttgaacatcatttttatgactttgaaagagacttggaattgcttgaaagactagaatccttcatttcaagtgtaagagggaaagctatgaaaaaatgggtagagtcaattgctaagatcatcaggaggaagaagcaagctcaggcaaatggagtaagccataatattacctttgaaagtccacctccaccaattgaatggcatatcagcaaaccaggacagtttgaaacatttgatctcatgacacttcatccaatagaaattgcacgtcagctgacacttttggagtctgatctttacaggaaagttcaaccgtctgaacttgtagggagtgtgtggaccaaagaagataaagaaataaattctccaaatttattaaaaatgattcgccataccacaaatctcaccctctggtttgaaaaatgcattgtggaagcagaaaattttgaagaacgggtggcagtactaagtagaattatagaaattctgcaagtttttcaagatttgaataatttcaatggcgtattggagatagtcagtgcagtaaattcagtgtcagtatacagactagaccatacctttgaggcactgcaggaaaggaaaaggaaaattttggacgaagctgtggaattaagtcaagatcactttaaaaaatacctagtaaaacttaagtcaatcaatccaccttgtgtgcctttttttggaatatatttaacaaatattctgaagaccgaagaagggaataatgattttttaaaaaagaaagggaaagatttaatcaatttcagtaagaggaggaaagtagctgaaattactggagaaattcagcagtatcagaatcagccttactgtttacggatagaaccagatatgaggagattctttgaaaaccttaaccccatgggaagtgcatctgaaaaagagtttacagattatttgttcaacaagtcactagaaattgaacctcgaaactgcaaacagccacctcgatttgtaagtcttttataatttcgggaacaagtgttctgttttttaaaatattattttcaatgtttaacaacctgttatcttaaaaatgtaattgaatggctgttcctaggtgttttgtttgcagtaatatactatttctaaaactggggggggaaatgtcagccttttgataaaatctggtttatgccttatcttggtactacttatttatgtgtctacttttgatccctcctagaataatacaaaaaggtgtgagaaagtgagaacttaataggtagctgaatgg

SEQ ID NO: 321044 - DNA, 3121 bp, Homo sapiens
cactctgcgctgctgctaaaggggcagcaacggcggccagcgctgtgcgcgccatagcgaggctcgctcgcccgacgcgcactccgggtcggtccccagagctctgtggaggtgactcgagtgggcagggccgggcggcgctgtcggctgggagggcggggaggaggcgatgaggagacgagcagccgccgccgccgccgccgctgctcaccgcccgccgcggccgtagcgggagtcggggcggggctgggccagctgtacccctgacgggccgcgaacccagacaaaggaggaggagccgccccagaagcgggccagcgccgccgggaaaggaggtcgccgcccggggtcgcccgggcttgcgggtcgccgcgcttcctctgcgggcgctgcgggaggcgagggccgcctcggcggaggaagccgaccccggggtctccgccagcccgccggcgccgcctccgagccgcctcggccgtagcctcggcccgggcgggaggcggcggccgccggcgaggcgaggcggcccgcgccctgcctgtcaggccaccggcccggcccgcgggctgcccccgatgcggaggcgctgtcgccggggccatgcagcaggcgccgcagccttacgagttcttcagcgaggagaacagtccgaaatggcggggactgttggtctcggccctgcggaaggttcaggaacaagtgcatcccactctctcagctaatgaagagtctctctattatattgaagagctgatttttcagctgcttaataaattatgcatggcccagccaaggactgttcaagatgtagaggagcgagttcagaagacctttcctcacccaattgataaatgggccattgctgatgcacaatctgctatagaaaaacgaaaacgaagaaatcctcttttactgcctgtggacaaaatccatccttcgttgaaggaagtattagggtacaaagtggactaccatgtatccctatatattgtggctgtactagagtatatctcagctgatattttaaaattggctggtaattatgtttttaatatccggcattatgaaatatctcagcaggacattaaagtgtcaatgtgtgcggataaggttttgatggacatgtttgatcaggatgacataggtttggtttctctctgtgaagatgaacctagttcttctggtgaattaaactactatgatcttgtcagaactgaaatcgcagaagaaagacagtatctacgggaattaaatatgatcataaaagtgtttcgagaagcctttctttctgatagaaagctgtttaaaccttctgatatcgaaaagatttttagtaacatttcagatatacatgaattgactgtgaaacttttaggtttgattgaagacacagttgaaatgactgatgaaagcagtcctcatcccttagctggcagctgttttgaagatttggcagaagagcaagcatttgatccttatgaaacattatcacaggacattctttcaccagagtttcatgaacatttcaataaattgatggccagacctgcagttgctctacactttcagtccattgctgatggttttaaagaggcagttcgttatgtccttccacgtcttatgctggtgccagtgtatcactgttggcactactttgagttactaaagcaattgaaagcatgtagtgaagaacaagaagacagagaatgtttgaaccaagctattactgctctcatgaatctccaaggtagcatggaccgaatttacaagcagtattcacctagacgtcgacctggagatcctgtttgccctttttatagtcaccaattaagaagcaaacacctggctatcaaaaaaatgaatgaaattcagaaaaatatcgatggatgggaaggcaaagatattggacagtgttgtaatgaattcattatggagggaccattgacaagaatcggtgccaaacatgaacggcatatttttctgtttgatggcttaatgatcagttgtaaacctaatcatggccagactcggcttccaggttacagtagtgcagaatacaggttaaaagaaaaatttgtcatgaggaaaatacaaatttgtgataaagaagatacttgtgagcacaagcatgcatttgaattagtatccaaagatgagaacagcataatatttgctgctaagtctgctgaagaaaaaaacaactggatggcagcccttatttctcttcattatcgtagtactctagatcgaatgttagattcagtattattgaaagaagaaaatgagcaaccactgagattaccaagtcctgaagtatatcgttttgtagtaaaagactctgaggaaaacattgtttttgaagacaacttgcaaagtagaagtggcatccccattattaaaggaggaactgtagtgaaattaattgaaaggttaacatatcatatgtatgcagatcccaattttgttcgtacttttcttaccacatatcgttcattttgtaaaccacaggaattgctgagcttactgattgaacggtttgaaattccagagccagaacctactgacgcagacaaattggcaatagagaaaggcgagcagccaatcagtgcagaccttaaaagatttcgcaaggaatatgtccaaccagtacaacttaggatcttaaatgtatttcggcattgggttgaacatcatttttatgactttgaaagagacttggaattgcttgaaagactagaatccttcatttcaagtgtaagaggtatattatataaaggtttgattgaatcttatattgaacatgagtttatgttcaaatttgtgtgactttaagaaactaaaacatttctctctcttttttttttttgaaacagagctttgctttgttgtccaggctgggttgcagtgagccgagatcacgccattattctccagcctgggtgacaaagtgggactccatttcaaaaaaaatacaaaaattagccaggcgtggtgatatgtgcagtcccagctacttgggaggctgaggtgggaggatcacttgagcccgcaacatggaagttgcaataagttgagattgcgccactgcactccaacctgggccacagagcaagaccctgtc

SEQ ID NO: 321045 - DNA, 443 bp, Homo sapiens
atgtgccacgacgcccagctaatttttttgtatttttagtagagattgggtttcactaggttggccaggcttgtgtcgaactcctggcctcaagtgctctgccacctcagcctcccaaagtgctgggattacaggtgtgagccaccacacccggcctatgttgtgtcttttgaagcacatatattttaattttgataatgtccaatgcatctgttctttcttcagttgcttgttaggtgtcagcaaagaaccatctataaacatgcatggttgttcacttgaattgcatgtagccactgttatactaggcatactaggcattatgaggcatattaggcattattaaatacccagtaaatagtttgtggtaaatcaatcttttaagtttcctttttttttgttatagaaatttccatcgtgaagcctttaatcatcttacccaa

SEQ ID NO: 321046 - DNA, 353 bp, Homo sapiens
tatgaacacttttattaatactacaatggttctgctgtgattgagcaggagcgagttcagaagacctttcctcacccaattgataaatgggccattgctgatgcacaatctgctatagaaaaacgaaaacgaagaaatcctcttttactgcctgtggacaaaatccatccttcgttgaaggtaacaaaagattaaacattagttggggggtgttctttataacaagtaatattttatttctatatttataaagcattaatgtagcatggtctgtgttagtgtgtatatgtgcacttccatatgtatgcttgtacatacacatcgcatatattaatatgtatacaaaatgatta

SEQ ID NO: 321047 - DNA, 473 bp, Homo sapiens
gaatcctttttctggaaaccaaaatcagtacatggtttagttaacaggagcttacccaatcattagttacagaggggtttttgtttgtttgtttttgttttaagataggggtcttgctctgtcacacatgttgtagtgcagtggagtgatcatagctcactgtaacctcgagctcctgaggctcaagtaatcctcccattcagcctcctcaatagctgggactataggtgtgcaccagcatgctggctaatttttaaattttttgtaaggtgttgcggggggtggtttgtctctcgctgtattctccaggctggtcttcaactcctgctttcaagcgatctttccacctctgccttccaaagtgttgatattacaggtgtgagccactgcacctagcctagagctttaattacatgtgctttgttggattgattcaaagatggataaattgtaggggagctataaatacccct

SEQ ID NO: 321048 - DNA, 8131 bp, Homo sapiens
cactctgcgctgctgctaaaggggcagcaacggcggccagcgctgtgcgcgccatagcgaggctcgctcgcccgacgcgcactccgggtcggtccccagagctctgtggaggtgactcgagtgggcagggccgggcggcgctgtcggctgggagggcggggaggaggcgatgaggagacgagcagccgccgccgccgccgccgctgctcaccgcccgccgcggccgtagcgggagtcggggcggggctgggccagctgtacccctgacgggccgcgaacccagacaaaggaggaggagccgccccagaagcgggccagcgccgccgggaaaggaggtcgccgcccggggtcgcccgggcttgcgggtcgccgcgcttcctctgcgggcgctgcgggaggcgagggccgcctcggcggaggaagccgaccccggggtctccgccagcccgccggcgccgcctccgagccgcctcggccgtagcctcggcccgggcgggaggcggcggccgccggcgaggcgaggcggcccgcgccctgcctgtcaggccaccggcccggcccgcgggctgcccccgatgcggaggcgctgtcgccggggccatgcagcaggcgccgcagccttacgagttcttcagcgaggagaacagtccgaaatggcggggactgttggtctcggccctgcggaaggttcaggaacaagtgcatcccactctctcagctaatgaagagtctctctattatattgaagagctgatttttcagctgcttaataaattatgcatggcccagccaaggactgttcaagatgtagaggagcgagttcagaagacctttcctcacccaattgataaatgggccattgctgatgcacaatctgctatagaaaaacgaaaacgaagaaatcctcttttactgcctgtggacaaaatccatccttcgttgaaggaagtattagggtacaaagtggactaccatgtatccctatatattgtggctgtactagagtatatctcagctgatattttaaaattggctggtaattatgtttttaatatccggcattatgaaatatctcagcaggacattaaagtgtcaatgtgtgcggataaggttttgatggacatgtttgatcaggatgacataggtttggtttctctctgtgaagatgaacctagttcttctggtgaattaaactactatgatcttgtcagaactgaaatcgcagaagaaagacagtatctacgggaattaaatatgatcataaaagtgtttcgagaagcctttctttctgatagaaagctgtttaaaccttctgatatcgaaaagatttttagtaacatttcagatatacatgaattgactgtgaaacttttaggtttgattgaagacacagttgaaatgactgatgaaagcagtcctcatcccttagctggcagctgttttgaagatttggcagaagagcaagcatttgatccttatgaaacattatcacaggacattctttcaccagagtttcatgaacatttcaataaattgatggccagacctgcagttgctctacactttcagtccattgctgatggttttaaagaggcagttcgttatgtccttccacgtcttatgctggtgccagtgtatcactgttggcactactttgagttactaaagcaattgaaagcatgtagtgaagaacaagaagacagagaatgtttgaaccaagctattactgctctcatgaatctccaaggtagcatggaccgaatttacaagcagtattcacctagacgtcgacctggagatcctgtttgccctttttatagtcaccaattaagaagcaaacacctggctatcaaaaaaatgaatgaaattcagaaaaatatcgatggatgggaaggcaaagatattggacagtgttgtaatgaattcattatggagggaccattgacaagaatcggtgccaaacatgaacggcatatttttctgtttgatggcttaatgatcagttgtaaacctaatcatggccagactcggcttccaggttacagtagtgcagaatacaggttaaaagaaaaatttgtcatgaggaaaatacaaatttgtgataaagaagatacttgtgagcacaagcatgcatttgaattagtatccaaagatgagaacagcataatatttgctgctaagtctgctgaagaaaaaaacaactggatggcagcccttatttctcttcattatcgtagtactctagatcgaatgttagattcagtattattgaaagaagaaaatgagcaaccactgagattaccaagtcctgaagtatatcgttttgtagtaaaagactctgaggaaaacattgtttttgaagacaacttgcaaagtagaagtggcatccccattattaaaggaggaactgtagtgaaattaattgaaaggttaacatatcatatgtatgcagatcccaattttgttcgtacttttcttaccacatatcgttcattttgtaaaccacaggaattgctgagcttactgattgaacggtttgaaattccagagccagaacctactgacgcagacaaattggcaatagagaaaggcgagcagccaatcagtgcagaccttaaaagatttcgcaaggaatatgtccaaccagtacaacttaggatcttaaatgtatttcggcattgggttgaacatcatttttatgactttgaaagagacttggaattgcttgaaagactagaatccttcatttcaagtgtaagagggaaagctatgaaaaaatgggtagagtcaattgctaagatcatcaggaggaagaagcaagctcaggcaaatggagtaagccataatattacctttgaaagtccacctccaccaattgaatggcatatcagcaaaccaggacagtttgaaacatttgatctcatgacacttcatccaatagaaattgcacgtcagctgacacttttggagtctgatctttacaggaaagttcaaccgtctgaacttgtagggagtgtgtggaccaaagaagataaagaaataaattctccaaatttattaaaaatgattcgccataccacaaatctcaccctctggtttgaaaaatgcattgtggaagcagaaaattttgaagaacgggtggcagtactaagtagaattatagaaattctgcaagtttttcaagatttgaataatttcaatggcgtattggagatagtcagtgcagtaaattcagtgtcagtatacagactagaccatacctttgaggcactgcaggaaaggaaaaggaaaattttggacgaagctgtggaattaagtcaagatcactttaaaaaatacctagtaaaacttaagtcaatcaatccaccttgtgtgcctttttttggaatatatttaacaaatattctgaagaccgaagaagggaataatgattttttaaaaaagaaagggaaagatttaatcaatttcagtaagaggaggaaagtagctgaaattactggagaaattcagcagtatcagaatcagccttactgtttacggatagaaccagatatgaggagattctttgaaaaccttaaccccatgggaagtgcatctgaaaaagagtttacagattatttgttcaacaagtcactagaaattgaacctcgaaactgcaaacagccacctcgatttcctaggaaatcaactttttccttaaaatctcctggaataaggcctaacacaggccgacatggctctacctcaggtactttacgaggtcacccaacaccattagaaagagaaccatgtaaaataagctttagtcggattgctgaaactgagctggaatcaacagtgtcagcaccaacctctccaaatacaccatctactccaccagtatctgcttcttcagaccttagtgtatttttagatgtggatctcaacagctcctgtggcagcaatagcatctttgctccagtgcttttgccacattcaaagtctttctttagttcatgtggtagtttacataaactaagtgaagagcccctgattcctcctcctcttcctcctcgaaaaaagtttgatcatgatgcttcaaattccaagggaaatatgaaatctgatgatgatcctcctgctattccaccgagacagcctcctcctccaaaggtaaaacccagagttcctgttcctactggtgcatttgatgggcctctgcatagtccacctccgccaccaccaagagatcctcttcctgatacccctccaccagttccccttcggcctccagaacactttataaactgtccatttaatcttcagccacctccactggggcatcttcacagagattcagactggctcagagacattagtacgtgtccaaattcgccaagcactcctcctagcacaccctctccaagggtaccgcgtcgatgctatgtgctcagttctagtcagaataatcttgctcatcctccagctccccctgttccaccaaggcagaattcaagccctcatctgccaaaactgccaccaaagacttacaaacgggagctttcgcaccccccattgtacagactgcctttgctagaaaatgcagaaactccccaatgaccttagccatatgtagtcattgacactggaatggtatttgtaaagttttttttttaatttattcaaaaaaagacatagtattttagtactttttacaaataatgctcttacaaaaatgctactgatcaaataagcttttaagaattggaaaaataaaaatacaaaagtccttcaccattatcctcaggtgatcagtagcattgccttgtcttggatcctcagtgctgccaaaaggccagtataaagaatttatatttgcactgtaaactctgcaaaaatatggtttaaagtgacatgattgcactgaaaagggatagtgcttttgtgaaatttttcaaatttgagtaatagatgcctttttaaggcagtgaatttacacaaatatgggaggggtatatggtgttactgatttttaaacctctttgaccatcttctagtttttacttctagtttttacatctaggagaattgtgaataacaccaactgttcttaaactctttaatgccatgtcttaaatgccggtatttgctgctgaagacaaaaatgaaaagtaggatgaaaataatagaatggcactgtaagtgtttattattttgtcaaaatgtaaacaaagactacataacccaatgatggagggaaaaagggcatgtatctcattcagatgtgccttttgtttttgcagactatgacgtctttagctaatgaattgcctattgttatggaaaacagttaatatgccatgtatgtacagttttgtttatattgtatatttaaagatactgctaataacctatataaatttaagtgacttgaggcctataatacaatctgctactttactaattcataaattcaaaaaaaattctatggcataggaaccaactgccttgccttcaagacctagtaactttctctataaatctcgtgttaactgaaattttttttaaatatattttttagattggtaatatttaaaccagcaaatacttaaagctttattaaacattttaatcagataagtgagtaaagcttttatttgccatttggatgccttcgttcaaagtgatagagtgttttgctgatagtgctgtagcagcagttgtaaagtagccaaaagccacgttgtttatttactggtttgtggccttttactgtgctttgtatcagagttcttaacaagattaataaatcaccccagtcttaatttttaaaagacttttaaaatatgtgttttcattataaggaacaaagggggagattgttgagtcctatagacacacacacacacacacacaattttttcttcactgttaaatgtgagctgcaggcttctagcaaccacttttatgaattcatacaaaaaactaggagcatactaggaacttgaaaaggaagattgtaagattatagccatctttggtaggatcttggaagctgattgcatttaagccttgtaactactatgtaaatcaagtgtccaacttggtaaactctgaggttggctttgttttttaaagagcagattataatagttttgtctgggaaagtgatttaaacggcctcttcgttaagccaaacgtgtgatttagggtagagggaggctgccaagcgcgtcgggtaagcaggggccccacgctcggccccgcccaggtaacgctgccttccgggctttgttaactcgcgcgcgctgcgtcgccaactcagcggcgggcagggggcggagccgcagggcggggcggtgcgcgttgatgtgacgtccctgcgcgcgccgctttctgttgccgggcgcaatggcggatacgctggagtcctcgctggaggacccactgcggagctttgtgcgagttttggagaagcgggatggtacagtgctacgactacagcagtatagctccggtggcgtgggttgcgttgtgtgggacgctgccattgtcctttctaaatacctggaaacgcccgagttttctggcgacggggcccacgcgctgagccggcggtcggtgctggagctgggttcgggcaccggggccgtggggctcatggctgctaccctcggggctgatgttgtagtcaccgatcttgaggaattgcaagacttgctgaagatgaatattaatatgaacaagcatcttgtcactggttctgttcaagccaaggggggaagaaatagaaggctttccttctccacccgacttcatactgatggccgactgcatatactatgaagagtctttggagccattgctgaaaactctaaaagatatcagcggatttgaaacttgtattatatgttgttatgaacaacgaacaatggggaaaaatccagaaattgagaaaaaatattttgagctccttcagctagattttgactttgaaaaaattcctttggaaaaacatgatgaagagtatcgaagtgaagatattcatattatatacatcagaaagaaaaaatcgaaatttccatcgtgaagcctttaatcatcttacccaaggctctaacaacctgggtaaactaaagatgtgaatagagcatgtgaatacagcatgggaagattgtgttcacagatttttttttccggcacgtccttagagatccgatgtatagatgatgaccaccaggggctgtctgcaatacgaaaaattcctgcttgcctgcctgcctgccaatggccctgaatccagcttaggttacttagttcagcatcaagttcttcttaaatgttgggaatcagttattcaaataaaaattggtattgaggcgaggctgaaatctgccaaaaacagccaacatgatttgactggaccttttacaggaagctagagataaatttctgaagagaactatctgctattatataataatgttttaaattcaaactagtaaattttagtttgtcttcagagtttaaaaggttttcattttgtacataattatacaatatttatcatttgtattttccacttcatttcttttaaaatatctttaatactgaaatgttcttttaattttaaaaagaactgagatattgtcttgtatacttatattggccaaagttttcttttcctccaccatacatatctatgtgatttaatcagtaaattgtactgtaatgagttgctaagaagacaaatcagaagattggaggaacaaaagatatctttacagatttttcatttgagcatggagtgagaatagaaagaccagtttcaggcttatgcacttacgtggctcatgcactttatgtatatgttccaggaaaatctggcttaaaaatactggtattgtttacatgaagcagtgaaaggtttttgaataactacaaatgtagttctatatgtatataccaaatgaatttctgttctgtgtctctctgttttatgttatgaagccattcgctcatatacaataatctgtcaaggactttaatcatacttgttccaaagagtagtaaccggatggaattctggtatttacaggcattggtgctagatggtacattttatgtgttaaaataaacattgtttttgaga

SEQ ID NO: 321049 - DNA, 8190 bp, Homo sapiens
cactctgcgctgctgctaaaggggcagcaacggcggccagcgctgtgcgcgccatagcgaggctcgctcgcccgacgcgcactccgggtcggtccccagagctctgtggaggtgactcgagtgggcagggccgggcggcgctgtcggctgggagggcggggaggaggcgatgaggagacgagcagccgccgccgccgccgccgctgctcaccgcccgccgcggccgtagcgggagtcggggcggggctgggccagctgtacccctgacgggccgcgaacccagacaaaggaggaggagccgccccagaagcgggccagcgccgccgggaaaggaggtcgccgcccggggtcgcccgggcttgcgggtcgccgcgcttcctctgcgggcgctgcgggaggcgagggccgcctcggcggaggaagccgaccccggggtctccgccagcccgccggcgccgcctccgagccgcctcggccgtagcctcggcccgggcgggaggcggcggccgccggcgaggcgaggcggcccgcgccctgcctgtcaggccaccggcccggcccgcgggctgcccccgatgcggaggcgctgtcgccggggccatgcagcaggcgccgcagccttacgagttcttcagcgaggagaacagtccgaaatggcggggactgttggtctcggccctgcggaagaagtgtaaagcatggttctcttccattgtcctcttgatgtcctgttacagcatttatgggttcaggaacaagtgcatcccactctctcagctaatgaagagtctctctattatattgaagagctgatttttcagctgcttaataaattatgcatggcccagccaaggactgttcaagatgtagaggagcgagttcagaagacctttcctcacccaattgataaatgggccattgctgatgcacaatctgctatagaaaaacgaaaacgaagaaatcctcttttactgcctgtggacaaaatccatccttcgttgaaggaagtattagggtacaaagtggactaccatgtatccctatatattgtggctgtactagagtatatctcagctgatattttaaaattggctggtaattatgtttttaatatccggcattatgaaatatctcagcaggacattaaagtgtcaatgtgtgcggataaggttttgatggacatgtttgatcaggatgacataggtttggtttctctctgtgaagatgaacctagttcttctggtgaattaaactactatgatcttgtcagaactgaaatcgcagaagaaagacagtatctacgggaattaaatatgatcataaaagtgtttcgagaagcctttctttctgatagaaagctgtttaaaccttctgatatcgaaaagatttttagtaacatttcagatatacatgaattgactgtgaaacttttaggtttgattgaagacacagttgaaatgactgatgaaagcagtcctcatcccttagctggcagctgttttgaagatttggcagaagagcaagcatttgatccttatgaaacattatcacaggacattctttcaccagagtttcatgaacatttcaataaattgatggccagacctgcagttgctctacactttcagtccattgctgatggttttaaagaggcagttcgttatgtccttccacgtcttatgctggtgccagtgtatcactgttggcactactttgagttactaaagcaattgaaagcatgtagtgaagaacaagaagacagagaatgtttgaaccaagctattactgctctcatgaatctccaaggtagcatggaccgaatttacaagcagtattcacctagacgtcgacctggagatcctgtttgccctttttatagtcaccaattaagaagcaaacacctggctatcaaaaaaatgaatgaaattcagaaaaatatcgatggatgggaaggcaaagatattggacagtgttgtaatgaattcattatggagggaccattgacaagaatcggtgccaaacatgaacggcatatttttctgtttgatggcttaatgatcagttgtaaacctaatcatggccagactcggcttccaggttacagtagtgcagaatacaggttaaaagaaaaatttgtcatgaggaaaatacaaatttgtgataaagaagatacttgtgagcacaagcatgcatttgaattagtatccaaagatgagaacagcataatatttgctgctaagtctgctgaagaaaaaaacaactggatggcagcccttatttctcttcattatcgtagtactctagatcgaatgttagattcagtattattgaaagaagaaaatgagcaaccactgagattaccaagtcctgaagtatatcgttttgtagtaaaagactctgaggaaaacattgtttttgaagacaacttgcaaagtagaagtggcatccccattattaaaggaggaactgtagtgaaattaattgaaaggttaacatatcatatgtatgcagatcccaattttgttcgtacttttcttaccacatatcgttcattttgtaaaccacaggaattgctgagcttactgattgaacggtttgaaattccagagccagaacctactgacgcagacaaattggcaatagagaaaggcgagcagccaatcagtgcagaccttaaaagatttcgcaaggaatatgtccaaccagtacaacttaggatcttaaatgtatttcggcattgggttgaacatcatttttatgactttgaaagagacttggaattgcttgaaagactagaatccttcatttcaagtgtaagagggaaagctatgaaaaaatgggtagagtcaattgctaagatcatcaggaggaagaagcaagctcaggcaaatggagtaagccataatattacctttgaaagtccacctccaccaattgaatggcatatcagcaaaccaggacagtttgaaacatttgatctcatgacacttcatccaatagaaattgcacgtcagctgacacttttggagtctgatctttacaggaaagttcaaccgtctgaacttgtagggagtgtgtggaccaaagaagataaagaaataaattctccaaatttattaaaaatgattcgccataccacaaatctcaccctctggtttgaaaaatgcattgtggaagcagaaaattttgaagaacgggtggcagtactaagtagaattatagaaattctgcaagtttttcaagatttgaataatttcaatggcgtattggagatagtcagtgcagtaaattcagtgtcagtatacagactagaccatacctttgaggcactgcaggaaaggaaaaggaaaattttggacgaagctgtggaattaagtcaagatcactttaaaaaatacctagtaaaacttaagtcaatcaatccaccttgtgtgcctttttttggaatatatttaacaaatattctgaagaccgaagaagggaataatgattttttaaaaaagaaagggaaagatttaatcaatttcagtaagaggaggaaagtagctgaaattactggagaaattcagcagtatcagaatcagccttactgtttacggatagaaccagatatgaggagattctttgaaaaccttaaccccatgggaagtgcatctgaaaaagagtttacagattatttgttcaacaagtcactagaaattgaacctcgaaactgcaaacagccacctcgatttcctaggaaatcaactttttccttaaaatctcctggaataaggcctaacacaggccgacatggctctacctcaggtactttacgaggtcacccaacaccattagaaagagaaccatgtaaaataagctttagtcggattgctgaaactgagctggaatcaacagtgtcagcaccaacctctccaaatacaccatctactccaccagtatctgcttcttcagaccttagtgtatttttagatgtggatctcaacagctcctgtggcagcaatagcatctttgctccagtgcttttgccacattcaaagtctttctttagttcatgtggtagtttacataaactaagtgaagagcccctgattcctcctcctcttcctcctcgaaaaaagtttgatcatgatgcttcaaattccaagggaaatatgaaatctgatgatgatcctcctgctattccaccgagacagcctcctcctccaaaggtaaaacccagagttcctgttcctactggtgcatttgatgggcctctgcatagtccacctccgccaccaccaagagatcctcttcctgatacccctccaccagttccccttcggcctccagaacactttataaactgtccatttaatcttcagccacctccactggggcatcttcacagagattcagactggctcagagacattagtacgtgtccaaattcgccaagcactcctcctagcacaccctctccaagggtaccgcgtcgatgctatgtgctcagttctagtcagaataatcttgctcatcctccagctccccctgttccaccaaggcagaattcaagccctcatctgccaaaactgccaccaaagacttacaaacgggagctttcgcaccccccattgtacagactgcctttgctagaaaatgcagaaactccccaatgaccttagccatatgtagtcattgacactggaatggtatttgtaaagttttttttttaatttattcaaaaaaagacatagtattttagtactttttacaaataatgctcttacaaaaatgctactgatcaaataagcttttaagaattggaaaaataaaaatacaaaagtccttcaccattatcctcaggtgatcagtagcattgccttgtcttggatcctcagtgctgccaaaaggccagtataaagaatttatatttgcactgtaaactctgcaaaaatatggtttaaagtgacatgattgcactgaaaagggatagtgcttttgtgaaatttttcaaatttgagtaatagatgcctttttaaggcagtgaatttacacaaatatgggaggggtatatggtgttactgatttttaaacctctttgaccatcttctagtttttacttctagtttttacatctaggagaattgtgaataacaccaactgttcttaaactctttaatgccatgtcttaaatgccggtatttgctgctgaagacaaaaatgaaaagtaggatgaaaataatagaatggcactgtaagtgtttattattttgtcaaaatgtaaacaaagactacataacccaatgatggagggaaaaagggcatgtatctcattcagatgtgccttttgtttttgcagactatgacgtctttagctaatgaattgcctattgttatggaaaacagttaatatgccatgtatgtacagttttgtttatattgtatatttaaagatactgctaataacctatataaatttaagtgacttgaggcctataatacaatctgctactttactaattcataaattcaaaaaaaattctatggcataggaaccaactgccttgccttcaagacctagtaactttctctataaatctcgtgttaactgaaattttttttaaatatattttttagattggtaatatttaaaccagcaaatacttaaagctttattaaacattttaatcagataagtgagtaaagcttttatttgccatttggatgccttcgttcaaagtgatagagtgttttgctgatagtgctgtagcagcagttgtaaagtagccaaaagccacgttgtttatttactggtttgtggccttttactgtgctttgtatcagagttcttaacaagattaataaatcaccccagtcttaatttttaaaagacttttaaaatatgtgttttcattataaggaacaaagggggagattgttgagtcctatagacacacacacacacacacacaattttttcttcactgttaaatgtgagctgcaggcttctagcaaccacttttatgaattcatacaaaaaactaggagcatactaggaacttgaaaaggaagattgtaagattatagccatctttggtaggatcttggaagctgattgcatttaagccttgtaactactatgtaaatcaagtgtccaacttggtaaactctgaggttggctttgttttttaaagagcagattataatagttttgtctgggaaagtgatttaaacggcctcttcgttaagccaaacgtgtgatttagggtagagggaggctgccaagcgcgtcgggtaagcaggggccccacgctcggccccgcccaggtaacgctgccttccgggctttgttaactcgcgcgcgctgcgtcgccaactcagcggcgggcagggggcggagccgcagggcggggcggtgcgcgttgatgtgacgtccctgcgcgcgccgctttctgttgccgggcgcaatggcggatacgctggagtcctcgctggaggacccactgcggagctttgtgcgagttttggagaagcgggatggtacagtgctacgactacagcagtatagctccggtggcgtgggttgcgttgtgtgggacgctgccattgtcctttctaaatacctggaaacgcccgagttttctggcgacggggcccacgcgctgagccggcggtcggtgctggagctgggttcgggcaccggggccgtggggctcatggctgctaccctcggggctgatgttgtagtcaccgatcttgaggaattgcaagacttgctgaagatgaatattaatatgaacaagcatcttgtcactggttctgttcaagccaaggggggaagaaatagaaggctttccttctccacccgacttcatactgatggccgactgcatatactatgaagagtctttggagccattgctgaaaactctaaaagatatcagcggatttgaaacttgtattatatgttgttatgaacaacgaacaatggggaaaaatccagaaattgagaaaaaatattttgagctccttcagctagattttgactttgaaaaaattcctttggaaaaacatgatgaagagtatcgaagtgaagatattcatattatatacatcagaaagaaaaaatcgaaatttccatcgtgaagcctttaatcatcttacccaaggctctaacaacctgggtaaactaaagatgtgaatagagcatgtgaatacagcatgggaagattgtgttcacagatttttttttccggcacgtccttagagatccgatgtatagatgatgaccaccaggggctgtctgcaatacgaaaaattcctgcttgcctgcctgcctgccaatggccctgaatccagcttaggttacttagttcagcatcaagttcttcttaaatgttgggaatcagttattcaaataaaaattggtattgaggcgaggctgaaatctgccaaaaacagccaacatgatttgactggaccttttacaggaagctagagataaatttctgaagagaactatctgctattatataataatgttttaaattcaaactagtaaattttagtttgtcttcagagtttaaaaggttttcattttgtacataattatacaatatttatcatttgtattttccacttcatttcttttaaaatatctttaatactgaaatgttcttttaattttaaaaagaactgagatattgtcttgtatacttatattggccaaagttttcttttcctccaccatacatatctatgtgatttaatcagtaaattgtactgtaatgagttgctaagaagacaaatcagaagattggaggaacaaaagatatctttacagatttttcatttgagcatggagtgagaatagaaagaccagtttcaggcttatgcacttacgtggctcatgcactttatgtatatgttccaggaaaatctggcttaaaaatactggtattgtttacatgaagcagtgaaaggtttttgaataactacaaatgtagttctatatgtatataccaaatgaatttctgttctgtgtctctctgttttatgttatgaagccattcgctcatatacaataatctgtcaaggactttaatcatacttgttccaaagagtagtaaccggatggaattctggtatttacaggcattggtgctagatggtacattttatgtgttaaaataaacattgtttttgaga

SEQ ID NO: 321050 - DNA, 8960 bp, Homo sapiens
cactctgcgctgctgctaaaggggcagcaacggcggccagcgctgtgcgcgccatagcgaggctcgctcgcccgacgcgcactccgggtcggtccccagagctctgtggaggtgactcgagtgggcagggccgggcggcgctgtcggctgggagggcggggaggaggcgatgaggagacgagcagccgccgccgccgccgccgctgctcaccgcccgccgcggccgtagcgggagtcggggcggggctgggccagctgtacccctgacgggccgcgaacccagacaaaggaggaggagccgccccagaagcgggccagcgccgccgggaaaggaggtcgccgcccggggtcgcccgggcttgcgggtcgccgcgcttcctctgcgggcgctgcgggaggcgagggccgcctcggcggaggaagccgaccccggggtctccgccagcccgccggcgccgcctccgagccgcctcggccgtagcctcggcccgggcgggaggcggcggccgccggcgaggcgaggcggcccgcgccctgcctgtcaggccaccggcccggcccgcgggctgcccccgatgcggaggcgctgtcgccggggccatgcagcaggcgccgcagccttacgagttcttcagcgaggagaacagtccgaaatggcggggactgttggtctcggccctgcggaaggttcaggaacaagtgcatcccactctctcagctaatgaagagtctctctattatattgaagagctgatttttcagctgcttaataaattatgcatggcccagccaaggactgttcaagatgtagaggagcgagttcagaagacctttcctcacccaattgataaatgggccattgctgatgcacaatctgctatagaaaaacgaaaacgaagaaatcctcttttactgcctgtggacaaaatccatccttcgttgaaggaagtattagggtacaaagtggactaccatgtatccctatatattgtggctgtactagagtatatctcagctgatattttaaaattggctggtaattatgtttttaatatccggcattatgaaatatctcagcaggacattaaagtgtcaatgtgtgcggataaggttttgatggacatgtttgatcaggatgacataggtttggtttctctctgtgaagatgaacctagttcttctggtgaattaaactactatgatcttgtcagaactgaaatcgcagaagaaagacagtatctacgggaattaaatatgatcataaaagtgtttcgagaagcctttctttctgatagaaagctgtttaaaccttctgatatcgaaaagatttttagtaacatttcagatatacatgaattgactgtgaaacttttaggtttgattgaagacacagttgaaatgactgatgaaagcagtcctcatcccttagctggcagctgttttgaagatttggcagaagagcaagcatttgatccttatgaaacattatcacaggacattctttcaccagagtttcatgaacatttcaataaattgatggccagacctgcagttgctctacactttcagtccattgctgatggttttaaagaggcagttcgttatgtccttccacgtcttatgctggtgccagtgtatcactgttggcactactttgagttactaaagcaattgaaagcatgtagtgaagaacaagaagacagagaatgtttgaaccaagctattactgctctcatgaatctccaaggtagcatggaccgaatttacaagcagtattcacctagacgtcgacctggagatcctgtttgccctttttatagtcaccaattaagaagcaaacacctggctatcaaaaaaatgaatgaaattcagaaaaatatcgatggatgggaaggcaaagatattggacagtgttgtaatgaattcattatggagggaccattgacaagaatcggtgccaaacatgaacggcatatttttctgtttgatggcttaatgatcagttgtaaacctaatcatggccagactcggcttccaggttacagtagtgcagaatacaggttaaaagaaaaatttgtcatgaggaaaatacaaatttgtgataaagaagatacttgtgagcacaagcatgcatttgaattagtatccaaagatgagaacagcataatatttgctgctaagtctgctgaagaaaaaaacaactggatggcagcccttatttctcttcattatcgtagtactctagatcgaatgttagattcagtattattgaaagaagaaaatgagcaaccactgagattaccaagtcctgaagtatatcgttttgtagtaaaagactctgaggaaaacattgtttttgaagacaacttgcaaagtagaagtggcatccccattattaaaggaggaactgtagtgaaattaattgaaaggttaacatatcatatgtatgcagatcccaattttgttcgtacttttcttaccacatatcgttcattttgtaaaccacaggaattgctgagcttactgattgaacggtttgaaattccagagccagaacctactgacgcagacaaattggcaatagagaaaggcgagcagccaatcagtgcagaccttaaaagatttcgcaaggaatatgtccaaccagtacaacttaggatcttaaatgtatttcggcattgggttgaacatcatttttatgactttgaaagagacttggaattgcttgaaagactagaatccttcatttcaagtgtaagagggaaagctatgaaaaaatgggtagagtcaattgctaagatcatcaggaggaagaagcaagctcaggcaaatggagtaagccataatattacctttgaaagtccacctccaccaattgaatggcatatcagcaaaccaggacagtttgaaacatttgatctcatgacacttcatccaatagaaattgcacgtcagctgacacttttggagtctgatctttacaggaaagttcaaccgtctgaacttgtagggagtgtgtggaccaaagaagataaagaaataaattctccaaatttattaaaaatgattcgccataccacaaatctcaccctctggtttgaaaaatgcattgtggaagcagaaaattttgaagaacgggtggcagtactaagtagaattatagaaattctgcaagtttttcaagatttgaataatttcaatggcgtattggagatagtcagtgcagtaaattcagtgtcagtatacagactagaccatacctttgaggcactgcaggaaaggaaaaggaaaattttggacgaagctgtggaattaagtcaagatcactttaaaaaatacctagtaaaacttaagtcaatcaatccaccttgtgtgcctttttttggaatatatttaacaaatattctgaagaccgaagaagggaataatgattttttaaaaaagaaagggaaagatttaatcaatttcagtaagaggaggaaagtagctgaaattactggagaaattcagcagtatcagaatcagccttactgtttacggatagaaccagatatgaggagattctttgaaaaccttaaccccatgggaagtgcatctgaaaaagagtttacagattatttgttcaacaagtcactagaaattgaacctcgaaactgcaaacagccacctcgatttcctaggaaatcaactttttccttaaaatctcctggaataaggcctaacacaggccgacatggctctacctcaggtactttacgaggtcacccaacaccattagaaagagaaccatgtaaaataagctttagtcggattgctgaaactgagctggaatcaacagtgtcagcaccaacctctccaaatacaccatctactccaccagtatctgcttcttcagaccttagtgtatttttagatgtggatctcaacagctcctgtggcagcaatagcatctttgctccagtgcttttgccacattcaaagtctttctttagttcatgtggtagtttacataaactaagtgaagagcccctgattcctcctcctcttcctcctcgaaaaaagtttgatcatgatgcttcaaattccaagggaaatatgaaatctgatgatgatcctcctgctattccaccgagacagcctcctcctccaaaggtaaaacccagagttcctgttcctactggtgcatttgatgggcctctgcatagtccacctccgccaccaccaagagatcctcttcctgatacccctccaccagttccccttcggcctccagaacactttataaactgtccatttaatcttcagccacctccactggggcatcttcacagagattcagactggctcagagacattagtacgtgtccaaattcgccaagcactcctcctagcacaccctctccaagggtaccgcgtcgatgctatgtgctcagttctagtcagaataatcttgctcatcctccagctccccctgttccaccaaggcagaattcaagccctcatctgccaaaactgccaccaaagacttacaaacgggagctttcgcaccccccattgtacagactgcctttgctagaaaatgcagaaactccccaatgaccttagccatatgtagtcattgacactggaatggtatttgtaaagttttttttttaatttattcaaaaaaagacatagtattttagtactttttacaaataatgctcttacaaaaatgctactgatcaaataagcttttaagaattggaaaaataaaaatacaaaagtccttcaccattatcctcaggtgatcagtagcattgccttgtcttggatcctcagtgctgccaaaaggccagtataaagaatttatatttgcactgtaaactctgcaaaaatatggtttaaagtgacatgattgcactgaaaagggatagtgcttttgtgaaatttttcaaatttgagtaatagatgcctttttaaggcagtgaatttacacaaatatgggaggggtatatggtgttactgatttttaaacctctttgaccatcttctagtttttacttctagtttttacatctaggagaattgtgaataacaccaactgttcttaaactctttaatgccatgtcttaaatgccggtatttgctgctgaagacaaaaatgaaaagtaggatgaaaataatagaatggcactgtaagtgtttattattttgtcaaaatgtaaacaaagactacataacccaatgatggagggaaaaagggcatgtatctcattcagatgtgccttttgtttttgcagactatgacgtctttagctaatgaattgcctattgttatggaaaacagttaatatgccatgtatgtacagttttgtttatattgtatatttaaagatactgctaataacctatataaatttaagtgacttgaggcctataatacaatctgctactttactaattcataaattcaaaaaaaattctatggcataggaaccaactgccttgccttcaagacctagtaactttctctataaatctcgtgttaactgaaattttttttaaatatattttttagattggtaatatttaaaccagcaaatacttaaagctttattaaacattttaatcagataagtgagtaaagcttttatttgccatttggatgccttcgttcaaagtgatagagtgttttgctgatagtgctgtagcagcagttgtaaagtagccaaaagccacgttgtttatttactggtttgtggccttttactgtgctttgtatcagagttcttaacaagattaataaatcaccccagtcttaatttttaaaagacttttaaaatatgtgttttcattataaggaacaaagggggagattgttgagtcctatagacacacacacacacacacacaattttttcttcactgttaaatgtgagctgcaggcttctagcaaccacttttatgaattcatacaaaaaactaggagcatactaggaacttgaaaaggaagattgtaagattatagccatctttggtaggatcttggaagctgattgcatttaagccttgtaactactatgtaaatcaagtgtccaacttggtaaactctgaggttggctttgttttttaaagagcagattataatagttttgtctgggaaagtgatttaaacggcctcttcgttaagccaaacgtgtgatttagggtagagggaggctgccaagcgcgtcgggtaagcaggggccccacgctcggccccgcccaggtaacgctgccttccgggctttgttaactcgcgcgcgctgcgtcgccaactcagcggcgggcagggggcggagccgcagggcggggcggtgcgcgttgatgtgacgtccctgcgcgcgccgctttctgttgccgggcgcaatggcggatacgctggagtcctcgctggaggacccactgcggagctttgtgcgagttttggagaagcgggatggtacagtgctacgactacagcagtatagctccggtggcgtgggttgcgttgtgtgggacgctgccattgtcctttctaaatacctggaaacgcccgagttttctggcgacggggcccacgcgctgagccggcggtcggtgctggagctgggttcgggcaccggggccgtggggctcatggctgctaccctcgggtaagagctggcgggcgggcgggatgtgggggcgccttcttgctggggaaatccggattacaggctttcccccctgtgcctacacctcagtcgacgttattttatagggctgatgttgtagtcaccgatcttgaggaattgcaagacttgctgaagatgaatattaatatgaacaagcatcttgtcactggttctgttcaagccaaggtactgaaatggtttgtatggcctttcagcttgttttaagatattgatttgtagtttgttttgaattgcgtttcattaaaaggatggaaggggactttccggttctttataaaacaagagtattttgaattattaaaacaattgaaatatttgtttggcatttttaaggggggaagaaatagaaggctttccttctccacccgacttcatactgatggccgactgcatatactatgaagaggtaagtatccagtgagcgaagtctcttcacttagaagatgaaccttattccatgaattctaaagcacacgtttcttcacattttaacatctttgaatccgggatttgccttatagttgatgcagtaaagagaagataaaagtcaccagggaccatatgtatatacgctcatcattatcataccgacctggtgaagcatgttgagaaaagtgttatatgcattttactagaggcttctgtaaaaattttaaaggattttgccaattggatgttatgaaaagccaaaatcctctctttttcccttggttgttcccacggaacatgttaaccatgacattgagaattaagttataaataattcattgttcttttctttaaataccagtttgggccactgcacctagcctagagctttaattacatgtgctttgttggattgattcaaagatggataaattgtaggggagctataaatacccctgtacctcctcaacctacttttagagtagaaaaatttttaaatcaaaaacaaaaaatatattcttttttaaatagtctttggagccattgctgaaaactctaaaagatatcagcggatttgaaacttgtattatatgttgttatgaacaacgaacaatggggaaaaatccagaaattgagaaaaaatattttgagctccttcagctagattttgactttgaaaaaattcctttggaaaaacatgatgaagagtatcgaagtgaagatattcatattatatacatcagaaagaaaaaatcgaaatttccatcgtgaagcctttaatcatcttacccaaggctctaacaacctgggtaaactaaagatgtgaatagagcatgtgaatacagcatgggaagattgtgttcacagatttttttttccggcacgtccttagagatccgatgtatagatgatgaccaccaggggctgtctgcaatacgaaaaattcctgcttgcctgcctgcctgccaatggccctgaatccagcttaggttacttagttcagcatcaagttcttcttaaatgttgggaatcagttattcaaataaaaattggtattgaggcgaggctgaaatctgccaaaaacagccaacatgatttgactggaccttttacaggaagctagagataaatttctgaagagaactatctgctattatataataatgttttaaattcaaactagtaaattttagtttgtcttcagagtttaaaaggttttcattttgtacataattatacaatatttatcatttgtattttccacttcatttcttttaaaatatctttaatactgaaatgttcttttaattttaaaaagaactgagatattgtcttgtatacttatattggccaaagttttcttttcctccaccatacatatctatgtgatttaatcagtaaattgtactgtaatgagttgctaagaagacaaatcagaagattggaggaacaaaagatatctttacagatttttcatttgagcatggagtgagaatagaaagaccagtttcaggcttatgcacttacgtggctcatgcactttatgtatatgttccaggaaaatctggcttaaaaatactggtattgtttacatgaagcagtgaaaggtttttgaataactacaaatgtagttctatatgtatataccaaatgaatttctgttctgtgtctctctgttttatgttatgaagccattcgctcatatacaataatctgtcaaggactttaatcatacttgttccaaagagtagtaaccggatggaattctggtatttacaggcattggtgctagatggtacattttatgtgttaaaataaacattgtttttgaga

SEQ ID NO: 321051 - DNA, 8406 bp, Homo sapiens
cactctgcgctgctgctaaaggggcagcaacggcggccagcgctgtgcgcgccatagcgaggctcgctcgcccgacgcgcactccgggtcggtccccagagctctgtggaggtgactcgagtgggcagggccgggcggcgctgtcggctgggagggcggggaggaggcgatgaggagacgagcagccgccgccgccgccgccgctgctcaccgcccgccgcggccgtagcgggagtcggggcggggctgggccagctgtacccctgacgggccgcgaacccagacaaaggaggaggagccgccccagaagcgggccagcgccgccgggaaaggaggtcgccgcccggggtcgcccgggcttgcgggtcgccgcgcttcctctgcgggcgctgcgggaggcgagggccgcctcggcggaggaagccgaccccggggtctccgccagcccgccggcgccgcctccgagccgcctcggccgtagcctcggcccgggcgggaggcggcggccgccggcgaggcgaggcggcccgcgccctgcctgtcaggccaccggcccggcccgcgggctgcccccgatgcggaggcgctgtcgccggggccatgcagcaggcgccgcagccttacgagttcttcagcgaggagaacagtccgaaatggcggggactgttggtctcggccctgcggaaggttcaggaacaagtgcatcccactctctcagctaatgaagagtctctctattatattgaagagctgatttttcagctgcttaataaattatgcatggcccagccaaggactgttcaagatgtagaggagcgagttcagaagacctttcctcacccaattgataaatgggccattgctgatgcacaatctgctatagaaaaacgaaaacgaagaaatcctcttttactgcctgtggacaaaatccatccttcgttgaaggaagtattagggtacaaagtggactaccatgtatccctatatattgtggctgtactagagtatatctcagctgatattttaaaattggctggtaattatgtttttaatatccggcattatgaaatatctcagcaggacattaaagtgtcaatgtgtgcggataaggttttgatggacatgtttgatcaggatgacataggtttggtttctctctgtgaagatgaacctagttcttctggtgaattaaactactatgatcttgtcagaactgaaatcgcagaagaaagacagtatctacgggaattaaatatgatcataaaagtgtttcgagaagcctttctttctgatagaaagctgtttaaaccttctgatatcgaaaagatttttagtaacatttcagatatacatgaattgactgtgaaacttttaggtttgattgaagacacagttgaaatgactgatgaaagcagtcctcatcccttagctggcagctgttttgaagatttggcagaagagcaagcatttgatccttatgaaacattatcacaggacattctttcaccagagtttcatgaacatttcaataaattgatggccagacctgcagttgctctacactttcagtccattgctgatggttttaaagaggcagttcgttatgtccttccacgtcttatgctggtgccagtgtatcactgttggcactactttgagttactaaagcaattgaaagcatgtagtgaagaacaagaagacagagaatgtttgaaccaagctattactgctctcatgaatctccaaggtagcatggaccgaatttacaagcagtattcacctagacgtcgacctggagatcctgtttgccctttttatagtcaccaattaagaagcaaacacctggctatcaaaaaaatgaatgaaattcagaaaaatatcgatggatgggaaggcaaagatattggacagtgttgtaatgaattcattatggagggaccattgacaagaatcggtgccaaacatgaacggcatatttttctgtttgatggcttaatgatcagttgtaaacctaatcatggccagactcggcttccaggttacagtagtgcagaatacaggttaaaagaaaaatttgtcatgaggaaaatacaaatttgtgataaagaagatacttgtgagcacaagcatgcatttgaattagtatccaaagatgagaacagcataatatttgctgctaagtctgctgaagaaaaaaacaactggatggcagcccttatttctcttcattatcgtagtactctagatcgaatgttagattcagtattattgaaagaagaaaatgagcaaccactgagattaccaagtcctgaagtatatcgttttgtagtaaaagactctgaggaaaacattgtttttgaagacaacttgcaaagtagaagtggcatccccattattaaaggaggaactgtagtgaaattaattgaaaggttaacatatcatatgtatgcagatcccaattttgttcgtacttttcttaccacatatcgttcattttgtaaaccacaggaattgctgagcttactgattgaacggtttgaaattccagagccagaacctactgacgcagacaaattggcaatagagaaaggcgagcagccaatcagtgcagaccttaaaagatttcgcaaggaatatgtccaaccagtacaacttaggatcttaaatgtatttcggcattgggttgaacatcatttttatgactttgaaagagacttggaattgcttgaaagactagaatccttcatttcaagtgtaagagggaaagctatgaaaaaatgggtagagtcaattgctaagatcatcaggaggaagaagcaagctcaggcaaatggagtaagccataatattacctttgaaagtccacctccaccaattgaatggcatatcagcaaaccaggacagtttgaaacatttgatctcatgacacttcatccaatagaaattgcacgtcagctgacacttttggagtctgatctttacaggaaagttcaaccgtctgaacttgtagggagtgtgtggaccaaagaagataaagaaataaattctccaaatttattaaaaatgattcgccataccacaaatctcaccctctggtttgaaaaatgcattgtggaagcagaaaattttgaagaacgggtggcagtactaagtagaattatagaaattctgcaagtttttcaagatttgaataatttcaatggcgtattggagatagtcagtgcagtaaattcagtgtcagtatacagactagaccatacctttgaggcactgcaggaaaggaaaaggaaaattttggacgaagctgtggaattaagtcaagatcactttaaaaaatacctagtaaaacttaagtcaatcaatccaccttgtgtgcctttttttggaatatatttaacaaatattctgaagaccgaagaagggaataatgattttttaaaaaagaaagggaaagatttaatcaatttcagtaagaggaggaaagtagctgaaattactggagaaattcagcagtatcagaatcagccttactgtttacggatagaaccagatatgaggagattctttgaaaaccttaaccccatgggaagtgcatctgaaaaagagtttacagattatttgttcaacaagtcactagaaattgaacctcgaaactgcaaacagccacctcgatttcctaggaaatcaactttttccttaaaatctcctggaataaggcctaacacaggccgacatggctctacctcaggtactttacgaggtcacccaacaccattagaaagagaaccatgtaaaataagctttagtcggattgctgaaactgagctggaatcaacagtgtcagcaccaacctctccaaatacaccatctactccaccagtatctgcttcttcagaccttagtgtatttttagatgtggatctcaacagctcctgtggcagcaatagcatctttgctccagtgcttttgccacattcaaagtctttctttagttcatgtggtagtttacataaactaagtgaagagcccctgattcctcctcctcttcctcctcgaaaaaagtttgatcatgatgcttcaaattccaagggaaatatgaaatctgatgatgatcctcctgctattccaccgagacagcctcctcctccaaaggtaaaacccagagttcctgttcctactggtgcatttgatgggcctctgcatagtccacctccgccaccaccaagagatcctcttcctgatacccctccaccagttccccttcggcctccagaacactttataaactgtccatttaatcttcagccacctccactggggcatcttcacagagattcagactggctcagagacattagtacgtgtccaaattcgccaagcactcctcctagcacaccctctccaagggtaccgcgtcgatgctatgtgctcagttctagtcagaataatcttgctcatcctccagctccccctgttccaccaaggcagaattcaagccctcatctgccaaaactgccaccaaagacttacaaacgggagctttcgcaccccccattgtacagactgcctttgctagaaaatgcagaaactccccaatgaccttagccatatgtagtcattgacactggaatggtatttgtaaagttttttttttaatttattcaaaaaaagacatagtattttagtactttttacaaataatgctcttacaaaaatgctactgatcaaataagcttttaagaattggaaaaataaaaatacaaaagtccttcaccattatcctcaggtgatcagtagcattgccttgtcttggatcctcagtgctgccaaaaggccagtataaagaatttatatttgcactgtaaactctgcaaaaatatggtttaaagtgacatgattgcactgaaaagggatagtgcttttgtgaaatttttcaaatttgagtaatagatgcctttttaaggcagtgaatttacacaaatatgggaggggtatatggtgttactgatttttaaacctctttgaccatcttctagtttttacttctagtttttacatctaggagaattgtgaataacaccaactgttcttaaactctttaatgccatgtcttaaatgccggtatttgctgctgaagacaaaaatgaaaagtaggatgaaaataatagaatggcactgtaagtgtttattattttgtcaaaatgtaaacaaagactacataacccaatgatggagggaaaaagggcatgtatctcattcagatgtgccttttgtttttgcagactatgacgtctttagctaatgaattgcctattgttatggaaaacagttaatatgccatgtatgtacagttttgtttatattgtatatttaaagatactgctaataacctatataaatttaagtgacttgaggcctataatacaatctgctactttactaattcataaattcaaaaaaaattctatggcataggaaccaactgccttgccttcaagacctagtaactttctctataaatctcgtgttaactgaaattttttttaaatatattttttagattggtaatatttaaaccagcaaatacttaaagctttattaaacattttaatcagataagtgagtaaagcttttatttgccatttggatgccttcgttcaaagtgatagagtgttttgctgatagtgctgtagcagcagttgtaaagtagccaaaagccacgttgtttatttactggtttgtggccttttactgtgctttgtatcagagttcttaacaagattaataaatcaccccagtcttaatttttaaaagacttttaaaatatgtgttttcattataaggaacaaagggggagattgttgagtcctatagacacacacacacacacacacaattttttcttcactgttaaatgtgagctgcaggcttctagcaaccacttttatgaattcatacaaaaaactaggagcatactaggaacttgaaaaggaagattgtaagattatagccatctttggtaggatcttggaagctgattgcatttaagccttgtaactactatgtaaatcaagtgtccaacttggtaaactctgaggttggctttgttttttaaagagcagattataatagttttgtctgggaaagtgatttaaacggcctcttcgttaagccaaacgtgtgatttagggtagagggaggctgccaagcgcgtcgggtaagcaggggccccacgctcggccccgcccaggtaacgctgccttccgggctttgttaactcgcgcgcgctgcgtcgccaactcagcggcgggcagggggcggagccgcagggcggggcggtgcgcgttgatgtgacgtccctgcgcgcgccgctttctgttgccgggcgcaatggcggatacgctggagtcctcgctggaggacccactgcggagctttgtgcgagttttggagaagcgggatggtacagtgctacgactacagcagtatagctccggtggcgtgggttgcgttgtgtgggacgctgccattgtcctttctaaatacctggaaacgcccgagttttctggcgacggggcccacgcgctgagccggcggtcggtgctggagctgggttcgggcaccggggccgtggggctcatggctgctaccctcgggtaagagctggcgggcgggcgggatgtgggggcgccttcttgctggggaaatccggattacaggctttcccccctgtgcctacacctcagtcgacgttattttatagggctgatgttgtagtcaccgatcttgaggaattgcaagacttgctgaagatgaatattaatatgaacaagcatcttgtcactggttctgttcaagccaaggtactgaaatggtttgtatggcctttcagcttgttttaagatattgatttgtagtttgttttgaattgcgtttcattaaaaggatggaaggggactttccggttctttataaaacaagagtattttgaattattaaaacaattgaaatatttgtttggcatttttaaggggggaagaaatagaaggctttccttctccacccgacttcatactgatggccgactgcatatactatgaagagtctttggagccattgctgaaaactctaaaagatatcagcggatttgaaacttgtattatatgttgttatgaacaacgaacaatggggaaaaatccagaaattgagaaaaaatattttgagctccttcagctagattttgactttgaaaaaattcctttggaaaaacatgatgaagagtatcgaagtgaagatattcatattatatacatcagaaagaaaaaatcgaaatttccatcgtgaagcctttaatcatcttacccaaggctctaacaacctgggtaaactaaagatgtgaatagagcatgtgaatacagcatgggaagattgtgttcacagatttttttttccggcacgtccttagagatccgatgtatagatgatgaccaccaggggctgtctgcaatacgaaaaattcctgcttgcctgcctgcctgccaatggccctgaatccagcttaggttacttagttcagcatcaagttcttcttaaatgttgggaatcagttattcaaataaaaattggtattgaggcgaggctgaaatctgccaaaaacagccaacatgatttgactggaccttttacaggaagctagagataaatttctgaagagaactatctgctattatataataatgttttaaattcaaactagtaaattttagtttgtcttcagagtttaaaaggttttcattttgtacataattatacaatatttatcatttgtattttccacttcatttcttttaaaatatctttaatactgaaatgttcttttaattttaaaaagaactgagatattgtcttgtatacttatattggccaaagttttcttttcctccaccatacatatctatgtgatttaatcagtaaattgtactgtaatgagttgctaagaagacaaatcagaagattggaggaacaaaagatatctttacagatttttcatttgagcatggagtgagaatagaaagaccagtttcaggcttatgcacttacgtggctcatgcactttatgtatatgttccaggaaaatctggcttaaaaatactggtattgtttacatgaagcagtgaaaggtttttgaataactacaaatgtagttctatatgtatataccaaatgaatttctgttctgtgtctctctgttttatgttatgaagccattcgctcatatacaataatctgtcaaggactttaatcatacttgttccaaagagtagtaaccggatggaattctggtatttacaggcattggtgctagatggtacattttatgtgttaaaataaacattgtttttgaga

SEQ ID NO: 321052 - DNA, 8120 bp, Homo sapiens
cactctgcgctgctgctaaaggggcagcaacggcggccagcgctgtgcgcgccatagcgaggctcgctcgcccgacgcgcactccgggtcggtccccagagctctgtggaggtgactcgagtgggcagggccgggcggcgctgtcggctgggagggcggggaggaggcgatgaggagacgagcagccgccgccgccgccgccgctgctcaccgcccgccgcggccgtagcgggagtcggggcggggctgggccagctgtacccctgacgggccgcgaacccagacaaaggaggaggagccgccccagaagcgggccagcgccgccgggaaaggaggtcgccgcccggggtcgcccgggcttgcgggtcgccgcgcttcctctgcgggcgctgcgggaggcgagggccgcctcggcggaggaagccgaccccggggtctccgccagcccgccggcgccgcctccgagccgcctcggccgtagcctcggcccgggcgggaggcggcggccgccggcgaggcgaggcggcccgcgccctgcctgtcaggccaccggcccggcccgcgggctgcccccgatgcggaggcgctgtcgccggggccatgcagcaggcgccgcagccttacgagttcttcagcgaggagaacagtccgaaatggcggggactgttggtctcggccctgcggaaggttcaggaacaagtgcatcccactctctcagctaatgaagagtctctctattatattgaagagctgatttttcagctgcttaataaattatgcatggcccagccaaggactgttcaagatgtagaggagcgagttcagaagacctttcctcacccaattgataaatgggccattgctgatgcacaatctgctatagaaaaacgaaaacgaagaaatcctcttttactgcctgtggacaaaatccatccttcgttgaaggaagtattagggtacaaagtggactaccatgtatccctatatattgtggctgtactagagtatatctcagctgatattttaaaattggctggtaattatgtttttaatatccggcattatgaaatatctcagcaggacattaaagtgtcaatgtgtgcggataaggttttgatggacatgtttgatcaggatgacataggtttggtttctctctgtgaagatgaacctagttcttctggtgaattaaactactatgatcttgtcagaactgaaatcgcagaagaaagacagtatctacgggaattaaatatgatcataaaagtgtttcgagaagcctttctttctgatagaaagctgtttaaaccttctgatatcgaaaagatttttagtaacatttcagatatacatgaattgactgtgaaacttttaggtttgattgaagacacagttgaaatgactgatgaaagcagtcctcatcccttagctggcagctgttttgaagatttggcagaagagcaagcatttgatccttatgaaacattatcacaggacattctttcaccagagtttcatgaacatttcaataaattgatggccagacctgcagttgctctacactttcagtccattgctgatggttttaaagaggcagttcgttatgtccttccacgtcttatgctggtgccagtgtatcactgttggcactactttgagttactaaagcaattgaaagcatgtagtgaagaacaagaagacagagaatgtttgaaccaagctattactgctctcatgaatctccaaggtagcatggaccgaatttacaagcagtattcacctagacgtcgacctggagatcctgtttgccctttttatagtcaccaattaagaagcaaacacctggctatcaaaaaaatgaatgaaattcagaaaaatatcgatggatgggaaggcaaagatattggacagtgttgtaatgaattcattatggagggaccattgacaagaatcggtgccaaacatgaacggcatatttttctgtttgatggcttaatgatcagttgtaaacctaatcatggccagactcggcttccaggttacagtagtgcagaatacaggttaaaagaaaaatttgtcatgaggaaaatacaaatttgtgataaagaagatacttgtgagcacaagcatgcatttgaattagtatccaaagatgagaacagcataatatttgctgctaagtctgctgaagaaaaaaacaactggatggcagcccttatttctcttcattatcgtagtactctagatcgaatgttagattcagtattattgaaagaagaaaatgagcaaccactgagattaccaagtcctgaagtatatcgttttgtagtaaaagactctgaggaaaacattgtttttgaagacaacttgcaaagtagaagtggcatccccattattaaaggaggaactgtagtgaaattaattgaaaggttaacatatcatatgtatgcagatcccaattttgttcgtacttttcttaccacatatcgttcattttgtaaaccacaggaattgctgagcttactgattgaacggtttgaaattccagagccagaacctactgacgcagacaaattggcaatagagaaaggcgagcagccaatcagtgcagaccttaaaagatttcgcaaggaatatgtccaaccagtacaacttaggatcttaaatgtatttcggcattgggttgaacatcatttttatgactttgaaagagacttggaattgcttgaaagactagaatccttcatttcaagtgtaagagggaaagctatgaaaaaatgggtagagtcaattgctaagatcatcaggaggaagaagcaagctcaggcaaatggagtaagccataatattacctttgaaagtccacctccaccaattgaatggcatatcagcaaaccaggacagtttgaaacatttgatctcatgacacttcatccaatagaaattgcacgtcagctgacacttttggagtctgatctttacaggaaagttcaaccgtctgaacttgtagggagtgtgtggaccaaagaagataaagaaataaattctccaaatttattaaaaatgattcgccataccacaaatctcaccctctggtttgaaaaatgcattgtggaagcagaaaattttgaagaacgggtggcagtactaagtagaattatagaaattctgcaagtttttcaagatttgaataatttcaatggcgtattggagatagtcagtgcagtaaattcagtgtcagtatacagactagaccatacctttgaggcactgcaggaaaggaaaaggaaaattttggacgaagctgtggaattaagtcaagatcactttaaaaaatacctagtaaaacttaagtcaatcaatccaccttgtgtgcctttttttggaatatatttaacaaatattctgaagaccgaagaagggaataatgattttttaaaaaagaaagggaaagatttaatcaatttcagtaagaggaggaaagtagctgaaattactggagaaattcagcagtatcagaatcagccttactgtttacggatagaaccagatatgaggagattctttgaaaaccttaaccccatgggaagtgcatctgaaaaagagtttacagattatttgttcaacaagtcactagaaattgaacctcgaaactgcaaacagccacctcgatttcctaggaaatcaactttttccttaaaatctcctggaataaggcctaacacaggccgacatggctctacctcaggtactttacgaggtcacccaacaccattagaaagagaaccatgtaaaataagctttagtcggattgctgaaactgagctggaatcaacagtgtcagcaccaacctctccaaatacaccatctactccaccagtatctgcttcttcagaccttagtgtatttttagatgtggatctcaacagctcctgtggcagcaatagcatctttgctccagtgcttttgccacattcaaagtctttctttagttcatgtggtagtttacataaactaagtgaagagcccctgattcctcctcctcttcctcctcgaaaaaagtttgatcatgatgcttcaaattccaagggaaatatgaaatctgatgatgatcctcctgctattccaccgagacagcctcctcctccaaaggtaaaacccagagttcctgttcctactggtgcatttgatgggcctctgcatagtccacctccgccaccaccaagagatcctcttcctgatacccctccaccagttccccttcggcctccagaacactttataaactgtccatttaatcttcagccacctccactggggcatcttcacagagattcagactggctcagagacattagtacgtgtccaaattcgccaagcactcctcctagcacaccctctccaagggtaccgcgtcgatgctatgtgctcagttctagtcagaataatcttgctcatcctccagctccccctgttccaccaaggcagaattcaagccctcatctgccaaaactgccaccaaagacttacaaacgggagctttcgcaccccccattgtacagactgcctttgctagaaaatgcagaaactccccaatgaccttagccatatgtagtcattgacactggaatggtatttgtaaagttttttttttaatttattcaaaaaaagacatagtattttagtactttttacaaataatgctcttacaaaaatgctactgatcaaataagcttttaagaattggaaaaataaaaatacaaaagtccttcaccattatcctcaggtgatcagtagcattgccttgtcttggatcctcagtgctgccaaaaggccagtataaagaatttatatttgcactgtaaactctgcaaaaatatggtttaaagtgacatgattgcactgaaaagggatagtgcttttgtgaaatttttcaaatttgagtaatagatgcctttttaaggcagtgaatttacacaaatatgggaggggtatatggtgttactgatttttaaacctctttgaccatcttctagtttttacttctagtttttacatctaggagaattgtgaataacaccaactgttcttaaactctttaatgccatgtcttaaatgccggtatttgctgctgaagacaaaaatgaaaagtaggatgaaaataatagaatggcactgtaagtgtttattattttgtcaaaatgtaaacaaagactacataacccaatgatggagggaaaaagggcatgtatctcattcagatgtgccttttgtttttgcagactatgacgtctttagctaatgaattgcctattgttatggaaaacagttaatatgccatgtatgtacagttttgtttatattgtatatttaaagatactgctaataacctatataaatttaagtgacttgaggcctataatacaatctgctactttactaattcataaattcaaaaaaaattctatggcataggaaccaactgccttgccttcaagacctagtaactttctctataaatctcgtgttaactgaaattttttttaaatatattttttagattggtaatatttaaaccagcaaatacttaaagctttattaaacattttaatcagataagtgagtaaagcttttatttgccatttggatgccttcgttcaaagtgatagagtgttttgctgatagtgctgtagcagcagttgtaaagtagccaaaagccacgttgtttatttactggtttgtggccttttactgtgctttgtatcagagttcttaacaagattaataaatcaccccagtcttaatttttaaaagacttttaaaatatgtgttttcattataaggaacaaagggggagattgttgagtcctatagacacacacacacacacacacaattttttcttcactgttaaatgtgagctgcaggcttctagcaaccacttttatgaattcatacaaaaaactaggagcatactaggaacttgaaaaggaagattgtaagattatagccatctttggtaggatcttggaagctgattgcatttaagccttgtaactactatgtaaatcaagtgtccaacttggtaaactctgaggttggctttgttttttaaagagcagattataatagttttgtctgggaaagtgatttaaacggcctcttcgttaagccaaacgtgtgatttagggtagagggaggctgccaagcgcgtcgggtaagcaggggccccacgctcggccccgcccaggtaacgctgccttccgggctttgttaactcgcgcgcgctgcgtcgccaactcagcggcgggcagggggcggagccgcagggcggggcggtgcgcgttgatgtgacgtccctgcgcgcgccgctttctgttgccgggcgcaatggcggatacgctggagtcctcgctggaggacccactgcggagctttgtgcgagttttggagaagcgggatggtacagtgctacgactacagcagtatagctccggtggcgtgggttgcgttgtgtgggacgctgccattgtcctttctaaatacctggaaacgcccgagttttctggcgacggggcccacgcgctgagccggcggtcggtgctggagctgggttcgggcaccggggccgtggggctcatggctgctaccctcgggtaagagctggcgggcgggcgggatgtgggggcgccttcttgctggggaaatccggattacaggctttcccccctgtgcctacacctcagtcgacgttattttatagggctgatgttgtagtcaccgatcttgaggaattgcaagacttgctgaagatgaatattaatatgaacaagcatcttgtcactggttctgttcaagccaaggtactgaaatggtttgtatggcctttcagcttgttttaagatattgatttgtagtttgttttgaattgcgtttcattaaaaggatggaaggggactttccggttctttataaaacaagagtattttgaattattaaaacaattgaaatatttgtttggcatttttaaggggggaagaaatagaaggctttccttctccacccgacttcatactgatggccgactgcatatactatgaagaggtaagtatccagtgagcgaagtctcttcacttagaagatgaaccttattccatgaattctaaagcacacgtttcttcacattttaacatctttgaatccgggatttgccttatagttgatgcagtaaagagaagataaaagtcaccagggaccatatgtatatacgctcatcattatcataccgacctggtgaagcatgttgagaaaagtgttatatgcattttactagaggcttctgtaaaaattttaaaggattttgccaattggatgttatgaaaagccaaaatcctctctttttcccttggttgttcccacggaacatgttaaccatgacattgagaattaagttataaataattcattgttcttttctttaaataccagtttgggccactgcacctagcctagagctttaattacatgtgctttgttggattgattcaaagatggataaattgtaggggagctataaatacccctgtacctcctcaacctacttttagagtagaaaaatttttaaatcaaaaacaaaaaatatattcttttttaaatagtctttggagccattgctgaaaactctaaaagatatcagcggatttgaaacttgtattatatgttgttatgaacaacgaacaatggggaaaaatccagaaattgagaaaaaatattttgaggaggtaagtattaagtactctattatctttgtagtgatttcccttcaggggggctgtatgtgactcttcaagtatattatggtaattttgggtggggaaaacatgctgtttgtgtgaagctgaggaaaggatcttcacagcccatgattctacgaagctcccctttttcatcttttctgatactttatttcatttctaattagttgatctatggctacagaagaatgttaatacgggtgccactcctttttaagaacagttttcagtgtttattaaacatgatgctgcctttggggaacatctcaatgatgtatgtattacctttggagaatacgtgataga

SEQ ID NO: 321053 - DNA, 5615 bp, Homo sapiens
cactctgcgctgctgctaaaggggcagcaacggcggccagcgctgtgcgcgccatagcgaggctcgctcgcccgacgcgcactccgggtcggtccccagagctctgtggaggtgactcgagtgggcagggccgggcggcgctgtcggctgggagggcggggaggaggcgatgaggagacgagcagccgccgccgccgccgccgctgctcaccgcccgccgcggccgtagcgggagtcggggcggggctgggccagctgtacccctgacgggccgcgaacccagacaaaggaggaggagccgccccagaagcgggccagcgccgccgggaaaggaggtcgccgcccggggtcgcccgggcttgcgggtcgccgcgcttcctctgcgggcgctgcgggaggcgagggccgcctcggcggaggaagccgaccccggggtctccgccagcccgccggcgccgcctccgagccgcctcggccgtagcctcggcccgggcgggaggcggcggccgccggcgaggcgaggcggcccgcgccctgcctgtcaggccaccggcccggcccgcgggctgcccccgatgcggaggcgctgtcgccggggccatgcagcaggcgccgcagccttacgagttcttcagcgaggagaacagtccgaaatggcggggactgttggtctcggccctgcggaaggttcaggaacaagtgcatcccactctctcagctaatgaagagtctctctattatattgaagagctgatttttcagctgcttaataaattatgcatggcccagccaaggactgttcaagatgtagaggagcgagttcagaagacctttcctcacccaattgataaatgggccattgctgatgcacaatctgctatagaaaaacgaaaacgaagaaatcctcttttactgcctgtggacaaaatccatccttcgttgaaggaagtattagggtacaaagtggactaccatgtatccctatatattgtggctgtactagagtatatctcagctgatattttaaaattggctggtaattatgtttttaatatccggcattatgaaatatctcagcaggacattaaagtgtcaatgtgtgcggataaggttttgatggacatgtttgatcaggatgacataggtttggtttctctctgtgaagatgaacctagttcttctggtgaattaaactactatgatcttgtcagaactgaaatcgcagaagaaagacagtatctacgggaattaaatatgatcataaaagtgtttcgagaagcctttctttctgatagaaagctgtttaaaccttctgatatcgaaaagatttttagtaacatttcagatatacatgaattgactgtgaaacttttaggtttgattgaagacacagttgaaatgactgatgaaagcagtcctcatcccttagctggcagctgttttgaagatttggcagaagagcaagcatttgatccttatgaaacattatcacaggacattctttcaccagagtttcatgaacatttcaataaattgatggccagacctgcagttgctctacactttcagtccattgctgatggttttaaagaggcagttcgttatgtccttccacgtcttatgctggtgccagtgtatcactgttggcactactttgagttactaaagcaattgaaagcatgtagtgaagaacaagaagacagagaatgtttgaaccaagctattactgctctcatgaatctccaaggtagcatggaccgaatttacaagcagtattcacctagacgtcgacctggagatcctgtttgccctttttatagtcaccaattaagaagcaaacacctggctatcaaaaaaatgaatgaaattcagaaaaatatcgatggatgggaaggcaaagatattggacagtgttgtaatgaattcattatggagggaccattgacaagaatcggtgccaaacatgaacggcatatttttctgtttgatggcttaatgatcagttgtaaacctaatcatggccagactcggcttccaggttacagtagtgcagaatacaggttaaaagaaaaatttgtcatgaggaaaatacaaatttgtgataaagaagatacttgtgagcacaagcatgcatttgaattagtatccaaagatgagaacagcataatatttgctgctaagtctgctgaagaaaaaaacaactggatggcagcccttatttctcttcattatcgtagtactctagatcgaatgttagattcagtattattgaaagaagaaaatgagcaaccactgagattaccaagtcctgaagtatatcgttttgtagtaaaagactctgaggaaaacattgtttttgaagacaacttgcaaagtagaagtggcatccccattattaaaggaggaactgtagtgaaattaattgaaaggttaacatatcatatgtatgcagatcccaattttgttcgtacttttcttaccacatatcgttcattttgtaaaccacaggaattgctgagcttactgattgaacggtttgaaattccagagccagaacctactgacgcagacaaattggcaatagagaaaggcgagcagccaatcagtgcagaccttaaaagatttcgcaaggaatatgtccaaccagtacaacttaggatcttaaatgtatttcggcattgggttgaacatcatttttatgactttgaaagagacttggaattgcttgaaagactagaatccttcatttcaagtgtaagagggaaagctatgaaaaaatgggtagagtcaattgctaagatcatcaggaggaagaagcaagctcaggcaaatggagtaagccataatattacctttgaaagtccacctccaccaattgaatggcatatcagcaaaccaggacagtttgaaacatttgatctcatgacacttcatccaatagaaattgcacgtcagctgacacttttggagtctgatctttacaggaaagttcaaccgtctgaacttgtagggagtgtgtggaccaaagaagataaagaaataaattctccaaatttattaaaaatgattcgccataccacaaatctcaccctctggtttgaaaaatgcattgtggaagcagaaaattttgaagaacgggtggcagtactaagtagaattatagaaattctgcaagtttttcaagatttgaataatttcaatggcgtattggagatagtcagtgcagtaaattcagtgtcagtatacagactagaccatacctttgaggcactgcaggaaaggaaaaggaaaattttggacgaagctgtggaattaagtcaagatcactttaaaaaatacctagtaaaacttaagtcaatcaatccaccttgtgtgcctttttttggaatatatttaacaaatattctgaagaccgaagaagggaataatgattttttaaaaaagaaagggaaagatttaatcaatttcagtaagaggaggaaagtagctgaaattactggagaaattcagcagtatcagaatcagccttactgtttacggatagaaccagatatgaggagattctttgaaaaccttaaccccatgggaagtgcatctgaaaaagagtttacagattatttgttcaacaagtcactagaaattgaacctcgaaactgcaaacagccacctcgatttcctaggaaatcaactttttccttaaaatctcctggaataaggcctaacacaggccgacatggctctacctcaggtactttacgaggtcacccaacaccattagaaagagaaccatgtaaaataagctttagtcggattgctgaaactgagctggaatcaacagtgtcagcaccaacctctccaaatacaccatctactccaccagtatctgcttcttcagaccttagtgtatttttagatgtggatctcaacagctcctgtggcagcaatagcatctttgctccagtgcttttgccacattcaaagtctttctttagttcatgtggtagtttacataaactaagtgaagagcccctgattcctcctcctcttcctcctcgaaaaaagtttgatcatgatgcttcaaattccaagggaaatatgaaatctgatgatgatcctcctgctattccaccgagacagcctcctcctccaaaggtaaaacccagagttcctgttcctactggtgcatttgatgggcctctgcatagtccacctccgccaccaccaagagatcctcttcctgatacccctccaccagttccccttcggcctccagaacactttataaactgtccatttaatcttcagccacctccactggggcatcttcacagagattcagactggctcagagacattagtacgtgtccaaattcgccaagcactcctcctagcacaccctctccaagggtaccgcgtcgatgctatgtgctcagttctagtcagaataatcttgctcatcctccagctccccctgttccaccaaggcagaattcaagccctcatctgccaaaactgccaccaaagacttacaaacgggagctttcgcaccccccattgtacagactgcctttgctagaaaatgcagaaactccccaatgaccttagccatatgtagtcattgacactggaatggtatttgtaaagttttttttttaatttattcaaaaaaagacatagtattttagtactttttacaaataatgctcttacaaaaatgctactgatcaaataagcttttaagaattggaaaaataaaaatacaaaagtccttcaccattatcctcaggtgatcagtagcattgccttgtcttggatcctcagtgctgccaaaaggccagtataaagaatttatatttgcactgtaaactctgcaaaaatatggtttaaagtgacatgattgcactgaaaagggatagtgcttttgtgaaatttttcaaatttgagtaatagatgcctttttaaggcagtgaatttacacaaatatgggaggggtatatggtgttactgatttttaaacctctttgaccatcttctagtttttacttctagtttttacatctaggagaattgtgaataacaccaactgttcttaaactctttaatgccatgtcttaaatgccggtatttgctgctgaagacaaaaatgaaaagtaggatgaaaataatagaatggcactgtaagtgtttattattttgtcaaaatgtaaacaaagactacataacccaatgatggagggaaaaagggcatgtatctcattcagatgtgccttttgtttttgcagactatgacgtctttagctaatgaattgcctattgttatggaaaacagttaatatgccatgtatgtacagttttgtttatattgtatatttaaagatactgctaataacctatataaatttaagtgacttgaggcctataatacaatctgctactttactaattcataaattcaaaaaaaattctatggcataggaaccaactgccttgccttcaagacctagtaactttctctataaatctcgtgttaactgaaattttttttaaatatattttttagattggtaatatttaaaccagcaaatacttaaagctttattaaacattttaatcag

SEQ ID NO: 321054 - DNA, 4914 bp, Homo sapiens
cactctgcgctgctgctaaaggggcagcaacggcggccagcgctgtgcgcgccatagcgaggctcgctcgcccgacgcgcactccgggtcggtccccagagctctgtggaggtgactcgagtgggcagggccgggcggcgctgtcggctgggagggcggggaggaggcgatgaggagacgagcagccgccgccgccgccgccgctgctcaccgcccgccgcggccgtagcgggagtcggggcggggctgggccagctgtacccctgacgggccgcgaacccagacaaaggaggaggagccgccccagaagcgggccagcgccgccgggaaaggaggtcgccgcccggggtcgcccgggcttgcgggtcgccgcgcttcctctgcgggcgctgcgggaggcgagggccgcctcggcggaggaagccgaccccggggtctccgccagcccgccggcgccgcctccgagccgcctcggccgtagcctcggcccgggcgggaggcggcggccgccggcgaggcgaggcggcccgcgccctgcctgtcaggccaccggcccggcccgcgggctgcccccgatgcggaggcgctgtcgccggggccatgcagcaggcgccgcagccttacgagttcttcagcgaggagaacagtccgaaatggcggggactgttggtctcggccctgcggaaggttcaggaacaagtgcatcccactctctcagctaatgaagagtctctctattatattgaagagctgatttttcagctgcttaataaattatgcatggcccagccaaggactgttcaagatgtagaggagcgagttcagaagacctttcctcacccaattgataaatgggccattgctgatgcacaatctgctatagaaaaacgaaaacgaagaaatcctcttttactgcctgtggacaaaatccatccttcgttgaaggaagtattagggtacaaagtggactaccatgtatccctatatattgtggctgtactagagtatatctcagctgatattttaaaattggctggtaattatgtttttaatatccggcattatgaaatatctcagcaggacattaaagtgtcaatgtgtgcggataaggttttgatggacatgtttgatcaggatgacataggtttggtttctctctgtgaagatgaacctagttcttctggtgaattaaactactatgatcttgtcagaactgaaatcgcagaagaaagacagtatctacgggaattaaatatgatcataaaagtgtttcgagaagcctttctttctgatagaaagctgtttaaaccttctgatatcgaaaagatttttagtaacatttcagatatacatgaattgactgtgaaacttttaggtttgattgaagacacagttgaaatgactgatgaaagcagtcctcatcccttagctggcagctgttttgaagatttggcagaagagcaagcatttgatccttatgaaacattatcacaggacattctttcaccagagtttcatgaacatttcaataaattgatggccagacctgcagttgctctacactttcagtccattgctgatggttttaaagaggcagttcgttatgtccttccacgtcttatgctggtgccagtgtatcactgttggcactactttgagttactaaagcaattgaaagcatgtagtgaagaacaagaagacagagaatgtttgaaccaagctattactgctctcatgaatctccaaggtagcatggaccgaatttacaagcagtattcacctagacgtcgacctggagatcctgtttgccctttttatagtcaccaattaagaagcaaacacctggctatcaaaaaaatgaatgaaattcagaaaaatatcgatggatgggaaggcaaagatattggacagtgttgtaatgaattcattatggagggaccattgacaagaatcggtgccaaacatgaacggcatatttttctgtttgatggcttaatgatcagttgtaaacctaatcatggccagactcggcttccaggttacagtagtgcagaatacaggttaaaagaaaaatttgtcatgaggaaaatacaaatttgtgataaagaagatacttgtgagcacaagcatgcatttgaattagtatccaaagatgagaacagcataatatttgctgctaagtctgctgaagaaaaaaacaactggatggcagcccttatttctcttcattatcgtagtactctagatcgaatgttagattcagtattattgaaagaagaaaatgagcaaccactgagattaccaagtcctgaagtatatcgttttgtagtaaaagactctgaggaaaacattgtttttgaagacaacttgcaaagtagaagtggcatccccattattaaaggaggaactgtagtgaaattaattgaaaggttaacatatcatatgtatgcagatcccaattttgttcgtacttttcttaccacatatcgttcattttgtaaaccacaggaattgctgagcttactgattgaacggtttgaaattccagagccagaacctactgacgcagacaaattggcaatagagaaaggcgagcagccaatcagtgcagaccttaaaagatttcgcaaggaatatgtccaaccagtacaacttaggatcttaaatgtatttcggcattgggttgaacatcatttttatgactttgaaagagacttggaattgcttgaaagactagaatccttcatttcaagtgtaagagggaaagctatgaaaaaatgggtagagtcaattgctaagatcatcaggaggaagaagcaagctcaggcaaatggagtaagccataatattacctttgaaagtccacctccaccaattgaatggcatatcagcaaaccaggacagtttgaaacatttgatctcatgacacttcatccaatagaaattgcacgtcagctgacacttttggagtctgatctttacaggaaagttcaaccgtctgaacttgtagggagtgtgtggaccaaagaagataaagaaataaattctccaaatttattaaaaatgattcgccataccacaaatctcaccctctggtttgaaaaatgcattgtggaagcagaaaattttgaagaacgggtggcagtactaagtagaattatagaaattctgcaagtttttcaagatttgaataatttcaatggcgtattggagatagtcagtgcagtaaattcagtgtcagtatacagactagaccatacctttgaggcactgcaggaaaggaaaaggaaaattttggacgaagctgtggaattaagtcaagatcactttaaaaaatacctagtaaaacttaagtcaatcaatccaccttgtgtgcctttttttggaatatatttaacaaatattctgaagaccgaagaagggaataatgattttttaaaaaagaaagggaaagatttaatcaatttcagtaagaggaggaaagtagctgaaattactggagaaattcagcagtatcagaatcagccttactgtttacggatagaaccagatatgaggagattctttgaaaaccttaaccccatgggaagtgcatctgaaaaagagtttacagattatttgttcaacaagtcactagaaattgaacctcgaaactgcaaacagccacctcgatttcctaggaaatcaactttttccttaaaatctcctggaataaggcctaacacaggccgacatggctctacctcaggtactttacgaggtcacccaacaccattagaaagagaaccatgtaaaataagctttagtcggattgctgaaactgagctggaatcaacagtgtcagcaccaacctctccaaatacaccatctactccaccagtatctgcttcttcagaccttagtgtatttttagatgtggatctcaacagctcctgtggcagcaatagcatctttgctccagtgcttttgccacattcaaagtctttctttagttcatgtggtagtttacataaactaagtgaagagcccctgattcctcctcctcttcctcctcgaaaaaagtttgatcatgatgcttcaaattccaagggaaatatgaaatctgatgatgatcctcctgctattccaccgagacagcctcctcctccaaaggtaaaacccagagttcctgttcctactggtgcatttgatgggcctctgcatagtccacctccgccaccaccaagagatcctcttcctgatacccctccaccagttccccttcggcctccagaacactttataaactgtccatttaatcttcagccacctccactggggcatcttcacagagattcagactggctcagagacattagtacgtgtccaaattcgccaagcactcctcctagcacaccctctccaagggtaccgcgtcgatgctatgtgctcagttctagtcagaataatcttgctcatcctccagctccccctgttccaccaaggcagaattcaagccctcatctgccaaaactgccaccaaagacttacaaacgggagctttcgcaccccccattgtacagactgcctttgctagaaaatgcagaaactccccaatgaccttagccatatgtagtcattgacactggaatggtatttgtaaagttttttttttaatttattcaaaaaaagacatagtattttagtactttttacaaataatgctcttacaaaaatgctactgatcaaataagcttttaagaattggaaaaataaaaatacaaaagtccttcaccattatcctcaggtgatcagtagcattgccttgtcttggatcctcagtgctgccaaaaggcccgttttaggaatgcatatgtcggatctgttttacactgtcgtgatttggttaaccgtgctcgatatatattcttttat

SEQ ID NO: 321055 - DNA, 4121 bp, Homo sapiens
cactctgcgctgctgctaaaggggcagcaacggcggccagcgctgtgcgcgccatagcgaggctcgctcgcccgacgcgcactccgggtcggtccccagagctctgtggaggtgactcgagtgggcagggccgggcggcgctgtcggctgggagggcggggaggaggcgatgaggagacgagcagccgccgccgccgccgccgctgctcaccgcccgccgcggccgtagcgggagtcggggcggggctgggccagctgtacccctgacgggccgcgaacccagacaaaggaggaggagccgccccagaagcgggccagcgccgccgggaaaggaggtcgccgcccggggtcgcccgggcttgcgggtcgccgcgcttcctctgcgggcgctgcgggaggcgagggccgcctcggcggaggaagccgaccccggggtctccgccagcccgccggcgccgcctccgagccgcctcggccgtagcctcggcccgggcgggaggcggcggccgccggcgaggcgaggcggcccgcgccctgcctgtcaggccaccggcccggcccgcgggctgcccccgatgcggaggcgctgtcgccggggccatgcagcaggcgccgcagccttacgagttcttcagcgaggagaacagtccgaaatggcggggactgttggtctcggccctgcggaaggttcaggaacaagtgcatcccactctctcagctaatgaagagtctctctattatattgaagagctgatttttcagctgcttaataaattatgcatggcccagccaaggactgttcaagatgtagaggagcgagttcagaagacctttcctcacccaattgataaatgggccattgctgatgcacaatctgctatagaaaaacgaaaacgaagaaatcctcttttactgcctgtggacaaaatccatccttcgttgaaggaagtattagggtacaaagtggactaccatgtatccctatatattgtggctgtactagagtatatctcagctgatattttaaaattggctggtaattatgtttttaatatccggcattatgaaatatctcagcaggacattaaagtgtcaatgtgtgcggataaggttttgatggacatgtttgatcaggatgacataggtttggtttctctctgtgaagatgaacctagttcttctggtgaattaaactactatgatcttgtcagaactgaaatcgcagaagaaagacagtatctacgggaattaaatatgatcataaaagtgtttcgagaagcctttctttctgatagaaagctgtttaaaccttctgatatcgaaaagatttttagtaacatttcagatatacatgaattgactgtgaaacttttaggtttgattgaagacacagttgaaatgactgatgaaagcagtcctcatcccttagctggcagctgttttgaagatttggcagaagagcaagcatttgatccttatgaaacattatcacaggacattctttcaccagagtttcatgaacatttcaataaattgatggccagacctgcagttgctctacactttcagtccattgctgatggttttaaagaggcagttcgttatgtccttccacgtcttatgctggtgccagtgtatcactgttggcactactttgagttactaaagcaattgaaagcatgtagtgaagaacaagaagacagagaatgtttgaaccaagctattactgctctcatgaatctccaaggtagcatggaccgaatttacaagcagtattcacctagacgtcgacctggagatcctgtttgccctttttatagtcaccaattaagaagcaaacacctggctatcaaaaaaatgaatgaaattcagaaaaatatcgatggatgggaaggcaaagatattggacagtgttgtaatgaattcattatggagggaccattgacaagaatcggtgccaaacatgaacggcatatttttctgtttgatggcttaatgatcagttgtaaacctaatcatggccagactcggcttccaggttacagtagtgcagaatacaggttaaaagaaaaatttgtcatgaggaaaatacaaatttgtgataaagaagatacttgtgagcacaagcatgcatttgaattagtatccaaagatgagaacagcataatatttgctgctaagtctgctgaagaaaaaaacaactggatggcagcccttatttctcttcattatcgtagtactctagatcgaatgttagattcagtattattgaaagaagaaaatgagcaaccactgagattaccaagtcctgaagtatatcgttttgtagtaaaagactctgaggaaaacattgtttttgaagacaacttgcaaagtagaagtggcatccccattattaaaggaggaactgtagtgaaattaattgaaaggttaacatatcatatgtatgcagatcccaattttgttcgtacttttcttaccacatatcgttcattttgtaaaccacaggaattgctgagcttactgattgaacggtttgaaattccagagccagaacctactgacgcagacaaattggcaatagagaaaggcgagcagccaatcagtgcagaccttaaaagatttcgcaaggaatatgtccaaccagtacaacttaggatcttaaatgtatttcggcattgggttgaacatcatttttatgactttgaaagagacttggaattgcttgaaagactagaatccttcatttcaagtgtaagagggaaagctatgaaaaaatgggtagagtcaattgctaagatcatcaggaggaagaagcaagctcaggcaaatggagtaagccataatattacctttgaaagtccacctccaccaattgaatggcatatcagcaaaccaggacagtttgaaacatttgatctcatgacacttcatccaatagaaattgcacgtcagctgacacttttggagtctgatctttacaggaaagttcaaccgtctgaacttgtagggagtgtgtggaccaaagaagataaagaaataaattctccaaatttattaaaaatgattcgccataccacaaatctcaccctctggtttgaaaaatgcattgtggaagcagaaaattttgaagaacgggtggcagtactaagtagaattatagaaattctgcaagtttttcaagatttgaataatttcaatggcgtattggagatagtcagtgcagtaaattcagtgtcagtatacagactagaccatacctttgaggcactgcaggaaaggaaaaggaaaattttggacgaagctgtggaattaagtcaagatcactttaaaaaatacctagtaaaacttaagtcaatcaatccaccttgtgtgcctttttttggaatatatttaacaaatattctgaagaccgaagaagggaataatgattttttaaaaaagaaagggaaagatttaatcaatttcagtaagaggaggaaagtagctgaaattactggagaaattcagcagtatcagaatcagccttactgtttacggatagaaccagatatgaggagattctttgaaaaccttaaccccatgggaagtgcatctgaaaaagagtttacagattatttgttcaacaagtcactagaaattgaacctcgaaactgcaaacagccacctcgatttcctaggaaatcaactttttccttaaaatctcctggaataaggcctaacacaggccgacatggctctacctcaggtactttacgaggtcacccaacaccattagaaagagaaccatgtaaaataagctttagtcggattgctgaaactgagctggaatcaacagtgtcagcaccaacctctccaaatacaccatctactccaccagtatctgcttcttcagaccttagtgtatttttagatgtggatctcaacagctcctgtggcagcaatagcatctttgctccagtgcttttgccacattcaaagtctttctttagttcatgtggtagtttacataaactaagtgaagagcccctgattcctcctcctcttcctcctcgaaaaaagtttgatcatgatgcttcaaattccaaggtaatcaacaggactttactccaacttattca

SEQ ID NO: 321056 - DNA, 2864 bp, Homo sapiens
cactctgcgctgctgctaaaggggcagcaacggcggccagcgctgtgcgcgccatagcgaggctcgctcgcccgacgcgcactccgggtcggtccccagagctctgtggaggtgactcgagtgggcagggccgggcggcgctgtcggctgggagggcggggaggaggcgatgaggagacgagcagccgccgccgccgccgccgctgctcaccgcccgccgcggccgtagcgggagtcggggcggggctgggccagctgtacccctgacgggccgcgaacccagacaaaggaggaggagccgccccagaagcgggccagcgccgccgggaaaggaggtcgccgcccggggtcgcccgggcttgcgggtcgccgcgcttcctctgcgggcgctgcgggaggcgagggccgcctcggcggaggaagccgaccccggggtctccgccagcccgccggcgccgcctccgagccgcctcggccgtagcctcggcccgggcgggaggcggcggccgccggcgaggcgaggcggcccgcgccctgcctgtcaggccaccggcccggcccgcgggctgcccccgatgcggaggcgctgtcgccggggccatgcagcaggcgccgcagccttacgagttcttcagcgaggagaacagtccgaaatggcggggactgttggtctcggccctgcggaaggttcaggaacaagtgcatcccactctctcagctaatgaagagtctctctattatattgaagagctgatttttcagctgcttaataaattatgcatggcccagccaaggactgttcaagatgtagaggagcgagttcagaagacctttcctcacccaattgataaatgggccattgctgatgcacaatctgctatagaaaaacgaaaacgaagaaatcctcttttactgcctgtggacaaaatccatccttcgttgaaggaagtattagggtacaaagtggactaccatgtatccctatatattgtggctgtactagagtatatctcagctgatattttaaaattggctggtaattatgtttttaatatccggcattatgaaatatctcagcaggacattaaagtgtcaatgtgtgcggataaggttttgatggacatgtttgatcaggatgacataggtttggtttctctctgtgaagatgaacctagttcttctggtgaattaaactactatgatcttgtcagaactgaaatcgcagaagaaagacagtatctacgggaattaaatatgatcataaaagtgtttcgagaagcctttctttctgatagaaagctgtttaaaccttctgatatcgaaaagatttttagtaacatttcagatatacatgaattgactgtgaaacttttaggtttgattgaagacacagttgaaatgactgatgaaagcagtcctcatcccttagctggcagctgttttgaagatttggcagaagagcaagcatttgatccttatgaaacattatcacaggacattctttcaccagagtttcatgaacatttcaataaattgatggccagacctgcagttgctctacactttcagtccattgctgatggttttaaagaggcagttcgttatgtccttccacgtcttatgctggtgccagtgtatcactgttggcactactttgagttactaaagcaattgaaagcatgtagtgaagaacaagaagacagagaatgtttgaaccaagctattactgctctcatgaatctccaaggtagcatggaccgaatttacaagcagtattcacctagacgtcgacctggagatcctgtttgccctttttatagtcaccaattaagaagcaaacacctggctatcaaaaaaatgaatgaaattcagaaaaatatcgatggatgggaaggcaaagatattggacagtgttgtaatgaattcattatggagggaccattgacaagaatcggtgccaaacatgaacggcatatttttctgtttgatggcttaatgatcagttgtaaacctaatcatggccagactcggcttccaggttacagtagtgcagaatacaggttaaaagaaaaatttgtcatgaggaaaatacaaatttgtgataaagaagatacttgtgagcacaagcatgcatttgaattagtatccaaagatgagaacagcataatatttgctgctaagtctgctgaagaaaaaaacaactggatggcagcccttatttctcttcattatcgtagtactctagatcgaatgttagattcagtattattgaaagaagaaaatgagcaaccactgagattaccaagtcctgaagtatatcgttttgtagtaaaagactctgaggaaaacattgtttttgaagacaacttgcaaagtagaagtggcatccccattattaaaggaggaactgtagtgaaattaattgaaaggttaacatatcatatgtatgcagatcccaattttgttcgtacttttcttaccacatatcgttcattttgtaaaccacaggaattgctgagcttactgattgaacggtttgaaattccagagccagaacctactgacgcagacaaattggcaatagagaaaggcgagcagccaatcagtgcagaccttaaaagatttcgcaaggaatatgtccaaccagtacaacttaggtttggcttgaatattttttatatatatatatatacacatatatatacacacacacacacattttatgtgtcagttttcaatatatagttaacacaaaagctctcagcttttaattcaaatatagggaatatttttaacttcacagcagttaagttaaactaaaagagttctttctcagtgaagctattcttaaataccctgaagaa

SEQ ID NO: 321057 - DNA, 982 bp, Homo sapiens
ggctctgataggcccactcctcttctccacccaggagatgagaaggagggcaggcctttttaatctgatcagaatgttaacccatctctccgccttgcggtagaacccctggatacattatttgccctctcgaaaggcaggctctgaatttgattcaggtatatttcttcatagctaaccagcacaatggaaaactcagggaaagcaaataaaaaggatacacatgacgggccaccaaaagaaattaaactgcctaccagtgaagcacttctagactatcaatgtcaaataaaggaagatgccgtggagcaattcatgtttcaaataaagacacttaggaaaaagaaccaaaaatatcatgaaagaaatagccgcttaaaagaagaacagatttggcacatacggcatctactaaaggaactgagtgaagagaaggcagagggattgccagttgtaacaagagaggatgttgaagaagcgatgaaggaaaaatggaagtttgaaagagaccaggaaaaaaacttgagagatatgcgcatgcaaataagtaatgctgagaaactatttcttgagaaactcagtgaaaaggaatattgggaggagtacaagaatgtagggagtgaacgacatgctaaactcattacctccttacaaaatgacatcaacacagttaaagagaatgcagagaaaatgtcagaacactataaaatcactctggaagatactagaaagaaaataatcaaggaaactttgttgcaactggaccaaaagaaggaatgggccacacagaatgctgtaaagctcattgacaagggcagttatctagagatctgggagaatgactggctcaaaaaagagaggttgcaattcacaggaaggaagttgaagaattaaaaaatgctattcatgaactggaagcagaaaatttggtgcttattgatcaactatccaactgtagacttgtggatctcaagatacccag

SEQ ID NO: 321058 - DNA, 1941 bp, Homo sapiens
aaacaactgtgtactaggtacgatactcgttgtgatttcatcacgaggagattgctggcatggtacatcacgcctggctaattttgtatttttagtagagacgaggtttctctatgttggtcaggctggtctcgaactcccgacctccggtgatccgcccgcctcgacgtcccaaactgctgggattacaggcgtgaaccaccgcgcccggctcaggagatttcctacagctcaaaatttgtaaggcaaagagatggccacaaaccttgtgagagtggatggggagcgacctcggctctcttagtcccgcctggcccactagacactgcactgcatggtagaggccccgcccgacccagccccttaatcggcctgttgcaatcactatcaacccgccaattctggccccgcccctgtcttccgggttcaccctctcacttcctgcgggtcccaggctcaggcccctcctccgccttgtttggagcaatccaatcgaacctggagggctccgctccgccctatgccgcgctcccctcctccacgagcaatgagaatcagctcagggccccgcccccgcttccgcccgcctagaccacgccccttcttcatttggccaatcaggcagtccactggcccccgccccctaatgccccgccccgtcagcacttatccctgagctgcttctgccgtagcggatcttcgggactccgccccgcgcgcggacctgcagccatggcagtcaccgcccaggcagcccgcaggaaggagcgcgtcctctgcctgtttgacgtggacgggaccctcacgccggctcgccagaaaattgaccctgaggtggccgccttcctgcagaagctacgaagtagagtgcagatcggtgtggtgggcggctctgactactgtaagatcgctgagcagctgggtgacggggatgaagtcattgagaagtttgattatgtgtttgccgagaacgggacggtgcagtataagcacggacgactgctctccaagcagaccatccagaaccacctgggggaggagctgctgcaggacttgatcaacttctgcctcagctacatggccctgctcaggctgcccaagaagcgtggaaccttcatcgagttccggaatggcatgctgaacatctcgcccatcggccggagctgcaccctggaggagaggatcgagttctccgaactggacaagaaagagaagatccgggagaagttcgtggaagccctgaaaacagagtttgctggcaaagggctgaggttctctcgaggaggcatgatcagctttgacgtcttccccgagggctgggacaagcgctactgcctggatagcctggaccaggacagcttcgacaccatccacttctttgggaacgagactagccctggtgggaacgactttgagatctttgccgacccccggactgttggccacagcgtggtgtctcctcaggacacggtgcagcgatgccgggagattttcttcccagagacagctcatgaggcgtgaccggggcccacatctgtgtgtcgtgacttctgaagagtttggcctaggcctaaagagaggtcctggtgttggatagatgccagggcccctcctctggcccaggacgcctgctgcaagcccacccagatggggccagagtctgtgtggacaaccgtccccagccagtctgctcctagtggcactggcttcgtcctcccagggcccagagtgttccccatgctccacctggtggcccaggccacagctgctgcttgtatttcggtacagaagaggtttctttctgcaccaggaggaggcgtgctcaagtatcggtacgagatctagcctgccctgcctgcctgccctgggcgatgaggtacggtggggaaggtgcctattttagagaactttgtcacagtattaaagttcccagaacaaagt

SEQ ID NO: 321059 - DNA, 1981 bp, Homo sapiens
aaacaactgtgtactaggtacgatactcgttgtgatttcatcacgaggagattgctggcatggtacatcacgcctggctaattttgtatttttagtagagacgaggtttctctatgttggtcaggctggtctcgaactcccgacctccggtgatccgcccgcctcgacgtcccaaactgctgggattacaggcgtgaaccaccgcgcccggctcaggagatttcctacagctcaaaatttgtaaggcaaagagatggccacaaaccttgtgagagtggatggggagcgacctcggctctcttagtcccgcctggcccactagacactgcactgcatggtagaggccccgcccgacccagccccttaatcggcctgttgcaatcactatcaacccgccaattctggccccgcccctgtcttccgggttcaccctctcacttcctgcgggtcccaggctcaggcccctcctccgccttgtttggagcaatccaatcgaacctggagggctccgctccgccctatgccgcgctcccctcctccacgagcaatgagaatcagctcagggccccgcccccgcttccgcccgcctagaccacgccccttcttcatttggccaatcaggcagtccactggcccccgccccctaatgccccgccccgtcagcacttatccctgagctgcttctgccgtagcggatcttcgggactccgccccgcgcgcggacctgcagccatggcagtcaccgcccaggcagcccgcaggaaggagcgcgtcctctgcctgtttgacgtggacgggaccctcacgccggctcgccagaaaattgaccctgaggtggccgccttcctgcagaagctacgaagtagagtgcagatcggtgtggtgggcggctctgactactgtaagatcgctgagcagctgggtgacggggatgaagtcattgagaagtttgattatgtgtttgccgagaacgggacggtgcagtataagcacggacgactgctctccaagcagaccatccagaaccacctgggggaggagctgctgcaggacttgatcaacttctgcctcagctacatggccctgctcaggctgcccaagaagcgtggaaccttcatcgagttccggaatggcatgctgaacatctcgcccatcggccggagctgcaccctggaggagaggatcgagttctccgaactggacaagaaagagaagatccgggagaagttcgtggaagccctgaaaacagagtttgctggcaaagggctgaggttctctcgaggaggcatgatcagctttgacgtcttccccgagggctgggacaagcgctactgcctggatagcctggaccaggacagcttcgacaccatccacttctttgggaacgagactagccctggtgggaacgactttgagatctttgccgacccccggactgttggccacagcgtggtgtctcctcaggacacggtgcagcgatgccgggagattttcttcccagagacagctcatgaggcgtgaccggggcccacatctgtgtgtcgtgacttctgaagagtttggcctaggcctaaagagaggtcctggtgttggatagatgccagggcccctcctctggcccaggacgcctgctgcaagcccacccagatggggccagagtctgtgtggacaaccgtccccagccagtctgctcctagtggcactggcttcgtcctcccagggcccagagtgttccccatgctccacctggtggcccaggccacagctgctgcttgtatttcggtacagaagaggtttctttctgcaccaggaggaggcgtgctcaagtatcggtacgagatctagcctgccctgcctgcctgccctgggcgatgaggtacggtggggaaggtgcctattttagagaactttgtcacagtattaaagttcccagaacaaagtaggtgtcagctgtgtctgaatgagataattggccccagtc

SEQ ID NO: 321060 - DNA, 2608 bp, Homo sapiens
aaacaactgtgtactaggtacgatactcgttgtgatttcatcacgaggagattgctggcatggtacatcacgcctggctaattttgtatttttagtagagacgaggtttctctatgttggtcaggctggtctcgaactcccgacctccggtgatccgcccgcctcgacgtcccaaactgctgggattacaggcgtgaaccaccgcgcccggctcaggagatttcctacagctcaaaatttgtaaggcaaagagatggccacaaaccttgtgagagtggatggggagcgacctcggctctcttagtcccgcctggcccactagacactgcactgcatggtagaggccccgcccgacccagccccttaatcggcctgttgcaatcactatcaacccgccaattctggccccgcccctgtcttccgggttcaccctctcacttcctgcgggtcccaggctcaggcccctcctccgccttgtttggagcaatccaatcgaacctggagggctccgctccgccctatgccgcgctcccctcctccacgagcaatgagaatcagctcagggccccgcccccgcttccgcccgcctagaccacgccccttcttcatttggccaatcaggcagtccactggcccccgccccctaatgccccgccccgtcagcacttatccctgagctgcttctgccgtagcggatcttcgggactccgccccgcgcgcggacctgcagccatggcagtcaccgcccaggcagcccgcaggaaggagcgcgtcctctgcctgtttgacgtggacgggaccctcacgccggctcgccaggtaggaccctgaagattggaagctcccaccgggagtgtcacgcggacacccccgaggctgagtgtggggtctgcagcagcgtgaccgtggacacccggggaccgagtgtgggatgcggcggtacccggccccctgacatccggggccacccaccgggagtgaggggacctggccctcacgtcactgaccccgcagcgtccttgcctgtgttctgcttgggagtgctggggttggatccagtactggagggaggaggctgcgagcaggggcctagctccctccctccccggaggctgtcacacgccgctaaggcctggctcacggacgcccccgcctcctgagctggggatcccaccctagttcagccctacgacacaccagtggtcggagctggcttctgaaccggggttccaggcacacaagcacacagccaagcgtcagtcatcatctggtgggagacagggcgtctcggagtcttcccaccccgacctttgcaggcctgggactgggtctagtttctgaagccccatcacccactttaccttccacccccagtcgtggagcagagagggcttcttttcaaattcgtttatgagctctacccacccggatgtgagaggctccaggcctagcctgtttgctgtgaggacactgaggaatagtgaggaaaattgaccctgaggtggccgccttcctgcagaagctacgaagtagagtgcagatcggtgtggtgggcggctctgactactgtaagatcgctgagcagctgggtgacggggatgaagtcattgagaagtttgattatgtgtttgccgagaacgggacggtgcagtataagcacggacgactgctctccaagcagaccatccagaaccacctgggggaggagctgctgcaggacttgatcaacttctgcctcagctacatggccctgctcaggctgcccaagaagcgtggaaccttcatcgagttccggaatggcatgctgaacatctcgcccatcggccggagctgcaccctggaggagaggatcgagttctccgaactggacaagaaagagaagatccgggagaagttcgtggaagccctgaaaacagagtttgctggcaaagggctgaggttctctcgaggaggcatgatcagctttgacgtcttccccgagggctgggacaagcgctactgcctggatagcctggaccaggacagcttcgacaccatccacttctttgggaacgagactagccctggtgggaacgactttgagatctttgccgacccccggactgttggccacagcgtggtgtctcctcaggacacggtgcagcgatgccgggagattttcttcccagagacagctcatgaggcgtgaccggggcccacatctgtgtgtcgtgacttctgaagagtttggcctaggcctaaagagaggtcctggtgttggatagatgccagggcccctcctctggcccaggacgcctgctgcaagcccacccagatggggccagagtctgtgtggacaaccgtccccagccagtctgctcctagtggcactggcttcgtcctcccagggcccagagtgttccccatgctccacctggtggcccaggccacagctgctgcttgtatttcggtacagaagaggtttctttctgcaccaggaggaggcgtgctcaagtatcggtacgagatctagcctgccctgcctgcctgccctgggcgatgaggtacggtggggaaggtgcctattttagagaactttgtcacagtattaaagttcccagaacaaagt

SEQ ID NO: 321061 - DNA, 2050 bp, Homo sapiens
aaacaactgtgtactaggtacgatactcgttgtgatttcatcacgaggagattgctggcatggtacatcacgcctggctaattttgtatttttagtagagacgaggtttctctatgttggtcaggctggtctcgaactcccgacctccggtgatccgcccgcctcgacgtcccaaactgctgggattacaggcgtgaaccaccgcgcccggctcaggagatttcctacagctcaaaatttgtaaggcaaagagatggccacaaaccttgtgagagtggatggggagcgacctcggctctcttagtcccgcctggcccactagacactgcactgcatggtagaggccccgcccgacccagccccttaatcggcctgttgcaatcactatcaacccgccaattctggccccgcccctgtcttccgggttcaccctctcacttcctgcgggtcccaggctcaggcccctcctccgccttgtttggagcaatccaatcgaacctggagggctccgctccgccctatgccgcgctcccctcctccacgagcaatgagaatcagctcagggccccgcccccgcttccgcccgcctagaccacgccccttcttcatttggccaatcaggcagtccactggcccccgccccctaatgccccgccccgtcagcacttatccctgagctgcttctgccgtagcggatcttcgggactccgccccgcgcgcggacctgcagccatggcagtcaccgcccaggcagcccgcaggaaggagcgcgtcctctgcctgtttgacgtggacgggaccctcacgccggctcgccaggtcccgaatgcccctccccatcctctgtggtgaagttgccctggcttgggccctggaggccttcctgcaggggtggatccgggaggaagatagcaggactggagcaaagaaaattgaccctgaggtggccgccttcctgcagaagctacgaagtagagtgcagatcggtgtggtgggcggctctgactactgtaagatcgctgagcagctgggtgacggggatgaagtcattgagaagtttgattatgtgtttgccgagaacgggacggtgcagtataagcacggacgactgctctccaagcagaccatccagaaccacctgggggaggagctgctgcaggacttgatcaacttctgcctcagctacatggccctgctcaggctgcccaagaagcgtggaaccttcatcgagttccggaatggcatgctgaacatctcgcccatcggccggagctgcaccctggaggagaggatcgagttctccgaactggacaagaaagagaagatccgggagaagttcgtggaagccctgaaaacagagtttgctggcaaagggctgaggttctctcgaggaggcatgatcagctttgacgtcttccccgagggctgggacaagcgctactgcctggatagcctggaccaggacagcttcgacaccatccacttctttgggaacgagactagccctggtgggaacgactttgagatctttgccgacccccggactgttggccacagcgtggtgtctcctcaggacacggtgcagcgatgccgggagattttcttcccagagacagctcatgaggcgtgaccggggcccacatctgtgtgtcgtgacttctgaagagtttggcctaggcctaaagagaggtcctggtgttggatagatgccagggcccctcctctggcccaggacgcctgctgcaagcccacccagatggggccagagtctgtgtggacaaccgtccccagccagtctgctcctagtggcactggcttcgtcctcccagggcccagagtgttccccatgctccacctggtggcccaggccacagctgctgcttgtatttcggtacagaagaggtttctttctgcaccaggaggaggcgtgctcaagtatcggtacgagatctagcctgccctgcctgcctgccctgggcgatgaggtacggtggggaaggtgcctattttagagaactttgtcacagtattaaagttcccagaacaaagt

SEQ ID NO: 321062 - DNA, 1962 bp, Homo sapiens
aaacaactgtgtactaggtacgatactcgttgtgatttcatcacgaggagattgctggcatggtacatcacgcctggctaattttgtatttttagtagagacgaggtttctctatgttggtcaggctggtctcgaactcccgacctccggtgatccgcccgcctcgacgtcccaaactgctgggattacaggcgtgaaccaccgcgcccggctcaggagatttcctacagctcaaaatttgtaaggcaaagagatggccacaaaccttgtgagagtggatggggagcgacctcggctctcttagtcccgcctggcccactagacactgcactgcatggtagaggccccgcccgacccagccccttaatcggcctgttgcaatcactatcaacccgccaattctggccccgcccctgtcttccgggttcaccctctcacttcctgcgggtcccaggctcaggcccctcctccgccttgtttggagcaatccaatcgaacctggagggctccgctccgccctatgccgcgctcccctcctccacgagcaatgagaatcagctcagggccccgcccccgcttccgcccgcctagaccacgccccttcttcatttggccaatcaggcagtccactggcccccgccccctaatgccccgccccgtcagcacttatccctgagctgcttctgccgtagcggatcttcgggactccgccccgcgcgcggacctgcagccatggcagtcaccgcccaggcagcccgcaggaaggagcgcgtcctctgcctgtttgacgtggacgggaccctcacgccggctcgccagaaaattgaccctgaggtggccgccttcctgcagaagctacgaagtagagtgcagatcggtgtggtgggcggctctgactactgtaagatcgctgagcagctgggtgacggggatgaagtcattgagaagtttgattatgtgtttgccgagaacgggacggtgcagtataagcacggacgactgctctccaagcagagccctgtgttccttggccagaccatccagaaccacctgggggaggagctgctgcaggacttgatcaacttctgcctcagctacatggccctgctcaggctgcccaagaagcgtggaaccttcatcgagttccggaatggcatgctgaacatctcgcccatcggccggagctgcaccctggaggagaggatcgagttctccgaactggacaagaaagagaagatccgggagaagttcgtggaagccctgaaaacagagtttgctggcaaagggctgaggttctctcgaggaggcatgatcagctttgacgtcttccccgagggctgggacaagcgctactgcctggatagcctggaccaggacagcttcgacaccatccacttctttgggaacgagactagccctggtgggaacgactttgagatctttgccgacccccggactgttggccacagcgtggtgtctcctcaggacacggtgcagcgatgccgggagattttcttcccagagacagctcatgaggcgtgaccggggcccacatctgtgtgtcgtgacttctgaagagtttggcctaggcctaaagagaggtcctggtgttggatagatgccagggcccctcctctggcccaggacgcctgctgcaagcccacccagatggggccagagtctgtgtggacaaccgtccccagccagtctgctcctagtggcactggcttcgtcctcccagggcccagagtgttccccatgctccacctggtggcccaggccacagctgctgcttgtatttcggtacagaagaggtttctttctgcaccaggaggaggcgtgctcaagtatcggtacgagatctagcctgccctgcctgcctgccctgggcgatgaggtacggtggggaaggtgcctattttagagaactttgtcacagtattaaagttcccagaacaaagt

SEQ ID NO: 321063 - DNA, 1514 bp, Homo sapiens
agtgagctgagatcacgccatcgcactccagcctgggcagaggtttcagtgagccagaatcacaccactgcactccagcctggatgacagaacaaaaattcgtctccaaaaaaattttttttttcatagagacaatgtcttcctttgctgcctaggctctagtctcaaactcctgggtcaagtgatctttctgccttggcctcgcaaagtgttgggattgcagacctgagccacagtgtccaacctgtctaatttttggtgtctaagctttgtactgcttcagatccaggtagaatgtgggcttcctgggttctcagcactaagtgagggctaagtggaggtcccagacatgttgaaagccagaatgctatgcttcccctctccccccatagaaaattgaccctgaggtggccgccttcctgcagaagctacgaagtagagtgcagatcggtgtggtgggcggctctgactactgtaagatcgctgagcagctgggtgacggggatgaagtcattgagaagtttgattatgtgtttgccgagaacgggacggtgcagtataagcacggacgactgctctccaagcagaccatccagaaccacctgggggaggagctgctgcaggacttgatcaacttctgcctcagctacatggccctgctcaggctgcccaagaagcgtggaaccttcatcgagttccggaatggcatgctgaacatctcgcccatcggccggagctgcaccctggaggagaggatcgagttctccgaactggacaagaaagagaagatccgggagaagttcgtggaagccctgaaaacagagtttgctggcaaagggctgaggttctctcgaggaggcatgatcagctttgacgtcttccccgagggctgggacaagcgctactgcctggatagcctggaccaggacagcttcgacaccatccacttctttgggaacgagactagccctggtgggaacgactttgagatctttgccgacccccggactgttggccacagcgtggtgtctcctcaggacacggtgcagcgatgccgggagattttcttcccagagacagctcatgaggcgtgaccggggcccacatctgtgtgtcgtgacttctgaagagtttggcctaggcctaaagagaggtcctggtgttggatagatgccagggcccctcctctggcccaggacgcctgctgcaagcccacccagatggggccagagtctgtgtggacaaccgtccccagccagtctgctcctagtggcactggcttcgtcctcccagggcccagagtgttccccatgctccacctggtggcccaggccacagctgctgcttgtatttcggtacagaagaggtttctttctgcaccaggaggaggcgtgctcaagtatcggtacgagatctagcctgccctgcctgcctgccctgggcgatgaggtacggtggggaaggtgcctattttagagaactttgtcacagtattaaagttcccagaacaaagt

SEQ ID NO: 321064 - DNA, 1849 bp, Homo sapiens
aaacaactgtgtactaggtacgatactcgttgtgatttcatcacgaggagattgctggcatggtacatcacgcctggctaattttgtatttttagtagagacgaggtttctctatgttggtcaggctggtctcgaactcccgacctccggtgatccgcccgcctcgacgtcccaaactgctgggattacaggcgtgaaccaccgcgcccggctcaggagatttcctacagctcaaaatttgtaaggcaaagagatggccacaaaccttgtgagagtggatggggagcgacctcggctctcttagtcccgcctggcccactagacactgcactgcatggtagaggccccgcccgacccagccccttaatcggcctgttgcaatcactatcaacccgccaattctggccccgcccctgtcttccgggttcaccctctcacttcctgcgggtcccaggctcaggcccctcctccgccttgtttggagcaatccaatcgaacctggagggctccgctccgccctatgccgcgctcccctcctccacgagcaatgagaatcagctcagggccccgcccccgcttccgcccgcctagaccacgccccttcttcatttggccaatcaggcagtccactggcccccgccccctaatgccccgccccgtcagcacttatccctgagctgcttctgccgtagcggatcttcgggactccgccccgcgcgcggacctgcagccatggcagtcaccgcccaggcagcccgcaggaaggagcgcgtcctctgcctgtttgacgtggacgggaccctcacgccggctcgccagaaaattgaccctgaggtggccgccttcctgcagaagctacgaagtagagtgcagatcggtgtggtgggcggctctgactactgtaagatcgctgagcagctgggtgacggggatgaagtcattgagaagtttgattatgtgtttgccgagaacgggacggtgcagtataagcacggacgactgctctccaagcagtggaaccttcatcgagttccggaatggcatgctgaacatctcgcccatcggccggagctgcaccctggaggagaggatcgagttctccgaactggacaagaaagagaagatccgggagaagttcgtggaagccctgaaaacagagtttgctggcaaagggctgaggttctctcgaggaggcatgatcagctttgacgtcttccccgagggctgggacaagcgctactgcctggatagcctggaccaggacagcttcgacaccatccacttctttgggaacgagactagccctggtgggaacgactttgagatctttgccgacccccggactgttggccacagcgtggtgtctcctcaggacacggtgcagcgatgccgggagattttcttcccagagacagctcatgaggcgtgaccggggcccacatctgtgtgtcgtgacttctgaagagtttggcctaggcctaaagagaggtcctggtgttggatagatgccagggcccctcctctggcccaggacgcctgctgcaagcccacccagatggggccagagtctgtgtggacaaccgtccccagccagtctgctcctagtggcactggcttcgtcctcccagggcccagagtgttccccatgctccacctggtggcccaggccacagctgctgcttgtatttcggtacagaagaggtttctttctgcaccaggaggaggcgtgctcaagtatcggtacgagatctagcctgccctgcctgcctgccctgggcgatgaggtacggtggggaaggtgcctattttagagaactttgtcacagtattaaagttcccagaacaaagt

SEQ ID NO: 321065 - DNA, 2235 bp, Homo sapiens
aaacaactgtgtactaggtacgatactcgttgtgatttcatcacgaggagattgctggcatggtacatcacgcctggctaattttgtatttttagtagagacgaggtttctctatgttggtcaggctggtctcgaactcccgacctccggtgatccgcccgcctcgacgtcccaaactgctgggattacaggcgtgaaccaccgcgcccggctcaggagatttcctacagctcaaaatttgtaaggcaaagagatggccacaaaccttgtgagagtggatggggagcgacctcggctctcttagtcccgcctggcccactagacactgcactgcatggtagaggccccgcccgacccagccccttaatcggcctgttgcaatcactatcaacccgccaattctggccccgcccctgtcttccgggttcaccctctcacttcctgcgggtcccaggctcaggcccctcctccgccttgtttggagcaatccaatcgaacctggagggctccgctccgccctatgccgcgctcccctcctccacgagcaatgagaatcagctcagggccccgcccccgcttccgcccgcctagaccacgccccttcttcatttggccaatcaggcagtccactggcccccgccccctaatgccccgccccgtcagcacttatccctgagctgcttctgccgtagcggatcttcgggactccgccccgcgcgcggacctgcagccatggcagtcaccgcccaggcagcccgcaggaaggagcgcgtcctctgcctgtttgacgtggacgggaccctcacgccggctcgccagtcgtggagcagagagggcttcttttcaaattcgtttatgagctctacccacccggatgtgagaggctccaggcctagcctgtttgctgtgaggacactgaggaatagtgaggaaaattgaccctgaggtggccgccttcctgcagaagctacgaagtagagtgcagatcggtgtggtgggcggctctgactactgtaagatcgctgagcagctgggtgacggggatgaagtcattgagaagtttgattatgtgtttgccgagaacgggacggtgcagtataagcacggacgactgctctccaagcagaccatccagaaccacctgggggaggagctgctgcaggacttgatcaacttctgcctcagctacatggccctgctcaggctgcccaagaagcggtgaggtcccaccagcctggtctccagaacctggggcctgagggaggagaagtgtgggtccctcagagggaacctggagatacttgggcccctgattttttgcggggagtgtggattcttgtcccctttgaagtcctaggaggctggggtcccaggtggggctagatttgaattcagggccgttctggttctctctggctccccgccctccctcaccaccagtggaaccttcatcgagttccggaatggcatgctgaacatctcgcccatcggccggagctgcaccctggaggagaggatcgagttctccgaactggacaagaaagagaagatccgggagaagttcgtggaagccctggaggcatgatcagctttgacgtcttccccgagggctgggacaagcgctactgcctggatagcctggaccaggacagcttcgacaccatccacttctttgggaacgagactagccctggtgggaacgactttgagatctttgccgacccccggactgttggccacagcgtggtgtctcctcaggacacggtgcagcgatgccgggagattttcttcccagagacagctcatgaggcgtgaccggggcccacatctgtgtgtcgtgacttctgaagagtttggcctaggcctaaagagaggtcctggtgttggatagatgccagggcccctcctctggcccaggacgcctgctgcaagcccacccagatggggccagagtctgtgtggacaaccgtccccagccagtctgctcctagtggcactggcttcgtcctcccagggcccagagtgttccccatgctccacctggtggcccaggccacagctgctgcttgtatttcggtacagaagaggtttctttctgcaccaggaggaggcgtgctcaagtatcggtacgagatctagcctgccctgcctgcctgccctgggcgatgaggtacggtggggaaggtgcctattttagagaactttgtcacagtattaaagttcccagaacaaagt

SEQ ID NO: 321066 - DNA, 1875 bp, Homo sapiens
aaacaactgtgtactaggtacgatactcgttgtgatttcatcacgaggagattgctggcatggtacatcacgcctggctaattttgtatttttagtagagacgaggtttctctatgttggtcaggctggtctcgaactcccgacctccggtgatccgcccgcctcgacgtcccaaactgctgggattacaggcgtgaaccaccgcgcccggctcaggagatttcctacagctcaaaatttgtaaggcaaagagatggccacaaaccttgtgagagtggatggggagcgacctcggctctcttagtcccgcctggcccactagacactgcactgcatggtagaggccccgcccgacccagccccttaatcggcctgttgcaatcactatcaacccgccaattctggccccgcccctgtcttccgggttcaccctctcacttcctgcgggtcccaggctcaggcccctcctccgccttgtttggagcaatccaatcgaacctggagggctccgctccgccctatgccgcgctcccctcctccacgagcaatgagaatcagctcagggccccgcccccgcttccgcccgcctagaccacgccccttcttcatttggccaatcaggcagtccactggcccccgccccctaatgccccgccccgtcagcacttatccctgagctgcttctgccgtagcggatcttcgggactccgccccgcgcgcggacctgcagccatggcagtcaccgcccaggcagcccgcaggaaggagcgcgtcctctgcctgtttgacgtggacgggaccctcacgccggctcgccagaaaattgaccctgaggtggccgccttcctgcagaagctacgaagtagagtgcagatcggtgtggtgggcggctctgactactgtaagatcgctgagcagctgggtgacggggatgaagtcattgagaagtttgattatgtgtttgccgagaacgggacggtgcagtataagcacggacgactgctctccaagcagaccatccagaaccacctgggggaggagctgctgcaggacttgatcaacttctgcctcagctacatggccctgctcaggctgcccaagaagcgtggaaccttcatcgagttccggaatggcatgctgaacatctcgcccatcggccggagctgcaccctggaggagaggatcgagttctccgaactggacaagaaagagaagatccgggagaagttcgtggaagccctgaaaacagagtttgctggcaaagggctgaggttctctcgaggaggcatgatcagctttgacgtcttccccgagggctgggacaagcgctactgcctggatagcctggaccaggacagcttcgacaccatccacttctttgggaacgagactagccctgacacggtgcagcgatgccgggagattttcttcccagagacagctcatgaggcgtgaccggggcccacatctgtgtgtcgtgacttctgaagagtttggcctaggcctaaagagaggtcctggtgttggatagatgccagggcccctcctctggcccaggacgcctgctgcaagcccacccagatggggccagagtctgtgtggacaaccgtccccagccagtctgctcctagtggcactggcttcgtcctcccagggcccagagtgttccccatgctccacctggtggcccaggccacagctgctgcttgtatttcggtacagaagaggtttctttctgcaccaggaggaggcgtgctcaagtatcggtacgagatctagcctgccctgcctgcctgccctgggcgatgaggtacggtggggaaggtgcctattttagagaactttgtcacagtattaaagttcccagaacaaagt

SEQ ID NO: 321067 - DNA, 1887 bp, Homo sapiens
aaacaactgtgtactaggtacgatactcgttgtgatttcatcacgaggagattgctggcatggtacatcacgcctggctaattttgtatttttagtagagacgaggtttctctatgttggtcaggctggtctcgaactcccgacctccggtgatccgcccgcctcgacgtcccaaactgctgggattacaggcgtgaaccaccgcgcccggctcaggagatttcctacagctcaaaatttgtaaggcaaagagatggccacaaaccttgtgagagtggatggggagcgacctcggctctcttagtcccgcctggcccactagacactgcactgcatggtagaggccccgcccgacccagccccttaatcggcctgttgcaatcactatcaacccgccaattctggccccgcccctgtcttccgggttcaccctctcacttcctgcgggtcccaggctcaggcccctcctccgccttgtttggagcaatccaatcgaacctggagggctccgctccgccctatgccgcgctcccctcctccacgagcaatgagaatcagctcagggccccgcccccgcttccgcccgcctagaccacgccccttcttcatttggccaatcaggcagtccactggcccccgccccctaatgccccgccccgtcagcacttatccctgagctgcttctgccgtagcggatcttcgggactccgccccgcgcgcggacctgcagccatggcagtcaccgcccaggcagcccgcaggaaggagcgcgtcctctgcctgtttgacgtggacgggaccctcacgccggctcgccagatcggtgtggtgggcggctctgactactgtaagatcgctgagcagctgggtgacggggatgaagtcattgagaagtttgattatgtgtttgccgagaacgggacggtgcagtataagcacggacgactgctctccaagcagaccatccagaaccacctgggggaggagctgctgcaggacttgatcaacttctgcctcagctacatggccctgctcaggctgcccaagaagcgtggaaccttcatcgagttccggaatggcatgctgaacatctcgcccatcggccggagctgcaccctggaggagaggatcgagttctccgaactggacaagaaagagaagatccgggagaagttcgtggaagccctgaaaacagagtttgctggcaaagggctgaggttctctcgaggaggcatgatcagctttgacgtcttccccgagggctgggacaagcgctactgcctggatagcctggaccaggacagcttcgacaccatccacttctttgggaacgagactagccctggtgggaacgactttgagatctttgccgacccccggactgttggccacagcgtggtgtctcctcaggacacggtgcagcgatgccgggagattttcttcccagagacagctcatgaggcgtgaccggggcccacatctgtgtgtcgtgacttctgaagagtttggcctaggcctaaagagaggtcctggtgttggatagatgccagggcccctcctctggcccaggacgcctgctgcaagcccacccagatggggccagagtctgtgtggacaaccgtccccagccagtctgctcctagtggcactggcttcgtcctcccagggcccagagtgttccccatgctccacctggtggcccaggccacagctgctgcttgtatttcggtacagaagaggtttctttctgcaccaggaggaggcgtgctcaagtatcggtacgagatctagcctgccctgcctgcctgccctgggcgatgaggtacggtggggaaggtgcctattttagagaactttgtcacagtattaaagttcccagaacaaagt

SEQ ID NO: 321068 - DNA, 1944 bp, Homo sapiens
aaacaactgtgtactaggtacgatactcgttgtgatttcatcacgaggagattgctggcatggtacatcacgcctggctaattttgtatttttagtagagacgaggtttctctatgttggtcaggctggtctcgaactcccgacctccggtgatccgcccgcctcgacgtcccaaactgctgggattacaggcgtgaaccaccgcgcccggctcaggagatttcctacagctcaaaatttgtaaggcaaagagatggccacaaaccttgtgagagtggatggggagcgacctcggctctcttagtcccgcctggcccactagacactgcactgcatggtagaggccccgcccgacccagccccttaatcggcctgttgcaatcactatcaacccgccaattctggccccgcccctgtcttccgggttcaccctctcacttcctgcgggtcccaggctcaggcccctcctccgccttgtttggagcaatccaatcgaacctggagggctccgctccgccctatgccgcgctcccctcctccacgagcaatgagaatcagctcagggccccgcccccgcttccgcccgcctagaccacgccccttcttcatttggccaatcaggcagtccactggcccccgccccctaatgccccgccccgtcagcacttatccctgagctgcttctgccgtagcggatcttcgggactccgccccgcgcgcggacctgcagccatggcagtcaccgcccaggcagcccgcaggaaggagcgcgtcctctgcctgtttgacgtggacgggaccctcacgccggctcgccagaaaattgaccctgaggtggccgccttcctgcagaagctacgaagtagagtgcagatcggtgtggtgggcggctctgactactgtaagatcgctgagcagctgggtgacggggatgaagtcattgagaagtttgattatgtgtttgccgagaacgggacggtgcagtataagcacggacgactgctctccaagcagaccatccagaaccacctgggggaggagctgctgcaggacttgatcaacttctgcctcagctacatggccctgctcaggctgcccaagaagcgtggaaccttcatcgagttccggaatggcatgctgaacatctcgcccatcggccggagctgcaccctggaggagaggatcgagttctccgaactggacaagaaagagaagatccgggagaagttcgtggaagccctgaaaacagagtttgctggcaaagggctgaggttctctcgaggaggcatgatcagctttgacgtcttccccgagggctgggacaagcgctactgcctggatagcctggaccaggacagcttcgacaccatccacttctttgggaacgagactagccctggtgggaacgactttgagatctttgccgacccccggactgttggccacagcgtggtgtctcctcaggacacggtgcagcgatgccgggagattttcttcccagagacagctcatgaggcgtgaccggggcccacatctgtgtgtcgtgacttctgaagagtttggcctaggcctaaagagaggtcctggtgttggatagatgccagggcccctcctctggcccaggacgcctgctgcaagcccacccagatggggccagagtctgtgtggacaaccgtccccagccagtctgctcctagtggcactggcttcgtcctcccagggcccagagtgttccccatgctccacctggtggcccaggccacagctgctgcttgtatttcggtacagaagaggtttctttctgcaccaggaggaggcgtgctcaagtatcggtacgagatctagcctgccctgcctgcctgccctgggcgatgaggtacggtggggaaggcctattaagcagacgtgtcacatataatttcatttttttttttttcttttttc

SEQ ID NO: 321069 - DNA, 2163 bp, Homo sapiens
aaacaactgtgtactaggtacgatactcgttgtgatttcatcacgaggagattgctggcatggtacatcacgcctggctaattttgtatttttagtagagacgaggtttctctatgttggtcaggctggtctcgaactcccgacctccggtgatccgcccgcctcgacgtcccaaactgctgggattacaggcgtgaaccaccgcgcccggctcaggagatttcctacagctcaaaatttgtaaggcaaagagatggccacaaaccttgtgagagtggatggggagcgacctcggctctcttagtcccgcctggcccactagacactgcactgcatggtagaggccccgcccgacccagccccttaatcggcctgttgcaatcactatcaacccgccaattctggccccgcccctgtcttccgggttcaccctctcacttcctgcgggtcccaggctcaggcccctcctccgccttgtttggagcaatccaatcgaacctggagggctccgctccgccctatgccgcgctcccctcctccacgagcaatgagaatcagctcagggccccgcccccgcttccgcccgcctagaccacgccccttcttcatttggccaatcaggcagtccactggcccccgccccctaatgccccgccccgtcagcacttatccctgagctgcttctgccgtagcggatcttcgggactccgccccgcgcgcggacctgcagccatggcagtcaccgcccaggcagcccgcaggaaggagcgcgtcctctgcctgtttgacgtggacgggaccctcacgccggctcgccagaaaattgaccctgaggtggccgccttcctgcagaagctacgaagtagagtgcagatcggtgtggtgggcggctctgactactgtaagatcgctgagcagctgggtgacggggatgaagtcattgagaagtttgattatgtgtttgccgagaacgggacggtgcagtataagcacggacgactgctctccaagcagaccatccagaaccacctgggggaggagctgctgcaggacttgatcaacttctgcctcagctacatggccctgctcaggctgcccaagaagcggtgaggtcccaccagcctggtctccagaacctggggcctgagggaggagaagtgtgggtccctcagagggaacctggagatacttgggcccctgattttttgcggggagtgtggattcttgtcccctttgaagtcctaggaggctggggtcccaggtggggctagatttgaattcagggccgttctggttctctctggctccccgccctccctcaccaccagtggaaccttcatcgagttccggaatggcatgctgaacatctcgcccatcggccggagctgcaccctggaggagaggatcgagttctccgaactggacaagaaagagaagatccgggagaagttcgtggaagccctgaaaacagagtttgctggcaaagggctgaggttctctcgaggaggcatgatcagctttgacgtcttccccgagggctgggacaagcgctactgcctggatagcctggaccaggacagcttcgacaccatccacttctttgggaacgagactagccctggtgggaacgactttgagatctttgccgacccccggactgttggccacagcgtggtgtctcctcaggacacggtgcagcgatgccgggagattttcttcccagagacagctcatgaggcgtgaccggggcccacatctgtgtgtcgtgacttctgaagagtttggcctaggcctaaagagaggtcctggtgttggatagatgccagggcccctcctctggcccaggacgcctgctgcaagcccacccagatggggccagagtctgtgtggacaaccgtccccagccagtctgctcctagtggcactggcttcgtcctcccagggcccagagtgttccccatgctccacctggtggcccaggccacagctgctgcttgtatttcggtacagaagaggtttctttctgcaccaggaggaggcgtgctcaagtatcggtacgagatctagcctgccctgcctgcctgccctgggcgatgaggtacggtggggaaggtgcctattttagagaactttgtcacagtattaaagttcccagaacaaagt

SEQ ID NO: 321070 - DNA, 2275 bp, Homo sapiens
aaacaactgtgtactaggtacgatactcgttgtgatttcatcacgaggagattgctggcatggtacatcacgcctggctaattttgtatttttagtagagacgaggtttctctatgttggtcaggctggtctcgaactcccgacctccggtgatccgcccgcctcgacgtcccaaactgctgggattacaggcgtgaaccaccgcgcccggctcaggagatttcctacagctcaaaatttgtaaggcaaagagatggccacaaaccttgtgagagtggatggggagcgacctcggctctcttagtcccgcctggcccactagacactgcactgcatggtagaggccccgcccgacccagccccttaatcggcctgttgcaatcactatcaacccgccaattctggccccgcccctgtcttccgggttcaccctctcacttcctgcgggtcccaggctcaggcccctcctccgccttgtttggagcaatccaatcgaacctggagggctccgctccgccctatgccgcgctcccctcctccacgagcaatgagaatcagctcagggccccgcccccgcttccgcccgcctagaccacgccccttcttcatttggccaatcaggcagtccactggcccccgccccctaatgccccgccccgtcagcacttatccctgagctgcttctgccgtagcggatcttcgggactccgccccgcgcgcggacctgcagccatggcagtcaccgcccaggcagcccgcaggaaggagcgcgtcctctgcctgtttgacgtggacgggaccctcacgccggctcgccagtcgtggagcagagagggcttcttttcaaattcgtttatgagctctacccacccggatgtgagaggctccaggcctagcctgtttgctgtgaggacactgaggaatagtgaggaaaattgaccctgaggtggccgccttcctgcagaagctacgaagtagagtgcagatcggtgtggtgggcggctctgactactgtaagatcgctgagcagctgggtgacggggatgaagtcattgagaagtttgattatgtgtttgccgagaacgggacggtgcagtataagcacggacgactgctctccaagcagaccatccagaaccacctgggggaggagctgctgcaggacttgatcaacttctgcctcagctacatggccctgctcaggctgcccaagaagcggtgaggtcccaccagcctggtctccagaacctggggcctgagggaggagaagtgtgggtccctcagagggaacctggagatacttgggcccctgattttttgcggggagtgtggattcttgtcccctttgaagtcctaggaggctggggtcccaggtggggctagatttgaattcagggccgttctggttctctctggctccccgccctccctcaccaccagtggaaccttcatcgagttccggaatggcatgctgaacatctcgcccatcggccggagctgcaccctggaggagaggatcgagttctccgaactggacaagaaagagaagatccgggagaagttcgtggaagccctgaaaacagagtttgctggcaaagggctgaggttctctcgaggaggcatgatcagctttgacgtcttccccgagggctgggacaagcgctactgcctggatagcctggaccaggacagcttcgacaccatccacttctttgggaacgagactagccctggtgggaacgactttgagatctttgccgacccccggactgttggccacagcgtggtgtctcctcaggacacggtgcagcgatgccgggagattttcttcccagagacagctcatgaggcgtgaccggggcccacatctgtgtgtcgtgacttctgaagagtttggcctaggcctaaagagaggtcctggtgttggatagatgccagggcccctcctctggcccaggacgcctgctgcaagcccacccagatggggccagagtctgtgtggacaaccgtccccagccagtctgctcctagtggcactggcttcgtcctcccagggcccagagtgttccccatgctccacctggtggcccaggccacagctgctgcttgtatttcggtacagaagaggtttctttctgcaccaggaggaggcgtgctcaagtatcggtacgagatctagcctgccctgcctgcctgccctgggcgatgaggtacggtggggaaggtgcctattttagagaactttgtcacagtattaaagttcccagaacaaagt

SEQ ID NO: 321071 - DNA, 1901 bp, Homo sapiens
aaacaactgtgtactaggtacgatactcgttgtgatttcatcacgaggagattgctggcatggtacatcacgcctggctaattttgtatttttagtagagacgaggtttctctatgttggtcaggctggtctcgaactcccgacctccggtgatccgcccgcctcgacgtcccaaactgctgggattacaggcgtgaaccaccgcgcccggctcaggagatttcctacagctcaaaatttgtaaggcaaagagatggccacaaaccttgtgagagtggatggggagcgacctcggctctcttagtcccgcctggcccactagacactgcactgcatggtagaggccccgcccgacccagccccttaatcggcctgttgcaatcactatcaacccgccaattctggccccgcccctgtcttccgggttcaccctctcacttcctgcgggtcccaggctcaggcccctcctccgccttgtttggagcaatccaatcgaacctggagggctccgctccgccctatgccgcgctcccctcctccacgagcaatgagaatcagctcagggccccgcccccgcttccgcccgcctagaccacgccccttcttcatttggccaatcaggcagtccactggcccccgccccctaatgccccgccccgtcagcacttatccctgagctgcttctgccgtagcggatcttcgggactccgccccgcgcgcggacctgcagccatggcagtcaccgcccaggcagcccgcaggaaggagcgcgtcctctgcctgtttgacgtggacgggaccctcacgccggctcgccagaaaattgaccctgaggtggccgccttcctgcagaagctacgaagtagagtgcagatcggtgtggtgggcggctctgactactgtaagatcgctgagcagctgggtgacggggatgaagtcattgagaagtttgattatgtgtttgccgagaacgggacggtgcagtataagcacggacgactgctctccaagcagaccatccagaaccacctgggggaggagctgctgcaggacttgatcaacttctgcctcagctacatggccctgctcaggctgcccaagaagcgtggaaccttcatcgagttccggaatggcatgctgaacatctcgcccatcggccggagctgcaccctggaggagaggatcgagttctccgaactggacaagaaagagaagatccgggagaagttcgtggaagccctggaggcatgatcagctttgacgtcttccccgagggctgggacaagcgctactgcctggatagcctggaccaggacagcttcgacaccatccacttctttgggaacgagactagccctggtgggaacgactttgagatctttgccgacccccggactgttggccacagcgtggtgtctcctcaggacacggtgcagcgatgccgggagattttcttcccagagacagctcatgaggcgtgaccggggcccacatctgtgtgtcgtgacttctgaagagtttggcctaggcctaaagagaggtcctggtgttggatagatgccagggcccctcctctggcccaggacgcctgctgcaagcccacccagatggggccagagtctgtgtggacaaccgtccccagccagtctgctcctagtggcactggcttcgtcctcccagggcccagagtgttccccatgctccacctggtggcccaggccacagctgctgcttgtatttcggtacagaagaggtttctttctgcaccaggaggaggcgtgctcaagtatcggtacgagatctagcctgccctgcctgcctgccctgggcgatgaggtacggtggggaaggtgcctattttagagaactttgtcacagtattaaagttcccagaacaaagt

SEQ ID NO: 321072 - DNA, 2285 bp, Homo sapiens
aaacaactgtgtactaggtacgatactcgttgtgatttcatcacgaggagattgctggcatggtacatcacgcctggctaattttgtatttttagtagagacgaggtttctctatgttggtcaggctggtctcgaactcccgacctccggtgatccgcccgcctcgacgtcccaaactgctgggattacaggcgtgaaccaccgcgcccggctcaggagatttcctacagctcaaaatttgtaaggcaaagagatggccacaaaccttgtgagagtggatggggagcgacctcggctctcttagtcccgcctggcccactagacactgcactgcatggtagaggccccgcccgacccagccccttaatcggcctgttgcaatcactatcaacccgccaattctggccccgcccctgtcttccgggttcaccctctcacttcctgcgggtcccaggctcaggcccctcctccgccttgtttggagcaatccaatcgaacctggagggctccgctccgccctatgccgcgctcccctcctccacgagcaatgagaatcagctcagggccccgcccccgcttccgcccgcctagaccacgccccttcttcatttggccaatcaggcagtccactggcccccgccccctaatgccccgccccgtcagcacttatccctgagctgcttctgccgtagcggatcttcgggactccgccccgcgcgcggacctgcagccatggcagtcaccgcccaggcagcccgcaggaaggagcgcgtcctctgcctgtttgacgtggacgggaccctcacgccggctcgccaggtaggaccctgaagattggaagctcccaccgggagtgtcacgcggacacccccgaggctgagtgtggggtctgcagcagcgtgaccgtggacacccggggaccgagtgtgggatgcggcggtacccggccccctgacatccggggccacccaccgggagtgaggggacctggccctcacgtcactgaccccgcagcgtccttgcctgtgttctgcttgggagtgctggggttggatccagtactggagggaggaggctgcgagcaggggcctagctccctccctccccggaggctgtcacacgccgctaaggcctggctcacggacgcccccgcctcctgagctggggatcccaccctagttcagccctacgacacaccagtggtcggagctggcttctgaaccggggttccaggcacacaagcacacagccaagcgtcagtcatcatctggtgggagacagggcgtctcggagtcttcccaccccgacctttgcaggcctgggactgggtctagtttctgaagccccatcacccactttaccttccacccccagtcgtggagcagagagggcttcttttcaaattcgtttatgagctctacccacccggatgtgagaggctccaggcctagcctgtttgctgtgaggacactgaggaatagtgaggaaaattgaccctgaggtggccgccttcctgcagaagctacgaagtagagtgcagatcggtgtggtgggcggctctgactactgtaagatcgctgagcagctgggtgacggggatgaagtcattgagaagtttgattatgtgtttgccgagaacgggacggtgcagtataagcacggacgactgctctccaagcagaccatccagaaccacctgggggaggagctgctgcaggacttgatcaacttctgcctcagctacatggccctgctcaggctgcccaagaagcggtgaggtcccaccagcctggtctccagaacctggggcctgagggaggagaagtgtgggtccctcagagggaacctggagatacttgggcccctgattttttgcggggagtgtggattcttgtcccctttgaagtcctaggcctaaagagaggtcctggtgttggatagatgccagggcccctcctctggcccaggacgcctgctgcaagcccacccagatggggccagagtctgtgtggacaaccgtccccagccagtctgctcctagtggcactggcttcgtcctcccagggcccagagtgttccccatgctccacctggtggcccaggccacagctgctgcttgtatttcggtacagaagaggtttctttctgcaccaggaggaggcgtgctcaagtatcggtacgagatctagcctgccctgcctgcctgccctgggcgatgaggtacggtggggaaggtgcctattttagagaactttgtcacagtattaaagttcccagaacaaagt

SEQ ID NO: 321073 - DNA, 4034 bp, Homo sapiens
  misc_feature (1)..(2): n is a, c, g, or t
  misc_feature (4)..(4): n is a, c, g, or t
nncncgagccgccacgtaatgccacgtccccgcgcatgcgcatcttggccgctgctggcggctgtttccgggcttagagggctggagtggccgccgagttggaggcggtggtggcagcagtaggagtgtgtagagtgcgggattgggggccaggccctgcggagggcgggggaagttgtcttcttttttttccggaggggccggtaaacctggtggctgaacggcaagatgaatttcctccgcggggtaatggggggtcagagtgccggaccccagcacacagaagccgagacgattcaaaagctttgtgacagagtagcttcatctactttattggatgatcgaagaaatgctgttcgtgctctcaaatcattatctaagaaataccgcttggaagtgggtatacaagctatggaacatcttattcatgttttacaaacagatcgttcagattctgaaataataggttatgctttggacacactatataatataatatctaatgaagaagaagaagaagtagaagaaaattccacaagacagagtgaagatttgggaagccaatttacagaaattttcattaagcagcaggaaaatgtcactcttctgttatctttattggaggagtttgatttccatgtccgctggcctggtgtgaagcttcttacttctcttttaaaacaactagggcctcaggtgcaacaaattattttagtcagtcctatgggtgtttcaagattgatggacttactagcggattccagggaagttatacgtaatgatggcgtcttactactgcaggcactaacaagaagcaatggtgcaatccagaaaattgttgcttttgaaaatgctttcgagagactactggacattatttcagaggaggggaacagtgatggaggtatagtagttgaagattgtttgattttgctccaaaacttattaaaaaacaacaactccaatcaaaatttttttaaagaaggctcatatattcaacgtatgaaaccttggtttgaagttggagatgaaaattctggctggtctgcacagaaagtgaccaatctacatctaatgctacagcttgttcgtgtattggtatctcccaccaaccctcctggtgctaccagtagctgccagaaggctatgttccagtgtgggttattgcagcagctttgtactatcctaatggctactggggttcctgctgatatcctgactgagaccataaatactgtatcagaagttattcgaggctgccaagtaaaccaagactactttgcatctgtaaatgcaccttcaaacccaccaagaccggcaattgtagtacttctcatgtccatggttaatgaaaggcagccatttgttttgcgctgtgctgttctctattgtttccagtgtttcttgtataaaaaccaaaaaggacaaggagaaatcgtgtcaacacttttaccttctaccattgatgcaacaggtaattcagtttcagctggccagttattatgtggaggtttgttttctactgattcactttcaaactggtgtgctgctgtggcccttgcccatgcgttgcaagaaaatgccacccagaaagaacagttgctcagggttcaacttgctacaagtattggcaaccctccagtttctttacttcaacagtgcaccaatattctttcacagggaagcaaaatacaaacaagagttggattattaatgttgctttgtacctggctaagcaattgtcccattgcagtaacgcattttcttcacaattcagccaatgttccattccttacaggacaaattgcagaaaatcttggagaagaagagcagttggtccaaggcttatgtgcccttttgttgggcatttcgatttatttcaatgataactcacttgagagctacatgaaagagaagctaaaacaactgattgagaagaggattggcaaagagaatttcatagagaaactaggatttattagcaaacatgagttgtattccagagcatctcagaaaccccagccaaactttcccagtccagaatacatgatatttgatcatgagtttacgaagctggtaaaagaacttgaaggtgttataactaaggctatttataagtccagtgaagaagataaaaaagaagaagaggtgaaaaaaacattagaacagcatgacaatattgtgactcactacaaaaatatgattcgagagcaagatctccaacttgaggaattaaggcagcaggtttctacattaaaatgtcaaaatgaacagctccagacggcagtcacacagcaagtatcacagatccagcagcacaaagaccagtataatcttcttaaaatacagctaggaaaagacaatcagcatcaaggttcttacagtgagggggctcagatgaatggcattcagccagaagaaattggtagattgcgagaagagatagaagaattaaaacgtaatcaggaacttttacaaagccagctgactgaaaaggactctatgattgaaaatatgaaatcttcccaaacatctggcacaaatgaacagtcttcagcaatagtttcagctagagattctgaacaagttgcagaattaaaacaggaactggcaactttaaagtctcagttaaactcacaatctgtggagatcaccaaactacagacagaaaagcaggaactgttacagaaaacagaagcgtttgcaaaatcagttgaggtacaaggagagaccgagactataatagccaccaaaactactgatgtagaaggaagactgtcagcattattacaagagaccaaagagttaaagaatgaaattaaagctctgtctgaggaaagaactgccattaaagagcagctggattcatctaatagtaccattgccattttacaaactgagaaagacaaactagagttggaaattacagattctaaaaaagaacaagatgatctcttggtgctcttggccgatcaagatcagaaaatactgtcattgaagaataaactcaaggatcttggtcatccagttgaagaagaggatgaacttgaatctggagaccaagaggatgaggatgatgaaagtgaagatcctggcaaggatctagatcatatctagttttcaaatctctaggaacaatagagattatatcataactctgaagatggactctaaactttggtttacctccatggaaaataaagatttagaaaccaggtggaaaacattcactattaagactattgatatatttttgtaatgttgccacccatgttgaaaaccttaaaactgaatttatgtagaacacacatcttttatttaaatccatctgaactgtcccaaaatgtaatttgcaaagagcttcaaacaccaaaaatataccattttaaggcatgtggtgacaatgctatttgccttagttcattcgttgtttactttgcaaaatttgtgacttttaagtactaacacatttgattgaatgtgtattgaattggaattattatttctaaattcagcatttgagtccttagttgatgattttcttttaaagaaattagtttatttaaaagcaagatagcctgggttgggagttagtgcatatcatcagccctccatctaatgtgattgctaagatgtgcaggataggacagcttagaatgagtgccttgacacctacatatggctgcattccatacctcagtgaagaagccgaaggatgctgacacacagtgatgtggagggcattccggagaaacttttgcaacagtgtattaatgtgattggttttctttttgttttaagctaaacatctaaaacaaatttcaagttaacagttcatacaactcagatttagtattattgtttatcataaaacatattatgttcctagttttaaaaagacccaaagtatgattaatataatttattggcatttttgctgaataggtttaagtcagataatagattttaaaaaagcaaatgaggcaatgtgtcaaaatttaatgtttcataataaaaatagatacgttgactta

SEQ ID NO: 321074 - DNA, 4042 bp, Homo sapiens
  misc_feature (1)..(2): n is a, c, g, or t
  misc_feature (4)..(4): n is a, c, g, or t
nncncgagccgccacgtaatgccacgtccccgcgcatgcgcatcttggccgctgctggcggctgtttccgggcttagagggctggagtggccgccgagttggaggcggtggtggcagcagtaggagtgtgtagagtgcgggattgggggccaggccctgcggagggcgggggaagttgtcttcttttttttccggaggggccggtaaacctggtggctgaacggcaagatgaatttcctccgcggggtaatggggggtcagagtgccggaccccagcacacagaagccgagacgattcaaaagctttgtgacagagtagcttcatctactttattggatgatcgaagaaatgctgttcgtgctctcaaatcattatctaagaaataccgcttggaagtgggtatacaagctatggaacatcttattcatgttttacaaacagatcgaagaaaattccacaagacagagtgaagatttgggaagccaatttacagaaattttcattaagcagcaggaaaatgtcactcttctgttatctttattggaggagtttgatttccatgtccgctggcctggtgtgaagcttcttacttctcttttaaaacaactagggcctcaggtgcaacaaattattttagtcagtcctatgggtgtttcaagattgatggacttactagcggattccagggaagttatacgtaatgatggcgtcttactactgcaggcactaacaagaagcaatggtgcaatccagaaaattgttgcttttgaaaatgctttcgagagactactggacattatttcagaggaggggaacagtgatggaggtatagtagttgaagattgtttgattttgctccaaaacttattaaaaaacaacaactccaatcaaaatttttttaaagaaggctcatatattcaacgtatgaaaccttggtttgaagttggagatgaaaattctggctggtctgcacagaaagtgaccaatctacatctaatgctacagcttgttcgtgtattggtatctcccaccaaccctcctggtgctaccagtagctgccagaaggctatgttccagtgtgggttattgcagcagctttgtactatcctaatggctactggggttcctgctgatatcctgactgagaccataaatactgtatcagaagttattcgaggctgccaagtaaaccaagactactttgcatctgtaaatgcaccttcaaacccaccaagaccggcaattgtagtacttctcatgtccatggttaatgaaaggcagccatttgttttgcgctgtgctgttctctattgtttccagtgtttcttgtataaaaaccaaaaaggacaaggagaaatcgtgtcaacacttttaccttctaccattgatgcaacaggtaattcagtttcagctggccagttattatgtggaggtttgttttctactgattcactttcaaactggtgtgctgctgtggcccttgcccatgcgttgcaagaaaatgccacccagaaagaacagttgctcagggttcaacttgctacaagtattggcaaccctccagtttctttacttcaacagtgcaccaatattctttcacagggaagcaaaatacaaacaagagttggattattaatgttgctttgtacctggctaagcaattgtcccattgcagtaacgcattttcttcacaattcagccaatgttccattccttacaggacaaattgcagaaaatcttggagaagaagagcagttggtccaaggcttatgtgcccttttgttgggcatttcgatttatttcaatgataactcacttgagagctacatgaaagagaagctaaaacaactgattgagaagaggattggcaaagagaatttcatagagaaactaggatttattagcaaacatgagttgtattccagagcatctcagaaaccccagccaaactttcccagtccagaatacatgatatttgatcatgagtttacgaagctggtaaaagaacttgaaggtgttataactaaggctatttataagtccagtgaagaagataaaaaagaagaagaggtgaaaaaaacattagaacagcatgacaatattgtgactcactacaaaaatatgattcgagagcaagatctccaacttgaggaattaaggcagcaggtttctacattaaaatgtcaaaatgaacagctccagacggcagtcacacagcaagtatcacagatccagcagcacaaagaccagtataatcttcttaaaatacagctaggaaaagacaatcagcatcaaggttcttacagtgagggggctcagatgaatggcattcagccagaagaaattggtagattgcgagaagagatagaagaattaaaacgtaatcaggaacttttacaaagccagctgactgaaaaggactctatgattgaaaatatgaaatcttcccaaacatctggcacaaatgaacagtcttcagcaatagtttcagctagagattctgaacaagttgcagaattaaaacaggaactggcaactttaaagtctcagttaaactcacaatctgtggagatcaccaaactacagacagaaaagcaggaactgttacagaaaacagaagcgtttgcaaaatcagttgaggtacaaggagagaccgagactataatagccaccaaaactactgatgtagaaggaagactgtcagcattattacaagagaccaaagagttaaagaatgaaattaaagctctgtctgaggaaagaactgccattaaagagcagctggattcatctaatagtaccattgccattttacaaactgagaaagacaaactagagttggaaattacagattctaaaaaagaacaagatgatctcttggtgctcttggccgatcaagatcagaaaatactgtcattgaagaataaactcaaggatcttggtcatccagttgaagaagaggatgaacttgaatctggagaccaagaggatgaggatgatgaaagtgaagatcctggcaaggatctagatcatatctagttttcaaatctctaggaacaatagagattatatcataactctgaagatggactctaaactttggtttacctccatggaaaataaagatttagaaaccaggtggaaaacattcactattaagactattgatatatttttgtaatgttgccacccatgttgaaaaccttaaaactgaatttatgtagaacacacatcttttatttaaatccatctgaactgtcccaaaatgtaatttgcaaagagcttcaaacaccaaaaatataccattttaaggcatgtggtgacaatgctatttgccttagttcattcgttgtttactttgcaaaatttgtgacttttaagtactaacacatttgattgaatgtgtattgaattggaattattatttctaaattcagcatttgagtccttagttgatgattttcttttaaagaaattagtttatttaaaagcaagatagcctgggttgggagttagtgcatatcatcagccctccatctaatgtgattgctaagatgtgcaggataggacagcttagaatgagtgccttgacacctacatatggctgcattccatacctcagtgaagaagccgaaggatgctgacacacagtgatgtggagggcattccggagaaacttttgcaacagtgtattaatgtgattggttttctttttgttttaagctaaacatctaaaacaaatttcaagttaacagttcatacaactcagatttagtattattgtttatcataaaacatattatgttcctagttttaaaaagacccaaagtatgattaatataatttattggcatttttgctgaataggtttaagtcagataatagattttaaaaaagcaaatgaggcaatgtgtcaaaatttaatgtttcataataaaaatagatacgttgacttaatccttggtcatggttccctttgtttacatcttaaaagtattttattcttaataaaagatgaggcaagtgaaaatgaaaaggcga

SEQ ID NO: 321075 - DNA, 3883 bp, Homo sapiens
tgtgttggacatgccattcacgaagcatcaattttcatcttccttttttattttgacttagaatcaagttttggggatttgaaggccagatgtttacaagaatttctgaactttctctactagactgtggtggtgttcattgatttatattattgaattgcaagtttttcattattactgttgtgaagcaggtacagtggcattcctgagacagatactttcatgctcaactctttagctgcaacgaaagctatgtagtggttaatgaatataaaggaattctagtatgtttatatcataaagttgaaagataactgaactaggaattgttagaagaggattctagtctagtgtctgtctctttgaggtttataaccttagggagacaaattgcttaactattctgttcttgttttccttatgtataaagtaaaggagttgggcttgcaaaatctctgccagttctaaaattctgtgatttttgaagtaatttaaaaatgtctcataaattttgtactccactaaacattctctttcttctctatagggcgtcttactactgcaggcactaacaagaagcaatggtgcaatccagaaaattgttgcttttgaaaatgctttcgagagactactggacattatttcagaggaggggaacagtgatggaggtatagtagttgaagattgtttgattttgctccaaaacttattaaaaaacaacaactccaatcaaaatttttttaaagaaggctcatatattcaacgtatgaaaccttggtttgaagttggagatgaaaattctggctggtctgcacagaaagtgaccaatctacatctaatgctacagcttgttcgtgtattggtatctcccaccaaccctcctggtgctaccagtagctgccagaaggctatgttccagtgtgggttattgcagcagctttgtactatcctaatggctactggggttcctgctgatatcctgactgagaccataaatactgtatcagaagttattcgaggctgccaagtaaaccaagactactttgcatctgtaaatgcaccttcaaacccaccaagaccggcaattgtagtacttctcatgtccatggttaatgaaaggcagccatttgttttgcgctgtgctgttctctattgtttccagtgtttcttgtataaaaaccaaaaaggacaaggagaaatcgtgtcaacacttttaccttctaccattgatgcaacaggtaattcagtttcagctggccagttattatgtggaggtttgttttctactgattcactttcaaactggtgtgctgctgtggcccttgcccatgcgttgcaagaaaatgccacccagaaagaacagttgctcagggttcaacttgctacaagtattggcaaccctccagtttctttacttcaacagtgcaccaatattctttcacagggaagcaaaatacaaacaagagttggattattaatgttgctttgtacctggctaagcaattgtcccattgcagtaacgcattttcttcacaattcagccaatgttccattccttacaggacaaattgcagaaaatcttggagaagaagagcagttggtccaaggcttatgtgcccttttgttgggcatttcgatttatttcaatgataactcacttgagagctacatgaaagagaagctaaaacaactgattgagaagaggattggcaaagagaatttcatagagaaactaggatttattagcaaacatgagttgtattccagagcatctcagaaaccccagccaaactttcccagtccagaatacatgatatttgatcatgagtttacgaagctggtaaaagaacttgaaggtgttataactaaggctatttataagtccagtgaagaagataaaaaagaagaagaggtgaaaaaaacattagaacagcatgacaatattgtgactcactacaaaaatatgattcgagagcaagatctccaacttgaggaattaaggcagcaggtttctacattaaaatgtcaaaatgaacagctccagacggcagtcacacagcaagtatcacagatccagcagcacaaagaccagtataatcttcttaaaatacagctaggaaaagacaatcagcatcaaggttcttacagtgagggggctcagatgaatggcattcagccagaagaaattggtagattgcgagaagagatagaagaattaaaacgtaatcaggaacttttacaaagccagctgactgaaaaggactctatgattgaaaatatgaaatcttcccaaacatctggcacaaatgaacagtcttcagcaatagtttcagctagagattctgaacaagttgcagaattaaaacaggaactggcaactttaaagtctcagttaaactcacaatctgtggagatcaccaaactacagacagaaaagcaggaactgttacagaaaacagaagcgtttgcaaaatcagttgaggtacaaggagagaccgagactataatagccaccaaaactactgatgtagaaggaagactgtcagcattattacaagagaccaaagagttaaagaatgaaattaaagctctgtctgaggaaagaactgccattaaagagcagctggattcatctaatagtaccattgccattttacaaactgagaaagacaaactagagttggaaattacagattctaaaaaagaacaagatgatctcttggtgctcttggccgatcaagatcagaaaatactgtcattgaagaataaactcaaggatcttggtcatccagttgaagaagaggatgaacttgaatctggagaccaagaggatgaggatgatgaaagtgaagatcctggcaaggatctagatcatatctagttttcaaatctctaggaacaatagagattatatcataactctgaagatggactctaaactttggtttacctccatggaaaataaagatttagaaaccaggtggaaaacattcactattaagactattgatatatttttgtaatgttgccacccatgttgaaaaccttaaaactgaatttatgtagaacacacatcttttatttaaatccatctgaactgtcccaaaatgtaatttgcaaagagcttcaaacaccaaaaatataccattttaaggcatgtggtgacaatgctatttgccttagttcattcgttgtttactttgcaaaatttgtgacttttaagtactaacacatttgattgaatgtgtattgaattggaattattatttctaaattcagcatttgagtccttagttgatgattttcttttaaagaaattagtttatttaaaagcaagatagcctgggttgggagttagtgcatatcatcagccctccatctaatgtgattgctaagatgtgcaggataggacagcttagaatgagtgccttgacacctacatatggctgcattccatacctcagtgaagaagccgaaggatgctgacacacagtgatgtggagggcattccggagaaacttttgcaacagtgtattaatgtgattggttttctttttgttttaagctaaacatctaaaacaaatttcaagttaacagttcatacaactcagatttagtattattgtttatcataaaacatattatgttcctagttttaaaaagacccaaagtatgattaatataatttattggcatttttgctgaataggtttaagtcagataatagattttaaaaaagcaaatgaggcaatgtgtcaaaatttaatgtttcataataaaaatagatacgttgacttaatccttggtcatggttccctttgtttacatcttaaaagtattttattcttaataaaagatgaggcaagtgaaaatgaaaaggcga

SEQ ID NO: 321076 - DNA, 3992 bp, Homo sapiens
  misc_feature (1)..(2): n is a, c, g, or t
  misc_feature (4)..(4): n is a, c, g, or t
nncncgagccgccacgtaatgccacgtccccgcgcatgcgcatcttggccgctgctggcggctgtttccgggcttagagggctggagtggccgccgagttggaggcggtggtggcagcagtaggagtgtgtagagtgcgggattgggggccaggccctgcggagggcgggggaagttgtcttcttttttttccggaggggccggtaaacctggtggctgaacggcaagatgaatttcctccgcggggtaatggggggtcagagtgccggaccccagcacacagaagccgagacgattcaaaagctttgtgacagagtagcttcatctactttattggatgatcgaagaaatgctgttcgtgctctcaaatcattatctaagaaataccgcttggaagtgggtatacaagctatggaacatcttattcatgttttacaaacagatcgttcagattctgaaataataggttatgctttggacacactatataatataatatctaatgaagaagaagaagaagtagaagaaaattccacaagacagagtgaagatttgggaagccaatttacagaaattttcattaagcagcaggaaaatgtcactcttctgttatctttattggaggagtttgatttccatgtccgctggcctggtgtgaagcttcttacttctcttttaaaacaactagggcctcaggtgcaacaaattattttagtcagtcctatgggtgtttcaagattgatggacttactagcggattccagggaagttatacgtaatgatggcgtcttactactgcaggcactaacaagaagcaatggtgcaatccagaaaattgttgcttttgaaaatgctttcgagagactactggacattatttcagaggaggggaacagtgatggaggtatagtagttgaagattgtttgattttgctccaaaacttattaaaaaacaacaactccaatcaaaatttttttaaagaaggctcatatattcaacgtatgaaaccttggtttgaagttggagatgaaaattctggctggtctgcacagaaagtgaccaatctacatctaatgctacagcttgttcgtgtattggtatctcccaccaaccctcctggtgctaccagtagctgccagaaggctatgttccagtgtgggttattgcagcagctttgtactatcctaatggctactggggttcctgctgatatcctgactgagaccataaatactgtatcagaagttattcgaggctgccaagtaaaccaagactactttgcatctgtaaatgcaccttcaaacccaccaagaccggcaattgtagtacttctcatgtccatggttaatgaaaggcagccatttgttttgcgctgtgctgttctctattgtttccagtgtttcttgtataaaaaccaaaaaggacaaggagaaatcgtgtcaacacttttaccttctaccattgatgcaacaggtaattcagtttcagctggccagttattatgtggaggtttgttttctactgattcactttcaaactggtgtgctgctgtggcccttgcccatgcgttgcaagaaaatgccacccagaaagaacagttgctcagggttcaacttgctacaagtattggcaaccctccagtttctttacttcaacagtgcaccaatattctttcacagggaagcaaaatacaaacaagagttggattattaatgttgctttgtacctggctaagcaattgtcccattgcagtaacgcattttcttcacaattcagccaatgttccattccttacaggacaaattgcagaaaatcttggagaagaagagcagttggtccaaggcttatgtgcccttttgttgggcatttcgatttatttcaatgataactcacttgagagctacatgaaagagaagctaaaacaactgattgagaagaggattggcaaagagaatttcatagagaaactaggatttattagcaaacatgagttgtattccagagcatctcagaaaccccagccaaactttcccagtccagaatacatgatatttgatcatgagtttacgaagctggtaaaagaacttgaaggtgttataactaaggctatttataagtccagtgaagaagataaaaaagaagaagaggtgaaaaaaacattagaacagcatgacaatattgtgactcactacaaaaatatgattcgagagcaagatctccaacttgaggaattaaggcagcaggtttctacattaaaatgtcaaaatgaacagctccagacggcagtcacacagcaagtatcacagatccagcagcacaaagaccagtataatcttcttaaaatacagctaggaaaagacaatcagcatcaaggttcttacagtgagggggctcagatgaatggcattcagccagaagaaattggtagattgcgagaagagatagaagaattaaaacgtaatcaggaacttttacaaagccagctgactgaaaaggactctatgattgaaaatatgaaatcttcccaaacatctggcacaaatgaacagtcttcagcaatagtttcagctagagattctgaacaagttgcagaattaaaacaggaactggcaactttaaagtctcagttaaactcacaatctgtggagatcaccaaactacagacagaaaagcaggaactgttacagaaaacagaagcgtttgcaaaatcagttgaggtacaaggagagaccgagactataatagccaccaaaactactgatgtagaaggaagactgtcagcattattacaagagaccaaagagttaaagaatgaaattaaagctctgtctgaggaaagaactgccattaaagagcagctggattcatctaatagtaccattgccattttacaaactgagaaagacaaactagagttggaaattacagattctaaaaaagaacaagatgatctcttggtgctcttggccgatcaagatcagaaaatactgtcattgaagaataaactcaaggatcttggtcatccagttgaagaagaggatgaacttgaatctggagaccaagaggatgaggatgatgaaagtgaagatcctggcaaggatctagatcatatctagttttcaaatctctaggaacaatagagattatatcataactctgaagatggactctaaactttggtttacctccatggaaaataaagatttagaaaccaggtggaaaacattcactattaagactattgatatatttttgtaatgttgccacccatgttgaaaaccttaaaactgaatttatgtagaacacacatcttttatttaaatccatctgaactgtcccaaaatgtaatttgcaaagagcttcaaacaccaaaaatataccattttaaggcatgtggtgacaatgctatttgccttagttcattcgttgtttactttgcaaaatttgtgacttttaagtactaacacatttgattgaatgtgtattgaattggaattattatttctaaattcagcatttgagtccttagttgatgattttcttttaaagaaattagtttatttaaaagcaagatagcctgggttgggagttagtgcatatcatcagccctccatctaatgtgattgctaagatgtgcaggataggacagcttagaatgagtgccttgacacctacatatggctgcattccatacctcagtgaagaagccgaaggatgctgacacacagtgatgtggagggcattccggagaaacttttgcaacagtgtattaatgtgattggttttctttttgttttaagctaaacatctaaaacaaatttcaagttaacagttcatacaactcagatttagtattattgtttatcataaaacatattatgttcctagttttaaaaagaccagttgattaatattatggatttgggaaaagtttagcgcgaaataattttaaaggccgaggggtgaattggtttctacaaagactgctttt

SEQ ID NO: 321077 - DNA, 4065 bp, Homo sapiens
  misc_feature (1)..(2): n is a, c, g, or t
  misc_feature (4)..(4): n is a, c, g, or t
nncncgagccgccacgtaatgccacgtccccgcgcatgcgcatcttggccgctgctggcggctgtttccgggcttagagggctggagtggccgccgagttggaggcggtggtggcagcagtaggagtgtgtagagtgcgggattgggggccaggccctgcggagggcgggggaagttgtcttcttttttttccggaggggccggtaaacctggtggctgaacggcaagatgaatttcctccgcggggtaatggggggtcagagtgccggaccccagcacacagaagccgagacgattcaaaagctttgtgacagagtagcttcatctactttattggatgatcgaagaaatgctgttcgtgctctcaaatcattatctaagaaataccgcttggaagtgggtatacaagctatggaacatcttattcatgttttacaaacagatcgttcagattctgaaataataggttatgctttggacacactatataatataatatctaatgaagaagaagaagaagtagaagaaaattccacaagacagagtgaagatttgggaagccaatttacagaaattttcattaagcagcaggaaaatgtcactcttctgttatctttattggaggagtttgatttccatgtccgctggcctggtgtgaagcttcttacttctcttttaaaacaactagggcctcaggtgcaacaaattattttagtcagtcctatgggtgtttcaagattgatggacttactagcggattccagggaagttatacgtaatgatggcgtcttactactgcaggcactaacaagaagcaatggtgcaatccagaaaattgttgcttttgaaaatgctttcgagagactactggacattatttcagaggaggggaacagtgatggaggtatagtagttgaagattgtttgattttgctccaaaacttattaaaaaacaacaactccaatcaaaatttttttaaagaaggctcatatattcaacgtatgaaaccttggtttgaagttggagatgaaaattctggctggtctgcacagaaagtgaccaatctacatctaatgctacagcttgttcgtgtattggtatctcccaccaaccctcctggtgctaccagtagctgccagaaggctatgttccagtgtgggttattgcagcagctttgtactatcctaatggctactggggttcctgctgatatcctgactgagaccataaatactgtatcagaagttattcgaggctgccaagtaaaccaagactactttgcatctgtaaatgcaccttcaaacccaccaagaccggcaattgtagtacttctcatgtccatggttaatgaaaggcagccatttgttttgcgctgtgctgttctctattgtttccagtgtttcttgtataaaaaccaaaaaggacaaggagaaatcgtgtcaacacttttaccttctaccattgatgcaacaggtaattcagtttcagctggccagttattatgtggaggtttgttttctactgattcactttcaaactggtgtgctgctgtggcccttgcccatgcgttgcaagaaaatgccacccagaaagaacagttgctcagggttcaacttgctacaagtattggcaaccctccagtttctttacttcaacagtgcaccaatattctttcacagggaagcaaaatacaaacaagagttggattattaatgttgctttgtacctggctaagcaattgtcccattgcagtaacgcattttcttcacaattcagccaatgttccattccttacaggacaaattgcagaaaatcttggagaagaagagcagttggtccaaggcttatgtgcccttttgttgggcatttcgatttatttcaatgataactcacttgagagctacatgaaagagaagctaaaacaactgattgagaagaggattggcaaagagaatttcatagagaaactaggatttattagcaaacatgagttgtattccagagcatctcagaaaccccagccaaactttcccagtccagaatacatgatatttgatcatgagtttacgaagctggtaaaagaacttgaaggtgttataactaaggctatttataagtccagtgaagaagataaaaaagaagaagaggtgaaaaaaacattagaacagcatgacaatattgtgactcactacaaaaatatgattcgagagcaagatctccaacttgaggaattaaggcagcaggtttctacattaaaatgtcaaaatgaacagctccagacggcagtcacacagcaagtatcacagatccagcagcacaaagaccagtataatcttcttaaaatacagctaggaaaagacaatcagcatcaaggttcttacagtgagggggctcagatgaatggcattcagccagaagaaattggtagattgcgagaagagatagaagaattaaaacgtaatcaggaacttttacaaagccagctgactgaaaaggactctatgattgaaaatatgaaatcttcccaaacatctggcacaaatgaacagtcttcagcaatagtttcagctagagattctgaacaagttgcagaattaaaacaggaactggcaactttaaagtctcagttaaactcacaatctgtggagatcaccaaactacagacagaaaagcaggaactgttacagaaaacagaagcgtttgcaaaatcagttgaggtacaaggagagaccgagactataatagccaccaaaactactgatgtagaaggaagactgtcagcattattacaagagaccaaagagttaaagaatgaaattaaagctctgtctgaggaaagaactgccattaaagagcagctggattcatctaatagtaccattgccattttacaaactgagaaagacaaactagagttggaaattacagattctaaaaaagaacaagatgatctcttggtgctcttggccgatcaagatcagaaaatactgtcattgaagaataaactcaaggatcttggtcatccagttgaagaagaggatgaacttgaatctggagaccaagaggatgaggatgatgaaagtgaagatcctggcaaggatctagatcatatctagttttcaaatctctaggaacaatagagattatatcataactctgaagatggactctaaactttggtttacctccatggaaaataaagatttagaaaccaggtggaaaacattcactattaagactattgatatatttttgtaatgttgccacccatgttgaaaaccttaaaactgaatttatgtagaacacacatcttttatttaaatccatctgaactgtcccaaaatgtaatttgcaaagagcttcaaacaccagttgtttactttgcaaaatttgtgacttttaagtactaacacatttgattgaatgtgtattgaattggaattattatttctaaattcagcatttgagtccttagttgatgattttcttttaaagaaattagtttatttaaaagcaagatagcctgggttgggagttagtgcatatcatcagccctccatctaatgtgattgctaagatgtgcaggataggacagcttagaatgagtgccttgacacctacatatggctgcattccatacctcagtgaagaagccgaaggatgctgacacacagtgatgtggagggcattccggagaaacttttgcaacagtgtattaatgtgattggttttctttttgttttaagctaaacatctaaaacaaatttcaagttaacagttcatacaactcagatttagtattattgtttatcataaaacatattatgttcctagttttaaaaagacccaaagtatgattaatataatttattggcatttttgctgaataggtttaagtcagataatagattttaaaaaagcaaatgaggcaatgtgtcaaaatttaatgtttcataataaaaatagatacgttgacttaatccttggtcatggttccctttgtttacatcttaaaagtattttattcttaataaaagatgaggcaagtgaaaatgaaaaggcga

SEQ ID NO: 321078 - DNA, 3884 bp, Homo sapiens
  misc_feature (1)..(2): n is a, c, g, or t
  misc_feature (4)..(4): n is a, c, g, or t
nncncgagccgccacgtaatgccacgtccccgcgcatgcgcatcttggccgctgctggcggctgtttccgggcttagagggctggagtggccgccgagttggaggcggtggtggcagcagtaggagtgtgtagagtgcgggattgggggccaggccctgcggagggcgggggaagttgtcttcttttttttccggaggggccggtaaacctggtggctgaacggcaagatgaatttcctccgcggggtaatggggggtcagagtgccggaccccagcacacagaagccgagacgattcaaaagctttgtgacagagtagcttcatctactttattggatgatcgaagaaatgctgttcgtgctctcaaatcattatctaagaaataccgcttggaagtgggtatacaagctatggaacatcttattcatgttttacaaacagatcgttcagattctgaaataataggttatgctttggacacactatataatataatatctaatgaagaagaagaagaagtagaagaaaattccacaagacagagtgaagatttgggaagccaatttacagaaattttcattaagcagcaggaaaatgtcactcttctgttatctttattggaggagtttgatttccatgtccgctggcctggtgtgaagcttcttacttctcttttaaaacaactagggcctcaggtgcaacaaattattttagtcagtcctatgggtgtttcaagattgatggacttactagcggattccagggaagttatacgtaatgatggcgtcttactactgcaggcactaacaagaagcaatggtgcaatccagaaaattgttgcttttgaaaatgctttcgagagactactggacattatttcagaggaggggaacagtgatggaggtatagtagttgaagattgtttgattttgctccaaaacttattaaaaaacaacaactccaatcaaaatttttttaaagaaggctcatatattcaacgtatgaaaccttggtttgaagttggagatgaaaattctggctggtctgcacagaaagtgaccaatctacatctaatgctacagcttgttcgtgtattggtatctcccaccaaccctcctggtgctaccagtagctgccagaaggctatgttccagtgtgggttattgcagcagctttgtactatcctaatggctactggggttcctgctgatatcctgactgagaccataaatactgtatcagaagttattcgaggctgccaagtaaaccaagactactttgcatctgtaaatgcaccttcaaacccaccaagaccggcaattgtagtacttctcatgtccatggttaatgaaaggcagccatttgttttgcgctgtgctgttctctattgtttccagtgtttcttgtataaaaaccaaaaaggacaaggagaaatcgtgtcaacacttttaccttctaccattgatgcaacaggtaattcagtttcagctggccagttattatgtggaggtttgttttctactgattcactttcaaactggtgtgctgctgtggcccttgcccatgcgttgcaagaaaatgccacccagaaagaacagttgctcagggttcaacttgctacaagtattggcaaccctccagtttctttacttcaacagtgcaccaatattctttcacagggaagcaaaatacaaacaagagttggattattaatgttgctttgtacctggctaagcaattgtcccattgcagtaacgcattttcttcacaattcagccaatgttccattccttacaggacaaattgcagaaaatcttggagaagaagagcagttggtccaaggcttatgtgcccttttgttgggcatttcgatttatttcaatgataactcacttgagagctacatgaaagagaagctaaaacaactgattgagaagaggattggcaaagagaatttcatagagaaactaggatttattagcaaacatgagttgtattccagagcatctcagaaaccccagccaaactttcccagtccagaatacatgatatttgatcatgagtttacgaagctggtaaaagaacttgaaggtgttataactaaggctatttataagtccagtgaagaagataaaaaagaagaagaggtgaaaaaaacattagaacagcatgacaatattgtgactcactacaaaaatatgattcgagagcaagatctccaacttgaggaattaaggcagcaggtttctacattaaaatgtcaaaatgaacagctccagacggcagtcacacagcaagtatcacagatccagcagcacaaagaccagtataatcttcttaaaatacagctaggaaaagacaatcagcatcaaggttcttacagtgagggggctcagatgaatggcattcagccagaagaaattggtagattgcgagaagagatagaagaattaaaacgtaatcaggaacttttacaaagccagctgactgaaaaggactctatgattgaaaatatgaaatcttcccaaacatctggcacaaatgaacagtcttcagcaatagtttcagctagagattctgaacaagttgcagaattaaaacaggaactggcaactttaaagtctcagttaaactcacaatctgtggagatcaccaaactacagacagaaaagcaggaactgttacagaaaacagaagcgtttgcaaaatcagttgaggtacaaggagagaccgagactataatagccaccaaaactactgatgtagaaggaagactgtcagcattattacaagagaccaaagagttaaagaatgaaattaaagctctgtctgaggaaagaactgccattaaagagcagctggattcatctaatagtaccattgccattttacaaactgagaaagacaaactagagttggaaattacagattctaaaaaagaacaagatgatctcttggtgctcttggccgatcaagatcagaaaatactgtcattgaagaataaactcaaggatcttggtcatccagttgaagaagaggatgaacttgaatctggagaccaagaggatgaggatgatgaaagtgaagatcctggcaaggatctagatcatatctagttttcaaatctctaggaacaatagagattatatcataactctgaagatggactctaaactttggtttacctccatggaaaataaagatttagaaaccaggtggaaaacattcactattaagactattgatatatttttgtaatgttgccacccatgttgaaaaccttaaaactgaatttatgtagaacacacatcttttatttaaatccatctgaactgtcccaaaatgtaatttgcaaagagcttcaaacaccaaaaatataccattttaaggcatgtggtgacaatgctatttgccttagttcattcgttgtttactttgcaaaatttgtgacttttaagtactaacacatttgattgaatgtgtattgaattggaattattatttctaaattcagcatttgagtccttagttgatgattttcttttaaagaaattagtttatttaaaagcaagatagcctgggttgggagttagtgcatatcatcagccctccatctaatgtgattgctaagatgtgcaggataggacagcttagaatgagtgccttgacacctacatatggctgcattccatacctcagtgaagaagccgaaggatgctgacacacagtgatgtggagggcattccggagaaacttttgcaacagtgtattaatgtgattggttttctttttgttttaaaactaggaacataatatgttttatgataaacaataatactaaatctgagttgtatgaactgttaacttgaaatttgttttagag

SEQ ID NO: 321079 - DNA, 2526 bp, Homo sapiens
tctcaaactcctgacctcaggtgatccacccaccttggcctcccaaagtgctgagattacaggcatgagccaccacacctagcctatatatggaatttcttatgggaactcttatgtgaagtattaatgtatgtcaaattcaaattgcaaaatgtactagatattttcaatccttagcctccttaacaaagatttcagcttacaggacaaattgcagaaaatcttggagaagaagagcagttggtccaaggcttatgtgcccttttgttgggcatttcgatttatttcaatgataactcacttgagagctacatgaaagagaagctaaaacaactgattgagaagaggattggcaaagagaatttcatagagaaactaggatttattagcaaacatgagttgtattccagagcatctcagaaaccccagccaaactttcccagtccagaatacatgatatttgatcatgagtttacgaagctggtaaaagaacttgaaggtgttataactaaggctatttataagtccagtgaagaagataaaaaagaagaagaggtgaaaaaaacattagaacagcatgacaatattgtgactcactacaaaaatatgattcgagagcaagatctccaacttgaggaattaaggcagcaggtttctacattaaaatgtcaaaatgaacagctccagacggcagtcacacagcaagtatcacagatccagcagcacaaagaccagtataatcttcttaaaatacagctaggaaaagacaatcagcatcaaggttcttacagtgagggggctcagatgaatggcattcagccagaagaaattggtagattgcgagaagagatagaagaattaaaacgtaatcaggaacttttacaaagccagctgactgaaaaggactctatgattgaaaatatgaaatcttcccaaacatctggcacaaatgaacagtcttcagcaatagtttcagctagagattctgaacaagttgcagaattaaaacaggaactggcaactttaaagtctcagttaaactcacaatctgtggagatcaccaaactacagacagaaaagcaggaactgttacagaaaacagaagcgtttgcaaaatcagttgaggtacaaggagagaccgagactataatagccaccaaaactactgatgtagaaggaagactgtcagcattattacaagagaccaaagagttaaagaatgaaattaaagctctgtctgaggaaagaactgccattaaagagcagctggattcatctaatagtaccattgccattttacaaactgagaaagacaaactagagttggaaattacagattctaaaaaagaacaagatgatctcttggtgctcttggccgatcaagatcagaaaatactgtcattgaagaataaactcaaggatcttggtcatccagttgaagaagaggatgaacttgaatctggagaccaagaggatgaggatgatgaaagtgaagatcctggcaaggatctagatcatatctagttttcaaatctctaggaacaatagagattatatcataactctgaagatggactctaaactttggtttacctccatggaaaataaagatttagaaaccaggtggaaaacattcactattaagactattgatatatttttgtaatgttgccacccatgttgaaaaccttaaaactgaatttatgtagaacacacatcttttatttaaatccatctgaactgtcccaaaatgtaatttgcaaagagcttcaaacaccaaaaatataccattttaaggcatgtggtgacaatgctatttgccttagttcattcgttgtttactttgcaaaatttgtgacttttaagtactaacacatttgattgaatgtgtattgaattggaattattatttctaaattcagcatttgagtccttagttgatgattttcttttaaagaaattagtttatttaaaagcaagatagcctgggttgggagttagtgcatatcatcagccctccatctaatgtgattgctaagatgtgcaggataggacagcttagaatgagtgccttgacacctacatatggctgcattccatacctcagtgaagaagccgaaggatgctgacacacagtgatgtggagggcattccggagaaacttttgcaacagtgtattaatgtgattggttttctttttgttttaagctaaacatctaaaacaaatttcaagttaacagttcatacaactcagatttagtattattgtttatcataaaacatattatgttcctagttttaaaaagacccaaagtatgattaatataatttattggcatttttgctgaataggtttaagtcagataatagattttaaaaaagcaaatgaggcaatgtgtcaaaatttaatgtttcataataaaaatagatacgttgacttaatccttggtcatggttccctttgtttacatcttaaaagtattttattcttaataaaagatgaggcaagtgaaaatgaaaaggcga

SEQ ID NO: 321080 - DNA, 1973 bp, Homo sapiens
cccacgcgtccggcccacgcgtccatgacaatattgtgactcactacaaaaatatgattcgagagcaagatctccaacttgaggaattaaggcagcaggtttctacattaaaatgtcaaaatgaacagctccagacggcagtcacacagcaagtatcacagatccagcagcacaaagaccagtataatcttcttaaaatacagctaggaaaagacaatcagcatcaaggttcttacagtgagggggctcagatgaatggcattcagccagaagaaattggtagattgcgagaagagatagaagaattaaaacgtaatcaggaacttttacaaagccagctgactgaaaaggactctatgattgaaaatatgaaatcttcccaaacatctggcacaaatgaacagtcttcagcaatagtttcagctagagattctgaacaagttgcagaattaaaacaggaactggcaactttaaagtctcagttaaactcacaatctgtggagatcaccaaactacagacagaaaagcaggaactgttacagaaaacagaagcgtttgcaaaatcagttgaggtacaaggagagaccgagactataatagccaccaaaactactgatgtagaaggaagactgtcagcattattacaagagaccaaagagttaaagaatgaaattaaagctctgtctgaggaaagaactgccattaaagagcagctggattcatctaatagtaccattgccattttacaaactgagaaagacaaactagagttggaaattacagattctaaaaaagaacaagatgatctcttggtgctcttggccgatcaagatcagaaaatactgtcattgaagaataaactcaaggatcttggtcatccagttgaagaagaggatgaacttgaatctggagaccaagaggatgaggatgatgaaagtgaagatcctggcaaggatctagatcatatctagttttcaaatctctaggaacaatagagattatatcataactctgaagatggactctaaactttggtttacctccatggaaaataaagatttagaaaccaggtggaaaacattcactattaagactattgatatatttttgtaatgttgccacccatgttgaaaaccttaaaactgaatttatgtagaacacacatcttttatttaaatccatctgaactgtcccaaaatgtaatttgcaaagagcttcaaacaccaaaaatataccattttaaggcatgtggtgacaatgctatttgccttagttcattcgttgtttactttgcaaaatttgtgacttttaagtactaacacatttgattgaatgtgtattgaattggaattattatttctaaattcagcatttgagtccttagttgatgattttcttttaaagaaattagtttatttaaaagcaagatagcctgggttgggagttagtgcatatcatcagccctccatctaatgtgattgctaagatgtgcaggataggacagcttagaatgagtgccttgacacctacatatggctgcattccatacctcagtgaagaagccgaaggatgctgacacacagtgatgtggagggcattccggagaaacttttgcaacagtgtattaatgtgattggttttctttttgttttaagctaaacatctaaaacaaatttcaagttaacagttcatacaactcagatttagtattattgtttatcataaaacatattatgttcctagttttaaaaagacccaaagtatgattaatataatttattggcatttttgctgaataggtttaagtcagataatagattttaaaaaagcaaatgaggcaatgtgtcaaaatttaatgtttcataataaaaatagatacgttgacttaatccttggtcatggttccctttgtttacatcttaaaagtattttattcttaataaaagatgaggcaagtgaaaatgaaaaggcga

SEQ ID NO: 321081 - DNA, 1897 bp, Homo sapiens
agatgaaatgtgattgcaaaagtgctgccaaagtaattgaatgaagaaaattacatatttgaatcttctacttcaaaaatgaaaaactgaagtttcccgttggcttttaaaatgttatgtctgtctaacaggaaaagacaatcagcatcaaggttcttacagtgagggggctcagatgaatggcattcagccagaagaaattggtagattgcgagaagagatagaagaattaaaacgtaatcaggaacttttacaaagccagctgactgaaaaggactctatgattgaaaatatgaaatcttcccaaacatctggcacaaatgaacagtcttcagcaatagtttcagctagagattctgaacaagttgcagaattaaaacaggaactggcaactttaaagtctcagttaaactcacaatctgtggagatcaccaaactacagacagaaaagcaggaactgttacagaaaacagaagcgtttgcaaaatcagttgaggtacaaggagagaccgagactataatagccaccaaaactactgatgtagaaggaagactgtcagcattattacaagagaccaaagagttaaagaatgaaattaaagctctgtctgaggaaagaactgccattaaagagcagctggattcatctaatagtaccattgccattttacaaactgagaaagacaaactagagttggaaattacagattctaaaaaagaacaagatgatctcttggtgctcttggccgatcaagatcagaaaatactgtcattgaagaataaactcaaggatcttggtcatccagttgaagaagaggatgaacttgaatctggagaccaagaggatgaggatgatgaaagtgaagatcctggcaaggatctagatcatatctagttttcaaatctctaggaacaatagagattatatcataactctgaagatggactctaaactttggtttacctccatggaaaataaagatttagaaaccaggtggaaaacattcactattaagactattgatatatttttgtaatgttgccacccatgttgaaaaccttaaaactgaatttatgtagaacacacatcttttatttaaatccatctgaactgtcccaaaatgtaatttgcaaagagcttcaaacaccaaaaatataccattttaaggcatgtggtgacaatgctatttgccttagttcattcgttgtttactttgcaaaatttgtgacttttaagtactaacacatttgattgaatgtgtattgaattggaattattatttctaaattcagcatttgagtccttagttgatgattttcttttaaagaaattagtttatttaaaagcaagatagcctgggttgggagttagtgcatatcatcagccctccatctaatgtgattgctaagatgtgcaggataggacagcttagaatgagtgccttgacacctacatatggctgcattccatacctcagtgaagaagccgaaggatgctgacacacagtgatgtggagggcattccggagaaacttttgcaacagtgtattaatgtgattggttttctttttgttttaagctaaacatctaaaacaaatttcaagttaacagttcatacaactcagatttagtattattgtttatcataaaacatattatgttcctagttttaaaaagacccaaagtatgattaatataatttattggcatttttgctgaataggtttaagtcagataatagattttaaaaaagcaaatgaggcaatgtgtcaaaatttaatgtttcataataaaaatagatacgttgacttaatccttggtcatggttccctttgtttacatcttaaaagtattttattcttaataaaagatgaggcaagtgaaaatgaaaaggcga

SEQ ID NO: 321082 - DNA, 1895 bp, Homo sapiens
tttctcaggtgtgctgatttagttatcactgttacttgctttctcaaaattccccaattatattgctctcttctcttactgttcttgtttttgtaggtttcttcctctctccctcccatccttcctttctttcttccttctcccctcccttcctgtcttttatgattttttttttttttgcatgggatttcaggagggagcagaggtaaatgaatgtgttgaattttccatcttgaacccaaaattcaagaatagttctttagagttagattttaaaactaggaggttgtaaatcatttttttaaatgtctccctgtaaatatttccttgatgaaattaataccatttaatgttatgactcaactatttttgtctcttaggaactggcaactttaaagtctcagttaaactcacaatctgtggagatcaccaaactacagacagaaaagcaggaactgttacagaaaacagaagcgtttgcaaaatcagttgaggtacaaggagagaccgagactataatagccaccaaaactactgatgtagaaggaagactgtcagcattattacaagagaccaaagagttaaagaatgaaattaaagctctgtctgaggaaagaactgccattaaagagcagctggattcatctaatagtaccattgccattttacaaactgagaaagacaaactagagttggaaattacagattctaaaaaagaacaagatgatctcttggtgctcttggccgatcaagatcagaaaatactgtcattgaagaataaactcaaggatcttggtcatccagttgaagaagaggatgaacttgaatctggagaccaagaggatgaggatgatgaaagtgaagatcctggcaaggatctagatcatatctagttttcaaatctctaggaacaatagagattatatcataactctgaagatggactctaaactttggtttacctccatggaaaataaagatttagaaaccaggtggaaaacattcactattaagactattgatatatttttgtaatgttgccacccatgttgaaaaccttaaaactgaatttatgtagaacacacatcttttatttaaatccatctgaactgtcccaaaatgtaatttgcaaagagcttcaaacaccaaaaatataccattttaaggcatgtggtgacaatgctatttgccttagttcattcgttgtttactttgcaaaatttgtgacttttaagtactaacacatttgattgaatgtgtattgaattggaattattatttctaaattcagcatttgagtccttagttgatgattttcttttaaagaaattagtttatttaaaagcaagatagcctgggttgggagttagtgcatatcatcagccctccatctaatgtgattgctaagatgtgcaggataggacagcttagaatgagtgccttgacacctacatatggctgcattccatacctcagtgaagaagccgaaggatgctgacacacagtgatgtggagggcattccggagaaacttttgcaacagtgtattaatgtgattggttttctttttgttttaagctaaacatctaaaacaaatttcaagttaacagttcatacaactcagatttagtattattgtttatcataaaacatattatgttcctagttttaaaaagacccaaagtatgattaatataatttattggcatttttgctgaataggtttaagtcagataatagattttaaaaaagcaaatgaggcaatgtgtcaaaatttaatgtttcataataaaaatagatacgttgacttaatccttggtcatggttccctttgtttacatcttaaaagtattttattcttaataaaagatgaggcaagtgaaaatgaaaaggcga

SEQ ID NO: 321083 - DNA, 2362 bp, Homo sapiens
  misc_feature (1)..(2): n is a, c, g, or t
  misc_feature (4)..(4): n is a, c, g, or t
nncncgagccgccacgtaatgccacgtccccgcgcatgcgcatcttggccgctgctggcggctgtttccgggcttagagggctggagtggccgccgagttggaggcggtggtggcagcagtaggagtgtgtagagtgcgggattgggggccaggccctgcggagggcgggggaagttgtcttcttttttttccggaggggccggtaaacctggtggctgaacggcaagatgaatttcctccgcggggtaatggggggtcagagtgccggaccccagcacacagaagccgagacgattcaaaagctttgtgacagagtagcttcatctactttattggatgatcgaagaaatgctgttcgtgctctcaaatcattatctaagaaataccgcttggaagtgggtatacaagctatggaacatcttattcatgttttacaaacagatcgttcagattctgaaataataggttatgctttggacacactatataatataatatctaatgaagaagaagaagaagtagaagaaaattccacaagacagagtgaagatttgggaagccaatttacagaaattttcattaagcagcaggaaaatgtcactcttctgttatctttattggaggagtttgatttccatgtccgctggcctggtgtgaagcttcttacttctcttttaaaacaactagggcctcaggtgcaacaaattattttagtcagtcctatgggtgtttcaagattgatggacttactagcggattccagggaagttatacgtaatgatggcgtcttactactgcaggcactaacaagaagcaatggtgcaatccagaaaattgttgcttttgaaaatgctttcgagagactactggacattatttcagaggaggggaacagtgatggaggtatagtagttgaagattgtttgattttgctccaaaacttattaaaaaacaacaactccaatcaaaatttttttaaagaaggctcatatattcaacgtatgaaaccttggtttgaagttggagatgaaaattctggctggtctgcacagaaagtgaccaatctacatctaatgctacagcttgttcgtgtattggtatctcccaccaaccctcctggtgctaccagtagctgccagaaggctatgttccagtgtgggttattgcagcagctttgtactatcctaatggctactggggttcctgctgatatcctgactgagaccataaatactgtatcagaagttattcgaggctgccaagtaaaccaagactactttgcatctgtaaatgcaccttcaaacccaccaagaccggcaattgtagtacttctcatgtccatggttaatgaaaggcagccatttgttttgcgctgtgctgttctctattgtttccagtgtttcttgtataaaaaccaaaaaggacaaggagaaatcgtgtcaacacttttaccttctaccattgatgcaacaggtaattcagtttcagctggccagttattatgtggaggtttgttttctactgattcactttcaaactggtgtgctgctgtggcccttgcccatgcgttgcaagaaaatgccacccagaaagaacagttgctcagggttcaacttgctacaagtattggcaaccctccagtttctttacttcaacagtgcaccaatattctttcacagggaagcaaaatacaaacaagagttggattattaatgttgctttgtacctggctaagcaattgtcccattgcagtaacgcattttcttcacaattcagccaatgttccattccttacaggacaaattgcagaaaatcttggagaagaagagcagttggtccaaggcttatgtgcccttttgttgggcatttcgatttatttcaatgataactcacttgagagctacatgaaagagaagctaaaacaactgattgagaagaggattggcaaagagaatttcatagagaaactaggatttattagcaaacatgagttgtattccagagcatctcagaaaccccagccaaactttcccagtccagaatacatgatatttgatcatgagtttacgaagctggtaaaagaacttgaaggtgttataactaaggctatttataagtccagtgaagaagataaaaaagaagaagaggtgaaaaaaacattagaacagcatgacaatattgtgactcaggtggtgtgctcattctcaaccccctgacaaaacacatagcctaccccttccttgtactatccctatgaggcataattatatcaagctccatctgcctacgacaaacagacctaaaatcgctcattgcatactcttcaatcagccacatagccctcgtagtaacagccattct

SEQ ID NO: 321084 - DNA, 1517 bp, Homo sapiens
  misc_feature (1)..(2): n is a, c, g, or t
  misc_feature (4)..(4): n is a, c, g, or t
nncncgagccgccacgtaatgccacgtccccgcgcatgcgcatcttggccgctgctggcggctgtttccgggcttagagggctggagtggccgccgagttggaggcggtggtggcagcagtaggagtgtgtagagtgcgggattgggggccaggccctgcggagggcgggggaagttgtcttcttttttttccggaggggccggtaaacctggtggctgaacggcaagatgaatttcctccgcggggtaatggggggtcagagtgccggaccccagcacacagaagccgagacgattcaaaagctttgtgacagagtagcttcatctactttattggatgatcgaagaaatgctgttcgtgctctcaaatcattatctaagaaataccgcttggaagtgggtatacaagctatggaacatcttattcatgttttacaaacagatcgttcagattctgaaataataggttatgctttggacacactatataatataatatctaatgaagaagaagaagaagtagaagaaaattccacaagacagagtgaagatttgggaagccaatttacagaaattttcattaagcagcaggaaaatgtcactcttctgttatctttattggaggagtttgatttccatgtccgctggcctggtgtgaagcttcttacttctcttttaaaacaactagggcctcaggtgcaacaaattattttagtcagtcctatgggtgtttcaagattgatggacttactagcggattccagggaagttatacgtaatgatggcgtcttactactgcaggcactaacaagaagcaatggtgcaatccagaaaattgttgcttttgaaaatgctttcgagagactactggacattatttcagaggaggggaacagtgatggaggtatagtagttgaagattgtttgattttgctccaaaacttattaaaaaacaacaactccaatcaaaatttttttaaagaaggctcatatattcaacgtatgaaaccttggtttgaagttggagatgaaaattctggctggtctgcacagaaagtgaccaatctacatctaatgctacagcttgttcgtgtattggtatctcccaccaaccctcctggtgctaccagtagctgccagaaggctatgttccagtgtgggttattgcagcagctttgtactatcctaatggctactggggttcctgctgatatcctgactgagaccataaatactgtatcagaagttattcgaggctgccaagtaaaccaagactactttgcatctgtaaatgcaccttcaaacccaccaagaccggcaattgtagtacttctcatgtccatggttaatgaaaggcagccatttgttttgcgctgtgctgtccggacagcacgcgctaacaatagacataatttacttcattatgtctatcgttcattgtctgtcttttccaaattctactggctcttaccctctccagaattgaaactagtatcttgtttttgttactgatgtac

SEQ ID NO: 321085 - DNA, 607 bp, Homo sapiens
gttaaatgttgaatgtgacatgaacagattttcacaatattaaatacgtctttttcctctaggttgaagaagaggatgaacttgaatctggagaccaagaggatgaggatgatgaaagtgaagatcctggcaaggatctagatcatatctagttttcaaatctctaggaacaatagagattatatcataactctgaagatggactctaaactttggtttacctccatggaaaataaagatttagaaaccaggtggaaaacattcactattaagactattgatatatttttgtaatgttgccacccatgttgaaaaccttaaaactgaatttatgtagaacacacatcttttatttaaatccatctgaactgtcccaaaatgtaatttgcaaagagcttcaaacaccaaaaatataccattttaaggcatgtggtgacaatgctatttgccttagttcattcgttgtttactttgcaaaatttgtgacttttaagtactaacacatttgattgaatgtgtattgaattggaattattatttctaaattcagcatttgagtccttagttgatgattttcttttaaagaaattagtttatttaaaagcaa

SEQ ID NO: 321086 - DNA, 298 bp, Homo sapiens
cctgaattttggcacttaaaaagtgggatataagattttttttcatgtatacatatgtaactaacctgcacaatgtgcacatgtaccctaaaacttaaagtataataaaaaaaaaacaaaaaaaaaagattttttttctattgaaaacatattttccttcttgacttaatttctctaaatgttctttttctttcttccccttaacagaccataaatactgtatcagaagttattcgaggctgccaagtaaaccaagactactttgcatctgtaaatgcaccttcaaacccaccaaggt

SEQ ID NO: 321087 - DNA, 616 bp, Homo sapiens
tgggatataagattttttttcatgtatacatatgtaactaacctgcacaatgtgcacatgtaccctaaaacttaaagtataataaaaaaaaaacaaaaaaaaaagattttttttctattgaaaacatattttccttcttgacttaatttctctaaatgttctttttctttcttccccttaacagaccataaatactgtatcagaagttattcgaggctgccaagtaaaccaagactactttgcatctgtaaatgcaccttcaaacccaccaaggtagaaaaagggaaatactgagattactctgaggaagtaaaaactttgggttgttaatgtatctcatatacacatcttactctttttaaagaagtttagttgtatgttttggaactagaaattatctgacaagataaatgatattgatattttaaaagagttggtagtctttggaatttagatacttagattcagatatcatgtcgtccacatcctagctgtatgccttaagcaagcagtcacttcacttctgtcagttacagttttctgtgaaatagagatggaaatacttaacttgctggtgttctggttatgattcttcaatcaacaaaaatgactagtt

SEQ ID NO: 321088 - DNA, 402 bp, Homo sapiens
gagtttgatttccatgtccgctggcctggtgtgaagcttcttacttctcttttaaaacaactagggcctcaggtgcaacaaattattttagtcagtcctatgggtaagtgacttatcttttttatattattttgattcaagcatgagtatcatttcctagagaaagggactgaaatggtgtgttagtaaattgttaataatttgagtcactatttgtatttttggtctgccagcatttttcacatggttgtatgttctaggtgtttcaagattgatggacttactagcggattccagggaagttatacgtaatgatgtaagttaaatttcaaaaagaaatacaaaaatatgtggcttttttttctcttgcaaatgaaatccttgttgttgagttttaggaaa

SEQ ID NO: 321089 - DNA, 4119 bp, Homo sapiens
  misc_feature (1)..(2): n is a, c, g, or t
  misc_feature (4)..(4): n is a, c, g, or t
nncncgagccgccacgtaatgccacgtccccgcgcatgcgcatcttggccgctgctggcggctgtttccgggcttagagggctggagtggccgccgagttggaggcggtggtggcagcagtaggagtgtgtagagtgcgggattgggggccaggccctgcggagggcgggggaagttgtcttcttttttttccggaggggccggtaaacctggtggctgaacggcaagatgaatttcctccgcggggtaatggggggtcagagtgccggaccccagcacacagaagccgagacgattcaaaagctttgtgacagagtagcttcatctactttattggatgatcgaagaaatgctgttcgtgctctcaaatcattatctaagaaataccgcttggaagtgggtatacaagctatggaacatcttattcatgttttacaaacagatcgttcagattctgaaataataggttatgctttggacacactatataatataatatctaatgaagaagaagaagaagtagaagaaaattccacaagacagagtgaagatttgggaagccaatttacagaaattttcattaagcagcaggaaaatgtcactcttctgttatctttattggaggagtttgatttccatgtccgctggcctggtgtgaagcttcttacttctcttttaaaacaactagggcctcaggtgcaacaaattattttagtcagtcctatgggtgtttcaagattgatggacttactagcggattccagggaagttatacgtaatgatggcgtcttactactgcaggcactaacaagaagcaatggtgcaatccagaaaattgttgcttttgaaaatgctttcgagagactactggacattatttcagaggaggggaacagtgatggaggtatagtagttgaagattgtttgattttgctccaaaacttattaaaaaacaacaactccaatcaaaatttttttaaagaaggctcatatattcaacgtatgaaaccttggtttgaagttggagatgaaaattctggctggtctgcacagaaagtgaccaatctacatctaatgctacagcttgttcgtgtattggtatctcccaccaaccctcctggtgctaccagtagctgccagaaggctatgttccagtgtgggttattgcagcagctttgtactatcctaatggctactggggttcctgctgatatcctgactgagaccataaatactgtatcagaagttattcgaggctgccaagtaaaccaagactactttgcatctgtaaatgcaccttcaaacccaccaagaccggcaattgtagtacttctcatgtccatggttaatgaaaggcagccatttgttttgcgctgtgctgttctctattgtttccagtgtttcttgtataaaaaccaaaaaggacaaggagaaatcgtgtcaacacttttaccttctaccattgatgcaacaggtaattcagtttcagctggccagttattatgtggaggtttgttttctactgattcactttcaaactggtgtgctgctgtggcccttgcccatgcgttgcaagaaaatgccacccagaaagaacagttgctcagggttcaacttgctacaagtattggcaaccctccagtttctttacttcaacagtgcaccaatattctttcacagggaagcaaaatacaaacaagagttggattattaatgttgctttgtacctggctaagcaattgtcccattgcagtaacgcattttcttcacaattcagccaatgttccattccttacaggacaaattgcagaaaatcttggagaagaagagcagttggtccaaggcttatgtgcccttttgttgggcatttcgatttatttcaatgataactcacttgagagctacatgaaagagaagctaaaacaactgattgagaagaggattggcaaagagaatttcatagagaaactaggatttattagcaaacatgagttgtattccagagcatctcagaaaccccagccaaactttcccagtccagaatacatgatatttgatcatgagtttacgaagctggtaaaagaacttgaaggtgttataactaaggctatttataagtccagtgaagaagataaaaaagaagaagaggtgaaaaaaacattagaacagcatgacaatattgtgactcactacaaaaatatgattcgagagcaagatctccaacttgaggaattaaggcagcaggtttctacattaaaatgtcaaaatgaacagctccagacggcagtcacacagcaagtatcacagatccagcagcacaaagaccagtataatcttcttaaaatacagctaggaaaagacaatcagcatcaaggttcttacagtgagggggctcagatgaatggcattcagccagaagaaattggtagattgcgagaagagatagaagaattaaaacgtaatcaggaacttttacaaagccagctgactgaaaaggactctatgattgaaaatatgaaatcttcccaaacatctggcacaaatgaacagtcttcagcaatagtttcagctagagattctgaacaagttgcagaattaaaacaggaactggcaactttaaagtctcagttaaactcacaatctgtggagatcaccaaactacagacagaaaagcaggaactgttacagaaaacagaagcgtttgcaaaatcagttgaggtacaaggagagaccgagactataatagccaccaaaactactgatgtagaaggaagactgtcagcattattacaagagaccaaagagttaaagaatgaaattaaagctctgtctgaggaaagaactgccattaaagagcagctggattcatctaatagtaccattgccattttacaaactgagaaagacaaactagagttggaaattacagattctaaaaaagaacaagatgatctcttggtgctcttggccgatcaagatcagaaaatactgtcattgaagaataaactcaaggatcttggtcatccagttgaagaagaggatgaacttgaatctggagaccaagaggatgaggatgatgaaagtgaagatcctggcaaggatctagatcatatctagttttcaaatctctaggaacaatagagattatatcataactctgaagatggactctaaactttggtttacctccatggaaaataaagatttagaaaccaggtggaaaacattcactattaagactattgatatatttttgtaatgttgccacccatgttgaaaaccttaaaactgaatttatgtagaacacacatcttttatttaaatccatctgaactgtcccaaaatgtaatttgcaaagagcttcaaacaccaaaaatataccattttaaggcatgtggtgacaatgctatttgccttagttcattcgttgtttactttgcaaaatttgtgacttttaagtactaacacatttgattgaatgtgtattgaattggaattattatttctaaattcagcatttgagtccttagttgatgattttcttttaaagaaattagtttatttaaaagcaagatagcctgggttgggagttagtgcatatcatcagccctccatctaatgtgattgctaagatgtgcaggataggacagcttagaatgagtgccttgacacctacatatggctgcattccatacctcagtgaagaagccgaaggatgctgacacacagtgatgtggagggcattccggagaaacttttgcaacagtgtattaatgtgattggttttctttttgttttaagctaaacatctaaaacaaatttcaagttaacagttcatacaactcagatttagtattattgtttatcataaaacatattatgttcctagttttaaaaagacccaaagtatgattaatataatttattggcatttttgctgaataggtttaagtcagataatagattttaaaaaagcaaatgaggcaatgtgtcaaaatttaatgtttcataataaaaatagatacgttgacttaatccttggtcatggttccctttgtttacatcttaaaagtattttattcttaataaaagatgaggcaagtgaaaatgaaaaggcga

SEQ ID NO: 321090 - DNA, 4140 bp, Homo sapiens
  misc_feature (1)..(2): n is a, c, g, or t
  misc_feature (4)..(4): n is a, c, g, or t
nncncgagccgccacgtaatgccacgtccccgcgcatgcgcatcttggccgctgctggcggctgtttccgggcttagagggctggagtggccgccgagttggaggcggtggtggcagcagtaggagtgtgtagagtgcgggattgggggccaggccctgcggagggcgggggaagttgtcttcttttttttccggaggggccggtaaacctggtggctgaacggcaagatgaatttcctccgcggggtaatggggggtcagagtgccggaccccagcacacagaagccgagacgattcaaaagctttgtgacagagtagcttcatctactttattggatgatcgaagaaatgctgttcgtgctctcaaatcattatctaagaaataccgcttggaagtgggtatacaagctatggaacatcttattcatgttttacaaacagatcgttcagattctgaaataataggttatgctttggacacactatataatataatatctaatgaagaagaagaagaagtagaagaaaattccacaagacagagtgaagatttgggaagccaatttacagaaattttcattaagcagcaggaaaatgtcactcttctgttatctttattggaggagtttgatttccatgtccgctggcctggtgtgaagcttcttacttctcttttaaaacaactagggcctcaggtgcaacaaattattttagtcagtcctatgggtgtttcaagattgatggacttactagcggattccagggaagttatacgtaatgatggcgtcttactactgcaggcactaacaagaagcaatggtgcaatccagaaaattgttgcttttgaaaatgctttcgagagactactggacattatttcagaggaggggaacagtgatggaggtatagtagttgaagattgtttgattttgctccaaaacttattaaaaaacaacaactccaatcaaaatttttttaaagaaggctcatatattcaacgtatgaaaccttggtttgaagttggagatgaaaattctggctggtctgcacagaaagtgaccaatctacatctaatgctacagcttgttcgtgtattggtatctcccaccaaccctcctggtgctaccagtagctgccagaaggctatgttccagtgtgggttattgcagcagctttgtactatcctaatggctactggggttcctgctgatatcctgactgagaccataaatactgtatcagaagttattcgaggctgccaagtaaaccaagactactttgcatctgtaaatgcaccttcaaacccaccaagaccggcaattgtagtacttctcatgtccatggttaatgaaaggcagccatttgttttgcgctgtgctgttctctattgtttccagtgtttcttgtataaaaaccaaaaaggacaaggagaaatcgtgtcaacacttttaccttctaccattgatgcaacaggtaattcagtttcagctggccagttattatgtggaggtttgttttctactgattcactttcaaactggtgtgctgctgtggcccttgcccatgcgttgcaagaaaatgccacccagaaagaacagttgctcagggttcaacttgctacaagtattggcaaccctccagtttctttacttcaacagtgcaccaatattctttcacagggtgataagatcgacagacggggaagcaaaatacaaacaagagttggattattaatgttgctttgtacctggctaagcaattgtcccattgcagtaacgcattttcttcacaattcagccaatgttccattccttacaggacaaattgcagaaaatcttggagaagaagagcagttggtccaaggcttatgtgcccttttgttgggcatttcgatttatttcaatgataactcacttgagagctacatgaaagagaagctaaaacaactgattgagaagaggattggcaaagagaatttcatagagaaactaggatttattagcaaacatgagttgtattccagagcatctcagaaaccccagccaaactttcccagtccagaatacatgatatttgatcatgagtttacgaagctggtaaaagaacttgaaggtgttataactaaggctatttataagtccagtgaagaagataaaaaagaagaagaggtgaaaaaaacattagaacagcatgacaatattgtgactcactacaaaaatatgattcgagagcaagatctccaacttgaggaattaaggcagcaggtttctacattaaaatgtcaaaatgaacagctccagacggcagtcacacagcaagtatcacagatccagcagcacaaagaccagtataatcttcttaaaatacagctaggaaaagacaatcagcatcaaggttcttacagtgagggggctcagatgaatggcattcagccagaagaaattggtagattgcgagaagagatagaagaattaaaacgtaatcaggaacttttacaaagccagctgactgaaaaggactctatgattgaaaatatgaaatcttcccaaacatctggcacaaatgaacagtcttcagcaatagtttcagctagagattctgaacaagttgcagaattaaaacaggaactggcaactttaaagtctcagttaaactcacaatctgtggagatcaccaaactacagacagaaaagcaggaactgttacagaaaacagaagcgtttgcaaaatcagttgaggtacaaggagagaccgagactataatagccaccaaaactactgatgtagaaggaagactgtcagcattattacaagagaccaaagagttaaagaatgaaattaaagctctgtctgaggaaagaactgccattaaagagcagctggattcatctaatagtaccattgccattttacaaactgagaaagacaaactagagttggaaattacagattctaaaaaagaacaagatgatctcttggtgctcttggccgatcaagatcagaaaatactgtcattgaagaataaactcaaggatcttggtcatccagttgaagaagaggatgaacttgaatctggagaccaagaggatgaggatgatgaaagtgaagatcctggcaaggatctagatcatatctagttttcaaatctctaggaacaatagagattatatcataactctgaagatggactctaaactttggtttacctccatggaaaataaagatttagaaaccaggtggaaaacattcactattaagactattgatatatttttgtaatgttgccacccatgttgaaaaccttaaaactgaatttatgtagaacacacatcttttatttaaatccatctgaactgtcccaaaatgtaatttgcaaagagcttcaaacaccaaaaatataccattttaaggcatgtggtgacaatgctatttgccttagttcattcgttgtttactttgcaaaatttgtgacttttaagtactaacacatttgattgaatgtgtattgaattggaattattatttctaaattcagcatttgagtccttagttgatgattttcttttaaagaaattagtttatttaaaagcaagatagcctgggttgggagttagtgcatatcatcagccctccatctaatgtgattgctaagatgtgcaggataggacagcttagaatgagtgccttgacacctacatatggctgcattccatacctcagtgaagaagccgaaggatgctgacacacagtgatgtggagggcattccggagaaacttttgcaacagtgtattaatgtgattggttttctttttgttttaagctaaacatctaaaacaaatttcaagttaacagttcatacaactcagatttagtattattgtttatcataaaacatattatgttcctagttttaaaaagacccaaagtatgattaatataatttattggcatttttgctgaataggtttaagtcagataatagattttaaaaaagcaaatgaggcaatgtgtcaaaatttaatgtttcataataaaaatagatacgttgacttaatccttggtcatggttccctttgtttacatcttaaaagtattttattcttaataaaagatgaggcaagtgaaaatgaaaaggcga

SEQ ID NO: 321091 - DNA, 4041 bp, Homo sapiens
  misc_feature (1)..(2): n is a, c, g, or t
  misc_feature (4)..(4): n is a, c, g, or t
nncncgagccgccacgtaatgccacgtccccgcgcatgcgcatcttggccgctgctggcggctgtttccgggcttagagggctggagtggccgccgagttggaggcggtggtggcagcagtaggagtgtgtagagtgcgggattgggggccaggccctgcggagggcgggggaagttgtcttcttttttttccggaggggccggtaaacctggtggctgaacggcaagatgaatttcctccgcggggtaatggggggtcagagtgccggaccccagcacacagaagccgagacgattcaaaagctttgtgacagagtagcttcatctactttattggatgatcgaagaaatgctgttcgtgctctcaaatcattatctaagaaataccgcttggaagtgggtatacaagctatggaacatcttattcatgttttacaaacagatcgttcagattctgaaataataggttatgctttggacacactatataatataatatctaatgaagaagaagaagaagtagaagaaaattccacaagacagagtgaagatttgggaagccaatttacagaaattttcattaagcagcaggaaaatgtcactcttctgttatctttattggaggagtttgatttccatgtccgctggcctggtgtgaagcttcttacttctcttttaaaacaactagggcctcaggtgcaacaaattattttagtcagtcctatgggtgtttcaagattgatggacttactagcggattccagggaagttatacgtaatgatggcgtcttactactgcaggcactaacaagaagcaatggtgcaatccagaaaattgttgcttttgaaaatgctttcgagagactactggacattatttcagaggaggggaacagtgatggaggtatagtagttgaagattgtttgattttgctccaaaacttattaaaaaacaacaactccaatcaaaatttttttaaagaaggctcatatattcaacgtatgaaaccttggtttgaagttggagatgaaaattctggctggtctgcacagaaagtgaccaatctacatctaatgctacagcttgttcgtgtattggtatctcccaccaaccctcctggtgctaccagtagctgccagaaggctatgttccagtgtgggttattgcagcagctttgtactatcctaatggctactggggttcctgctgatatcctgactgagaccataaatactgtatcagaagttattcgaggctgccaagtaaaccaagactactttgcatctgtaaatgcaccttcaaacccaccaagaccggcaattgtagtacttctcatgtccatggttaatgaaaggcagccatttgttttgcgctgtgctgttctctattgtttccagtgtttcttgtataaaaaccaaaaaggacaaggagaaatcgtgtcaacacttttaccttctaccattgatgcaacaggtaattcagtttcagctggccagttattatgtggaggtttgttttctactgattcactttcaaactggtgtgctgctgtggcccttgcccatgcgttgcaagaaaatgccacccagaaagaacagttgctcagggttcaacttgctacaagtattggcaaccctccagtttctttacttcaacagtgcaccaatattctttcacagggaagcaaaatacaaacaagagttggattattaatgttgctttgtacctggctaagcaattgtcccattgcagtaacgcattttcttcacaattcagccaatgttccattccttacaggacaaattgcagaaaatcttggagaagaagagcagttggtccaaggcttatgtgcccttttgttgggcatttcgatttatttcaatgataactcacttgagagctacatgaaagagaagctaaaacaactgattgagaagaggattggcaaagagaatttcatagagaaactaggatttattagcaaacatgagttgtattccagagcatctcagaaaccccagccaaactttcccagtccagaatacatgatatttgatcatgagtttacgaagctggtaaaagaacttgaaggtgttataactaaggctatttataagtccagtgaagaagataaaaaagaagaagaggtgaaaaaaacattagaacagcatgacaatattgtgactcactacaaaaatatgattcgagagcaagatctccaacttgaggaattaaggcagcaggtttctacattaaaatgtcaaaatgaacagctccagacggcagtcacacagcaagtatcacagatccagcagcacaaagaccagtataatcttcttaaaatacagctaggaaaagacaatcagcatcaaggttcttacagtgagggggctcagatgaatggcattcagccagaagaaattggtagattgcgagaagagatagaagaattaaaacgtaatcaggaacttttacaaagccagctgactgaaaaggactctatgattgaaaatatgaaatcttcccaaacatctggcacaaatgaacagtcttcagcaatagtttcagctagagattctgaacaagttgcagaattaaaacaggaactggcaactttaaagtctcagttaaactcacaatctgtggagatcaccaaactacagacagaaaagcaggaactgttacagaaaacagaagcgtttgcaaaatcagttgaggtacaaggagagaccgagactataatagccaccaaaactactgatgtagaaggaagactgtcagcattattacaagagaccaaagagttaaagaatgaaattaaagctctgtctgaggaaagaactgccattaaagagcagctggattcatctaatagtaccattgccattttacaaactgagaaagacaaactagagttggaaattacagattctaaaaaagaacaagatgatctcttggtgctcttggccgatcaagatcagaaaatactgtcattgaagaataaactcaaggatcttggtcatccagttgaagaagaggatgaacttgaatctggagaccaagaggatgaggatgatgaaagtgaagatcctggcaaggatctagatcatatctagttttcaaatctctaggaacaatagagattatatcataactctgaagatggactctaaactttggtttacctccatggaaaataaagatttagaaaccaggtggaaaacattcactattaagactattgatatatttttgtaatgttgccacccatgttgaaaaccttaaaactgaatttatgtagaacacacatcttttatttaaatccatctgaactgtcccaaaatgtaatttgcaaagagcttcaaacaccaaaaatataccattttaaggcatgtggtgacaatgctatttgccttagttcattcgttgtttactttgcaaaatttgtgacttttaagtactaacacatttgattgaatgtgtattgaattggaattattatttctaaattcagcatttgagtccttagttgatgattttcttttaaagaaattagtttatttaaaagcaagatagcctgggttgggagttagtgcatatcatcagccctccatctaatgtgattgctaagatgtgcaggataggacagcttagaatgagtgccttgacacctacatatggctgcattccatacctcagtgaagaagccgaaggatgctgacacactgataacacctcaccaccacaacaacaaaacactcacaccaaacaccaacacataacaaaccaaccaacaacacaaaacaaatcaactaaaaaaactcaaccacacaccacaacacaaataacaacacacaacacacaacaaaacaaccctcttatgttcctagttttaaaaagacccaaagtataacttttacaaaaaaacaacacacaaaacacaaacacacaaaaaaaactccacaaacaaccaccaacacgcaaatgaggcaatgtgtcaaaatttaatgtttcataataaaaatagatacgttgactta

SEQ ID NO: 321092 - DNA, 2411 bp, Homo sapiens
cagaagtggattcagtgaatctaggaagacagcagcagacaggattccaggaaccagtgtttgatgaagctaggactgaggagcttacaggacaaattgcagaaaatcttggagaagaagagcagttggtccaaggcttatgtgcccttttgttgggcatttcgatttatttcaatgataactcacttgagagctacatgaaagagaagctaaaacaactgattgagaagaggattggcaaagagaatttcatagagaaactaggatttattagcaaacatgagttgtattccagagcatctcagaaaccccagccaaactttcccagtccagaatacatgatatttgatcatgagtttacgaagctggtaaaagaacttgaaggtgttataactaaggctatttataagtccagtgaagaagataaaaaagaagaagaggtgaaaaaaacattagaacagcatgacaatattgtgactcactacaaaaatatgattcgagagcaagatctccaacttgaggaattaaggcagcaggtttctacattaaaatgtcaaaatgaacagctccagacggcagtcacacagcaagtatcacagatccagcagcacaaagaccagtataatcttcttaaaatacagctaggaaaagacaatcagcatcaaggttcttacagtgagggggctcagatgaatggcattcagccagaagaaattggtagattgcgagaagagatagaagaattaaaacgtaatcaggaacttttacaaagccagctgactgaaaaggactctatgattgaaaatatgaaatcttcccaaacatctggcacaaatgaacagtcttcagcaatagtttcagctagagattctgaacaagttgcagaattaaaacaggaactggcaactttaaagtctcagttaaactcacaatctgtggagatcaccaaactacagacagaaaagcaggaactgttacagaaaacagaagcgtttgcaaaatcagttgaggtacaaggagagaccgagactataatagccaccaaaactactgatgtagaaggaagactgtcagcattattacaagagaccaaagagttaaagaatgaaattaaagctctgtctgaggaaagaactgccattaaagagcagctggattcatctaatagtaccattgccattttacaaactgagaaagacaaactagagttggaaattacagattctaaaaaagaacaagatgatctcttggtgctcttggccgatcaagatcagaaaatactgtcattgaagaataaactcaaggatcttggtcatccagttgaagaagaggatgaacttgaatctggagaccaagaggatgaggatgatgaaagtgaagatcctggcaaggatctagatcatatctagttttcaaatctctaggaacaatagagattatatcataactctgaagatggactctaaactttggtttacctccatggaaaataaagatttagaaaccaggtggaaaacattcactattaagactattgatatatttttgtaatgttgccacccatgttgaaaaccttaaaactgaatttatgtagaacacacatcttttatttaaatccatctgaactgtcccaaaatgtaatttgcaaagagcttcaaacaccaaaaatataccattttaaggcatgtggtgacaatgctatttgccttagttcattcgttgtttactttgcaaaatttgtgacttttaagtactaacacatttgattgaatgtgtattgaattggaattattatttctaaattcagcatttgagtccttagttgatgattttcttttaaagaaattagtttatttaaaagcaagatagcctgggttgggagttagtgcatatcatcagccctccatctaatgtgattgctaagatgtgcaggataggacagcttagaatgagtgccttgacacctacatatggctgcattccatacctcagtgaagaagccgaaggatgctgacacacagtgatgtggagggcattccggagaaacttttgcaacagtgtattaatgtgattggttttctttttgttttaagctaaacatctaaaacaaatttcaagttaacagttcatacaactcagatttagtattattgtttatcataaaacatattatgttcctagttttaaaaagacccaaagtatgattaatataatttattggcatttttgctgaataggtttaagtcagataatagattttaaaaaagcaaatgaggcaatgtgtcaaaatttaatgtttcataataaaaatagatacgttgacttaatccttggtcatggttccctttgtttacatcttaaaagtattttattcttaataaaagatgaggcaagtgaaaatgaaaaggcga

SEQ ID NO: 321093 - DNA, 3160 bp, Homo sapiens
  misc_feature (1)..(2): n is a, c, g, or t
  misc_feature (4)..(4): n is a, c, g, or t
nncncgagccgccacgtaatgccacgtccccgcgcatgcgcatcttggccgctgctggcggctgtttccgggcttagagggctggagtggccgccgagttggaggcggtggtggcagcagtaggagtgtgtagagtgcgggattgggggccaggccctgcggagggcgggggaagttgtcttcttttttttccggaggggccggtaaacctggtggctgaacggcaagatgaatttcctccgcggggtaatggggggtcagagtgccggaccccagcacacagaagccgagacgattcaaaagctttgtgacagagtagcttcatctactttattggatgatcgaagaaatgctgttcgtgctctcaaatcattatctaagaaataccgcttggaagtgggtatacaagctatggaacatcttattcatgttttacaaacagatcgttcagattctgaaataataggttatgctttggacacactatataatataatatctaatgaagaagaagaagaagtagaagaaaattccacaagacagagtgaagatttgggaagccaatttacagaaattttcattaagcagcaggaaaatgtcactcttctgttatctttattggaggagtttgatttccatgtccgctggcctggtgtgaagcttcttacttctcttttaaaacaactagggcctcaggtgcaacaaattattttagtcagtcctatgggtgtttcaagattgatggacttactagcggattccagggaagttatacgtaatgatggcgtcttactactgcaggcactaacaagaagcaatggtgcaatccagaaaattgttgcttttgaaaatgctttcgagagactactggacattatttcagaggaggggaacagtgatggaggtatagtagttgaagattgtttgattttgctccaaaacttattaaaaaacaacaactccaatcaaaatttttttaaagaaggctcatatattcaacgtatgaaaccttggtttgaagttggagatgaaaattctggctggtctgcacagaaagtgaccaatctacatctaatgctacagcttgttcgtgtattggtatctcccaccaaccctcctggtgctaccagtagctgccagaaggctatgttccagtgtgggttattgcagcagctttgtactatcctaatggctactggggttcctgctgatatcctgactgagaccataaatactgtatcagaagttattcgaggctgccaagtaaaccaagactactttgcatctgtaaatgcaccttcaaacccaccaagaccggcaattgtagtacttctcatgtccatggttaatgaaaggcagccatttgttttgcgctgtgctgttctctattgtttccagtgtttcttgtataaaaaccaaaaaggacaaggagaaatcgtgtcaacacttttaccttctaccattgatgcaacaggtaattcagtttcagctggccagttattatgtggaggtttgttttctactgattcactttcaaactggtgtgctgctgtggcccttgcccatgcgttgcaagaaaatgccacccagaaagaacagttgctcagggttcaacttgctacaagtattggcaaccctccagtttctttacttcaacagtgcaccaatattctttcacagggaagcaaaatacaaacaagagttggattattaatgttgctttgtacctggctaagcaattgtcccattgcagtaacgcattttcttcacaattcagccaatgttccattccttacaggacaaattgcagaaaatcttggagaagaagagcagttggtccaaggcttatgtgcccttttgttgggcatttcgatttatttcaatgataactcacttgagagctacatgaaagagaagctaaaacaactgattgagaagaggattggcaaagagaatttcatagagaaactaggatttattagcaaacatgagttgtattccagagcatctcagaaaccccagccaaactttcccagtccagaatacatgatatttgatcatgagtttacgaagctggtaaaagaacttgaaggtgttataactaaggctatttataagtccagtgaagaagataaaaaagaagaagaggtgaaaaaaacattagaacagcatgacaatattgtgactcactacaaaaatatgattcgagagcaagatctccaacttgaggaattaaggcagcaggtttctacattaaaatgtcaaaatgaacagctccagacggcagtcacacagcaagtatcacagatccagcagcacaaagaccagtataatcttcttaaaatacagctaggaaaagacaatcagcatcaaggttcttacagtgagggggctcagatgaatggcattcagccagaagaaattggtagattgcgagaagagatagaagaattaaaacgtaatcaggaacttttacaaagccagctgactgaaaaggactctatgattgaaaatatgaaatcttcccaaacatctggcacaaatgaacagtcttcagcaatagtttcagctagagattctgaacaagttgcagaattaaaacaggaactggcaactttaaagtctcagttaaactcacaatctgtggagatcaccaaactacagacagaaaagcaggaactgttacagaaaacagaagcgtttgcaaaatcagttgaggtacaaggagagaccgagactataatagccaccaaaactactgatgtagaaggaagactgtcagcattattacaagagaccaaagagttaaagaatgaaattaaagctctgtctgaggaaagaactgccattaaagagcagctggattcatctaatagtaccattgccattttacaaactgagaaagacaaactagagttggaaattacagattctaaaaaagaacaagatgatctcttggtgctcttggccgatcaagatcagaaaatactgtcattgaagaataaactcaaggatcttggtcatccagtgaaaagagatgaactgaactgggaacacagataagtgataacgaaaaccggcgggctaacatcatctaaacgcagccacatcataacaacagagactaataattacttcggtattttattatttatatttg

SEQ ID NO: 321094 - DNA, 1712 bp, Homo sapiens
  misc_feature (1)..(2): n is a, c, g, or t
  misc_feature (4)..(4): n is a, c, g, or t
  misc_feature (1712)..(1712): n is a, c, g, or t
nncncgagccgccacgtaatgccacgtccccgcgcatgcgcatcttggccgctgctggcggctgtttccgggcttagagggctggagtggccgccgagttggaggcggtggtggcagcagtaggagtgtgtagagtgcgggattgggggccaggccctgcggagggcgggggaagttgtcttcttttttttccggaggggccggtaaacctggtggctgaacggcaagatgaatttcctccgcggggtaatggggggtcagagtgccggaccccagcacacagaagccgagacgattcaaaagctttgtgacagagtagcttcatctactttattggatgatcgaagaaatgctgttcgtgctctcaaatcattatctaagaaataccgcttggaagtgggtatacaagctatggaacatcttattcatgttttacaaacagatcgttcagattctgaaataataggttatgctttggacacactatataatataatatctaatgaagaagaagaagaagtagaagaaaattccacaagacagagtgaagatttgggaagccaatttacagaaattttcattaagcagcaggaaaatgtcactcttctgttatctttattggaggagtttgatttccatgtccgctggcctggtgtgaagcttcttacttctcttttaaaacaactagggcctcaggtgcaacaaattattttagtcagtcctatgggtgtttcaagattgatggacttactagcggattccagggaagttatacgtaatgatggcgtcttactactgcaggcactaacaagaagcaatggtgcaatccagaaaattgttgcttttgaaaatgctttcgagagactactggacattatttcagaggaggggaacagtgatggaggtatagtagttgaagattgtttgattttgctccaaaacttattaaaaaacaacaactccaatcaaaatttttttaaagaaggctcatatattcaacgtatgaaaccttggtttgaagttggagatgaaaattctggctggtctgcacagaaagtgaccaatctacatctaatgctacagcttgttcgtgtattggtatctcccaccaaccctcctggtgctaccagtagctgccagaaggctatgttccagtgtgggttattgcagcagctttgtactatcctaatggctactggggttcctgctgatatcctgactgagaccataaatactgtatcagaagttattcgaggctgccaagtaaaccaagactactttgcatctgtaaatgcaccttcaaacccaccaagaccggcaattgtagtacttctcatgtccatggttaatgaaaggcagccatttgttttgcgctgtgctgttctctattgtttccagtgtttcttgtataaaaaccaaaaaggacaaggagaaatcgtgtcaacacttttaccttctaccattgatgcacaggtaatccgttcagctgcggtatatgtgggggtggtcccacggttcctccaactgggtgcgcttgccctgtcctgggtgagaatggccccagaacatggcccggtcctggccagttggacccctgtttttcacggcgctttccgggcacacacaggggtatacggttcgcggcaccgcggcgttaccagtctcgagaggacaagccagtcgggttttcccgtattctttcgtctcttttn

SEQ ID NO: 321095 - DNA, 3630 bp, Homo sapiens
  misc_feature (2120)..(2120): n is a, c, g, or t
gttttaatcaagctgcccaaagtcccccaatcactcctggaatacacagagagaggcagcagcttgctcagcggacaaggatgctgggcgtgagggaccaaggcctgccctgcactcgggcctcctccagccagtgctgaccagggacttctgacctgctggccagccaggacctgtgtggggaggccctcctgctgccttggggtgacaatctcagctccaggctacagggagaccgggaggatcacagagccagcatgttacaggatcctgacagtgatcaacctctgaacagcctcgatgtcaaacccctgcgcaaaccccgtatccccatggagaccttcagaaaggtggggatccccatcatcatagcactactgagcctggcgagtatcatcattgtggttgtcctcatcaaggtgattctggataaatactacttcctctgcgggcagcctctccacttcatcccgaggaagcagctgtgtgacggagagctggactgtcccttgggggaggacgaggagcactgtgtcaagagcttccccgaagggcctgcagtggcagtccgcctctccaaggaccgatccacactgcaggtgctggactcggccacagggaactggttctctgcctgtttcgacaacttcacagaagctctcgctgagacagcctgtaggcagatgggctacagcagcaaacccactttcagagctgtggagattggcccagaccaggatctggatgttgttgaaatcacagaaaacagccaggagcttcgcatgcggaactcaagtgggccctgtctctcaggctccctggtctccctgcactgtcttgcctgtgggaagagcctgaagaccccccgtgtggtgggtggggaggaggcctctgtggattcttggccttggcaggtcagcatccagtacgacaaacagcacgtctgtggagggagcatcctggacccccactgggtcctcacggcagcccactgcttcaggaaacataccgatgtgttcaactggaaggtgcgggcaggctcagacaaactgggcagcttcccatccctggctgtggccaagatcatcatcattgaattcaaccccatgtaccccaaagacaatgacatcgccctcatgaagctgcagttcccactcactttctcaggcacagtcaggcccatctgtctgcccttctttgatgaggagctcactccagccaccccactctggatcattggatggggctttacgaagcagaatggagggaagatgtctgacatactgctgcaggcgtcagtccaggtcattgacagcacacggtgcaatgcagacgatgcgtaccagggggaagtcaccgagaagatgatgtgtgcaggcatcccggaagggggtgtggacacctgccagggtgacagtggtgggcccctgatgtaccaatctgaccagtggcatgtggtgggcatcgttagctggggctatggctgcgggggcccgagcaccccaggagtatacaccaaggtctcagcctatctcaactggatctacaatgtctggaaggctgagctgtaatgctgctgcccctttgcagtgctgggagccgcttccttcctgccctgcccacctggggatcccccaaagtcagacacagagcaagagtccccttgggtacacccctctgcccacagcctcagcatttcttggagcagcaaagggcctcaattcctgtaagagaccctcgcagcccagaggcgcccagaggaagtcagcagccctagctcggccacacttggtgctcccagcatcccagggagagacacagcccactgaacaaggtctcaggggtattgctaagccaagaaggaactttcccacactactgaatggaagcaggctgtcttgtaaaagcccagatcactgtgggctggagaggagaaggaaagggtctgcgccagccctgtccgtcttcacccatccccaagcctactagagcaagaaaccagttgtaatataaaatgcactgccctactgttggtatgactaccgttacctactgttgtcattgttattacagctatggccactattattaaagagctgtgtaacatctctggcaaaaantagctggaatgcttgataagaactgagctgggatgattgaactttcattctttggcttggggagaaaagaagtcctggggaagcaattgagtctcaaagtagaggcaggggaaaaaagagttagggagaccagatctgctgagtggcagcaagagtgagctgcagattacagaaaccagggtgagcaagtttgagtcccacacagggccttctccctttgcctctttccctccctccctgcctgtgataatcagccaggaccagggataacctatgacttgggaaagagatgagttaggcagtcaagggtgacattcaatcagggatccacaagtggctggaaagaaatgctggtcctgtgtcctaactttttccacctggagagccctcagtgtggcttcttacatttaaaaaacaaaaaggatcagctgccaggtgtgaggcagtccccaagctgagttgtgaggatgtaagcatgaataagtccctgcactcaaaatggtcaaagaattaaaccccatggacttttttggcatctgtatgaaagcttgggttttctgaggactgtcttgctatagttaagtcagatcctagatgaaatatacttgttcatactgtactaggttcttaggaaacaacagaattcctcaaatgcctaaaacaaagaaaatagaaacccagaaaacaaaacaaaataaaacaaaaccatcagaactgtgagtggaaactaaggtgatgatctgggagcaatacactaaaatcttgggtcgagacctatatgaaggctggcagtggagctaaacctggacacactgaagacaagggagctgaaccagggctcctacatgaagcagggataactgatggcagtaaatgtggtctcaaattgcagatggtctggaggaaaatttcccaaatttagagcctcaggattcccaaagatcctccaaatatgagctcacaatcaaagatcagagacgttgaaaaataaaaaacaccttaagtgggcagcataaaaaacagctaatttagaaccccaaaggcttcagatgtcagaatattagagacttatgataataagcaatatttgcagagtatttgtatgtgccagacactattgtaagtgcttcatcatgtactgattcatttaatactcacagaaatctgtgagatgggtattattcttatcctcactctatggattaaaaaaactaaggcacaaagtggttaagctccttgcctgagattatagactgtaagttgaacgtgagcacttggaatacagagttcatgctgtaaactaccacactatagggcctccaatatgataatttataaaatatttgaataaaaaatgaatactagttccacattttaaaatcatgtttaactgtggtcaaatgcacataacacaagttgccatcttcaccatttttaggtgtatagttcagtggtgttatgtacattcacactattgtgcagtcatcaccacactgcctacactagtgga

SEQ ID NO: 321096 - DNA, 622 bp, Homo sapiens
aaagctctggccactgccaccacctcctctcctaacactaccactggtcttcccctgccctgggccaggaccagagctgggctttgggttgggtggccttcgttgcatgcaccacggtgacagccacagcagccccagctctcagactggctgactgcacccagagagctctgacttccccagggcttccgggaaaggctgagtaacaaaacatggaaatgattgtctgtggggtaaatgttgaataatggaagatgggagacaggaaggagccagcagataaatggcttctccttcttccctaggatagaactattcagagaagctgtaactccccagggacaggtcttgtgattcagcaaccagctgtaccgctgatggagctacggtcagctcggcacacacatcgcctgaccacctgtgtttgctttctctcattccctgccttacagcccctgtcccccttatgcccatttccctgggattgaacccccaaataaagtgttaagatatgaatttaatgtagaaaacttaagttttctgagaaacctgggctaagactatcaaacagatgtagctctttgattataacgttattaagttctaaggcaatagcaaacaa

SEQ ID NO: 321097 - DNA, 3840 bp, Homo sapiens
  misc_feature (2330)..(2330): n is a, c, g, or t
gttttaatcaagctgcccaaagtcccccaatcactcctggaatacacagagagaggcagcagcttgctcagcggacaaggatgctgggcgtgagggaccaaggcctgccctgcactcgggcctcctccagccagtgctgaccagggacttctgacctgctggccagccaggacctgtgtggggaggccctcctgctgccttggggtgacaatctcagctccaggctacagggagaccgggaggatcacagagccagcatgttacaggatcctgacagtgatcaacctctgaacagcctcgatgtcaaacccctgcgcaaaccccgtatccccatggagaccttcagaaaggtggggatccccatcatcatagcactactgagcctggcgagtatcatcattgtggttgtcctcatcaaggtgattctggataaatactacttcctctgcgggcagcctctccacttcatcccgaggaagcagctgtgtgacggagagctggactgtcccttgggggaggacgaggagcactgtgtcaagagcttccccgaagggcctgcagtggcagtccgcctctccaaggaccgatccacactgcaggtgctggactcggccacagggaactggttctctgcctgtttcgacaacttcacagaagctctcgctgagacagcctgtaggcagatgggctacagcagcaaacccactttcagagctgtggagattggcccagaccaggatctggatgttgttgaaatcacagaaaacagccaggagcttcgcatgcggaactcaagtgggccctgtctctcaggctccctggtctccctgcactgtcttgcctgtgggaagagcctgaagaccccccgtgtggtgggtggggaggaggcctctgtggattcttggccttggcaggtcagcatccagtacgacaaacagcacgtctgtggagggagcatcctggacccccactgggtcctcacggcagcccactgcttcaggaaacataccgatgtgttcaactggaaggtgcgggcaggctcagacaaactgggcagcttcccatccctggctgtggccaagatcatcatcattgaattcaaccccatgtaccccaaagacaatgacatcgccctcatgaagctgcagttcccactcactttctcaggcacagtcaggcccatctgtctgcccttctttgatgaggagctcactccagccaccccactctggatcattggatggggctttacgaagcagaatggaggtaagtcctgggtgcaggaccacagggcaggagatgcccttgtatgagggagcagcttccagaagtaatgggaaggaggaccacccttcagagaaacccatcctggaggaccaagcaccaaggcgccaggcagaaagcaaagtggtttggcaatccagggctgggggatagaaggcaaggatgggaatgtgagtgtttttaccctcccagggaagatgtctgacatactgctgcaggcgtcagtccaggtcattgacagcacacggtgcaatgcagacgatgcgtaccagggggaagtcaccgagaagatgatgtgtgcaggcatcccggaagggggtgtggacacctgccagggtgacagtggtgggcccctgatgtaccaatctgaccagtggcatgtggtgggcatcgttagctggggctatggctgcgggggcccgagcaccccaggagtatacaccaaggtctcagcctatctcaactggatctacaatgtctggaaggctgagctgtaatgctgctgcccctttgcagtgctgggagccgcttccttcctgccctgcccacctggggatcccccaaagtcagacacagagcaagagtccccttgggtacacccctctgcccacagcctcagcatttcttggagcagcaaagggcctcaattcctgtaagagaccctcgcagcccagaggcgcccagaggaagtcagcagccctagctcggccacacttggtgctcccagcatcccagggagagacacagcccactgaacaaggtctcaggggtattgctaagccaagaaggaactttcccacactactgaatggaagcaggctgtcttgtaaaagcccagatcactgtgggctggagaggagaaggaaagggtctgcgccagccctgtccgtcttcacccatccccaagcctactagagcaagaaaccagttgtaatataaaatgcactgccctactgttggtatgactaccgttacctactgttgtcattgttattacagctatggccactattattaaagagctgtgtaacatctctggcaaaaantagctggaatgcttgataagaactgagctgggatgattgaactttcattctttggcttggggagaaaagaagtcctggggaagcaattgagtctcaaagtagaggcaggggaaaaaagagttagggagaccagatctgctgagtggcagcaagagtgagctgcagattacagaaaccagggtgagcaagtttgagtcccacacagggccttctccctttgcctctttccctccctccctgcctgtgataatcagccaggaccagggataacctatgacttgggaaagagatgagttaggcagtcaagggtgacattcaatcagggatccacaagtggctggaaagaaatgctggtcctgtgtcctaactttttccacctggagagccctcagtgtggcttcttacatttaaaaaacaaaaaggatcagctgccaggtgtgaggcagtccccaagctgagttgtgaggatgtaagcatgaataagtccctgcactcaaaatggtcaaagaattaaaccccatggacttttttggcatctgtatgaaagcttgggttttctgaggactgtcttgctatagttaagtcagatcctagatgaaatatacttgttcatactgtactaggttcttaggaaacaacagaattcctcaaatgcctaaaacaaagaaaatagaaacccagaaaacaaaacaaaataaaacaaaaccatcagaactgtgagtggaaactaaggtgatgatctgggagcaatacactaaaatcttgggtcgagacctatatgaaggctggcagtggagctaaacctggacacactgaagacaagggagctgaaccagggctcctacatgaagcagggataactgatggcagtaaatgtggtctcaaattgcagatggtctggaggaaaatttcccaaatttagagcctcaggattcccaaagatcctccaaatatgagctcacaatcaaagatcagagacgttgaaaaataaaaaacaccttaagtgggcagcataaaaaacagctaatttagaaccccaaaggcttcagatgtcagaatattagagacttatgataataagcaatatttgcagagtatttgtatgtgccagacactattgtaagtgcttcatcatgtactgattcatttaatactcacagaaatctgtgagatgggtattattcttatcctcactctatggattaaaaaaactaaggcacaaagtggttaagctccttgcctgagattatagactgtaagttgaacgtgagcacttggaatacagagttcatgctgtaaactaccacactatagggcctccaatatgataatttataaaatatttgaataaaaaatgaatactagttccacattttaaaatcatgtttaactgtggtcaaatgcacataacacaagttgccatcttcaccatttttaggtgtatagttcagtggtgttatgtacattcacactattgtgcagtcatcaccacactgcctacactagtgga

SEQ ID NO: 321098 - DNA, 3516 bp, Homo sapiens
  misc_feature (2006)..(2006): n is a, c, g, or t
gttttaatcaagctgcccaaagtcccccaatcactcctggaatacacagagagaggcagcagcttgctcagcggacaaggatgctgggcgtgagggaccaaggcctgccctgcactcgggcctcctccagccagtgctgaccagggacttctgacctgctggccagccaggacctgtgtggggaggccctcctgctgccttggggtgacaatctcagctccaggctacagggagaccgggaggatcacagagccagcatgttacaggatcctgacagtgatcaacctctgaacagcctcgtcaaggtgattctggataaatactacttcctctgcgggcagcctctccacttcatcccgaggaagcagctgtgtgacggagagctggactgtcccttgggggaggacgaggagcactgtgtcaagagcttccccgaagggcctgcagtggcagtccgcctctccaaggaccgatccacactgcaggtgctggactcggccacagggaactggttctctgcctgtttcgacaacttcacagaagctctcgctgagacagcctgtaggcagatgggctacagcagcaaacccactttcagagctgtggagattggcccagaccaggatctggatgttgttgaaatcacagaaaacagccaggagcttcgcatgcggaactcaagtgggccctgtctctcaggctccctggtctccctgcactgtcttgcctgtgggaagagcctgaagaccccccgtgtggtgggtggggaggaggcctctgtggattcttggccttggcaggtcagcatccagtacgacaaacagcacgtctgtggagggagcatcctggacccccactgggtcctcacggcagcccactgcttcaggaaacataccgatgtgttcaactggaaggtgcgggcaggctcagacaaactgggcagcttcccatccctggctgtggccaagatcatcatcattgaattcaaccccatgtaccccaaagacaatgacatcgccctcatgaagctgcagttcccactcactttctcaggcacagtcaggcccatctgtctgcccttctttgatgaggagctcactccagccaccccactctggatcattggatggggctttacgaagcagaatggagggaagatgtctgacatactgctgcaggcgtcagtccaggtcattgacagcacacggtgcaatgcagacgatgcgtaccagggggaagtcaccgagaagatgatgtgtgcaggcatcccggaagggggtgtggacacctgccagggtgacagtggtgggcccctgatgtaccaatctgaccagtggcatgtggtgggcatcgttagctggggctatggctgcgggggcccgagcaccccaggagtatacaccaaggtctcagcctatctcaactggatctacaatgtctggaaggctgagctgtaatgctgctgcccctttgcagtgctgggagccgcttccttcctgccctgcccacctggggatcccccaaagtcagacacagagcaagagtccccttgggtacacccctctgcccacagcctcagcatttcttggagcagcaaagggcctcaattcctgtaagagaccctcgcagcccagaggcgcccagaggaagtcagcagccctagctcggccacacttggtgctcccagcatcccagggagagacacagcccactgaacaaggtctcaggggtattgctaagccaagaaggaactttcccacactactgaatggaagcaggctgtcttgtaaaagcccagatcactgtgggctggagaggagaaggaaagggtctgcgccagccctgtccgtcttcacccatccccaagcctactagagcaagaaaccagttgtaatataaaatgcactgccctactgttggtatgactaccgttacctactgttgtcattgttattacagctatggccactattattaaagagctgtgtaacatctctggcaaaaantagctggaatgcttgataagaactgagctgggatgattgaactttcattctttggcttggggagaaaagaagtcctggggaagcaattgagtctcaaagtagaggcaggggaaaaaagagttagggagaccagatctgctgagtggcagcaagagtgagctgcagattacagaaaccagggtgagcaagtttgagtcccacacagggccttctccctttgcctctttccctccctccctgcctgtgataatcagccaggaccagggataacctatgacttgggaaagagatgagttaggcagtcaagggtgacattcaatcagggatccacaagtggctggaaagaaatgctggtcctgtgtcctaactttttccacctggagagccctcagtgtggcttcttacatttaaaaaacaaaaaggatcagctgccaggtgtgaggcagtccccaagctgagttgtgaggatgtaagcatgaataagtccctgcactcaaaatggtcaaagaattaaaccccatggacttttttggcatctgtatgaaagcttgggttttctgaggactgtcttgctatagttaagtcagatcctagatgaaatatacttgttcatactgtactaggttcttaggaaacaacagaattcctcaaatgcctaaaacaaagaaaatagaaacccagaaaacaaaacaaaataaaacaaaaccatcagaactgtgagtggaaactaaggtgatgatctgggagcaatacactaaaatcttgggtcgagacctatatgaaggctggcagtggagctaaacctggacacactgaagacaagggagctgaaccagggctcctacatgaagcagggataactgatggcagtaaatgtggtctcaaattgcagatggtctggaggaaaatttcccaaatttagagcctcaggattcccaaagatcctccaaatatgagctcacaatcaaagatcagagacgttgaaaaataaaaaacaccttaagtgggcagcataaaaaacagctaatttagaaccccaaaggcttcagatgtcagaatattagagacttatgataataagcaatatttgcagagtatttgtatgtgccagacactattgtaagtgcttcatcatgtactgattcatttaatactcacagaaatctgtgagatgggtattattcttatcctcactctatggattaaaaaaactaaggcacaaagtggttaagctccttgcctgagattatagactgtaagttgaacgtgagcacttggaatacagagttcatgctgtaaactaccacactatagggcctccaatatgataatttataaaatatttgaataaaaaatgaatactagttccacattttaaaatcatgtttaactgtggtcaaatgcacataacacaagttgccatcttcaccatttttaggtgtatagttcagtggtgttatgtacattcacactattgtgcagtcatcaccacactgcctacactagtgga

SEQ ID NO: 321099 - DNA, 1876 bp, Homo sapiens
gttttaatcaagctgcccaaagtcccccaatcactcctggaatacacagagagaggcagcagcttgctcagcggacaaggatgctgggcgtgagggaccaaggcctgccctgcactcgggcctcctccagccagtgctgaccagggacttctgacctgctggccagccaggacctgtgtggggaggccctcctgctgccttggggtgacaatctcagctccaggctacagggagaccgggaggatcacagagccagcatgttacaggatcctgacagtgatcaacctctgaacagcctcgatgtcaaacccctgcgcaaaccccgtatccccatggagaccttcagaaaggtggggatccccatcatcatagcactactgagcctggcgagtatcatcattgtggttgtcctcatcaaggtgattctggataaatactacttcctctgcgggcagcctctccacttcatcccgaggaagcagctgtgtgacggagagctggactgtcccttgggggaggacgaggagcactgtgtcaagagcttccccgaagggcctgcagtggcagtccgcctctccaaggaccgatccacactgcaggtgctggactcggccacagggaactggttctctgcctgtttcgacaacttcacagaagctctcgctgagacagcctgtaggcagatgggctacagcagcaaacccactttcagagctgtggagattggcccagaccaggatctggatgttgttgaaatcacagaaaacagccaggagcttcgcatgcggaactcaagtgggccctgtctctcaggctccctggtctccctgcactgtcttgcctgtgggaagagcctgaagaccccccgtgtggtgggtggggaggaggcctctgtggattcttggccttggcaggtcagcatccagtacgacaaacagcacgtctgtggagggagcatcctggacccccactgggtcctcacggcagcccactgcttcaggaaacataccgatgtgttcaactggaaggtgcgggcaggctcagacaaactgggcagcttcccatccctggctgtggccaagatcatcatcattgaattcaaccccatgtaccccaaagacaatgacatcgccctcatgaagctgcagttcccactcactttctcaggcacagtcaggcccatctgtctgcccttctttgatgaggagctcactccagccaccccactctggatcattggatggggctttacgaagcagaatggagggaagatgtctgacatactgctgcaggcgtcagtccaggtcattgacagcacacggtgcaatgcagacgatgcgtaccagggggaagtcaccgagaagatgatgtgtgcaggcatcccggaagggggtgtggacacctgccagggtgacagtggtgggcccctgatgtaccaatctgaccagtggcatgtggtgggcatcgttagctggggctatggctgcgggggcccgagcaccccaggagtatacaccaaggtctcagcctatctcaactggatctacaatgtctggaaggatagaactattcagagaagctgtaactccccagggacaggtcttgtgattcagcaaccagctgtaccgctgatggagctacggtcagctcggcacacacatcgcctgaccacctgtgtttgctttctctcattccctgccttacagcccctgtcccccttatgcccatttccctgggattgaacccccaaataaagtgttaagatatgaatttaatgtagaaaacttaagttttctgagaaacctgggctaagactatcaaacagatgtagctctttgattataacgttattaagttctaaggcaatagcaaacaa

SEQ ID NO: 321100 - DNA, 1966 bp, Homo sapiens
gttttaatcaagctgcccaaagtcccccaatcactcctggaatacacagagagaggcagcagcttgctcagcggacaaggatgctgggcgtgagggaccaaggcctgccctgcactcgggcctcctccagccagtgctgaccagggacttctgacctgctggccagccaggacctgtgtggggaggccctcctgctgccttggggtgacaatctcagctccaggctacagggagaccgggaggatcacagagccagcatgttacaggatcctgacagtgatcaacctctgaacagcctcgatgtcaaacccctgcgcaaaccccgtatccccatggagaccttcagaaaggtggggatccccatcatcatagcactactgagcctggcgagtatcatcattgtggttgtcctcatcaaggtgattctggataaatactacttcctctgcgggcagcctctccacttcatcccgaggaagcagctgtgtgacggagagctggactgtcccttgggggaggacgaggagcactgtgtcaagagcttccccgaagggcctgcagtggcagtccgcctctccaaggaccgatccacactgcaggtgctggactcggccacagggaactggttctctgcctgtttcgacaacttcacagaagctctcgctgagacagcctgtaggcagatgggctacagcagcaaacccactttcagagctgtggagattggcccagaccaggatctggatgttgttgaaatcacagaaaacagccaggagcttcgcatgcggaactcaagtgggccctgtctctcaggctccctggtctccctgcactgtcttgcctgtgggaagagcctgaagaccccccgtgtggtgggtggggaggaggcctctgtggattcttggccttggcaggtcagcatccagtacgacaaacagcacgtctgtggagggagcatcctggacccccactgggtcctcacggcagcccactgcttcaggaaacataccgatgtgttcaactggaaggtgcgggcaggctcagacaaactgggcagcttcccatccctggctgtggccaagatcatcatcattgaattcaaccccatgtaccccaaagacaatgacatcgccctcatgaagctgcagttcccactcactttctcaggcacagtcaggcccatctgtctgcccttctttgatgaggagctcactccagccaccccactctggatcattggatggggctttacgaagcagaatggagggaagatgtctgacatactgctgcaggcgtcagtccaggtcattgacagcacacggtgcaatgcagacgatgcgtaccagggggaagtcaccgagaagatgatgtgtgcaggcatcccggaagggggtgtggacacctgccaggtggggcctccaagaatcatggggagttctaagaatagggtttaggtcctagagagatgagaaaacccagaggctgcatgccctacaggaagccttgcatatcatgggcactcaatgtgtgatgatgggaggaagagagggagggaaggaaaggatagtcagataaaagtgtaccaatagatgagtgggtggatggatggatgcagacaagcagagagatttcaaatgtctctttcacattcgaagatgatgttactggcctggctggtcttgaactcctgacctcaagtgattcacccgcctcagcctcccaaggtgctgggattacaggtgtgagccaccgctcctggccaacaaccaggcttttttaagacatcactcagagcctttaatttgctaatgtgagttgtgaatctctgagagaaggctaacggcatgcttgcaacttacttgtccacagacaagcctttctgccccagaagagaagaccattctagggtgctaatgagcaaagagggtgagggtggaatatcggagagcagcagggagtgcagggg

SEQ ID NO: 321101 - DNA, 2111 bp, Homo sapiens
  misc_feature (601)..(601): n is a, c, g, or t
gttttaatcaagctgcccaaagtcccccaatcactcctggaatacacagagagaggcagcagcttgctcagcggacaaggatgctgggcgtgagggaccaaggcctgccctgcactcgggcctcctccagccagtgctgaccagggacttctgacctgctggccagccaggacctgtgtggggaggccctcctgctgccttggggtgacaatctcagctccaggctacagggagaccgggaggatcacagagccagcatgttacaggatcctgacagtgatcaacctctgaacagcctcgatgtcaaacccctgcgcaaaccccgtattgctaagccaagaaggaactttcccacactactgaatggaagcaggctgtcttgtaaaagcccagatcactgtgggctggagaggagaaggaaagggtctgcgccagccctgtccgtcttcacccatccccaagcctactagagcaagaaaccagttgtaatataaaatgcactgccctactgttggtatgactaccgttacctactgttgtcattgttattacagctatggccactattattaaagagctgtgtaacatctctggcaaaaantagctggaatgcttgataagaactgagctgggatgattgaactttcattctttggcttggggagaaaagaagtcctggggaagcaattgagtctcaaagtagaggcaggggaaaaaagagttagggagaccagatctgctgagtggcagcaagagtgagctgcagattacagaaaccagggtgagcaagtttgagtcccacacagggccttctccctttgcctctttccctccctccctgcctgtgataatcagccaggaccagggataacctatgacttgggaaagagatgagttaggcagtcaagggtgacattcaatcagggatccacaagtggctggaaagaaatgctggtcctgtgtcctaactttttccacctggagagccctcagtgtggcttcttacatttaaaaaacaaaaaggatcagctgccaggtgtgaggcagtccccaagctgagttgtgaggatgtaagcatgaataagtccctgcactcaaaatggtcaaagaattaaaccccatggacttttttggcatctgtatgaaagcttgggttttctgaggactgtcttgctatagttaagtcagatcctagatgaaatatacttgttcatactgtactaggttcttaggaaacaacagaattcctcaaatgcctaaaacaaagaaaatagaaacccagaaaacaaaacaaaataaaacaaaaccatcagaactgtgagtggaaactaaggtgatgatctgggagcaatacactaaaatcttgggtcgagacctatatgaaggctggcagtggagctaaacctggacacactgaagacaagggagctgaaccagggctcctacatgaagcagggataactgatggcagtaaatgtggtctcaaattgcagatggtctggaggaaaatttcccaaatttagagcctcaggattcccaaagatcctccaaatatgagctcacaatcaaagatcagagacgttgaaaaataaaaaacaccttaagtgggcagcataaaaaacagctaatttagaaccccaaaggcttcagatgtcagaatattagagacttatgataataagcaatatttgcagagtatttgtatgtgccagacactattgtaagtgcttcatcatgtactgattcatttaatactcacagaaatctgtgagatgggtattattcttatcctcactctatggattaaaaaaactaaggcacaaagtggttaagctccttgcctgagattatagactgtaagttgaacgtgagcacttggaatacagagttcatgctgtaaactaccacactatagggcctccaatatgataatttataaaatatttgaataaaaaatgaatactagttccacattttaaaatcatgtttaactgtggtcaaatgcacataacacaagttgccatcttcaccatttttaggtgtatagttcagtggtgttatgtacattcacactattgtgcagtcatcaccacactgcctacactagtgga

SEQ ID NO: 321102 - DNA, 487 bp, Homo sapiens
gttttaatcaagctgcccaaagtcccccaatcactcctggaatacacagagagaggcagcagcttgctcagcggacaaggatgctgggcgtgagggaccaaggcctgccctgcactcgggcctcctccagccagtgctgaccagggacttctgacctgctggccagccaggacctgtgtggggaggccctcctgctgccttggggtgacaatctcagctccaggctacagggagaccgggaggatcacagagccagcatgttacaggatcctgacagtgatcaacctctgaacagcctcgatgtcaaacccctgcgcaaaccccgtatccccatggagaccttcagaaaggtggggatccccatcatcatagcactactgagcctggcgagtatcatcattgtggttgtcctcagtaagtgacagcccgtacccgactttcaccctctaagtaaatgacagggcccaacccccacccccgcactcac

SEQ ID NO: 321103 - DNA, 305 bp, Homo sapiens
accatcttgttctaaccccctgccccagctcacaactctctctccctcttgatgtgagcagcacaaacccactttcagagctgtggagattggcccagaccaggatctggatgttgttgaaatcacagaaaacagccaggagcttcgcatgcggaactcaagtgggtaagtgaggggacaccttctggcctacagaaggcccccacatggacgctgctcttcaggttgcaaccagctcacctggaaccccaagcagccaggggaatgtaagcagacatcaggaagaactcctagccagatggatc

SEQ ID NO: 321104 - DNA, 2113 bp, Homo sapiens
gttttaatcaagctgcccaaagtcccccaatcactcctggaatacacagagagaggcagcagcttgctcagcggacaaggatgctgggcgtgagggaccaaggcctgccctgcactcgggcctcctccagccagtgctgaccagggacttctgacctgctggccagccaggacctgtgtggggaggccctcctgctgccttggggtgacaatctcagctccaggctacagggagaccgggaggatcacagagccagcatgttacaggatcctgacagtgatcaacctctgaacagcctcgatgtcaaacccctgcgcaaaccccgtatccccatggagaccttcagaaaggtggggatccccatcatcatagcactactgagcctggcgagtatcatcattgtggttgtcctcatcaaggtgattctggataaatactacttcctctgcgggcagcctctccacttcatcccgaggaagcagctgtgtgacggagagctggactgtcccttgggggaggacgaggagcactgtgtcaagagcttccccgaagggcctgcagtggcagtccgcctctccaaggaccgatccacactgcaggtgctggactcggccacagggaactggttctctgcctgtttcgacaacttcacagaagctctcgctgagacagcctgtaggcagatgggctacagcagcaaacccactttcagagctgtggagattggcccagaccaggatctggatgttgttgaaatcacagaaaacagccaggagcttcgcatgcggaactcaagtgggccctgtctctcaggctccctggtctccctgcactgtcttgcctgtgggaagagcctgaagaccccccgtgtggtgggtggggaggaggcctctgtggattcttggccttggcaggtcagcatccagtacgacaaacagcacgtctgtggagggagcatcctggacccccactgggtcctcacggcagcccactgcttcaggaaacataccgatgtgttcaactggaaggtgcgggcaggctcagacaaactgggcagcttcccatccctggctgtggccaagatcatcatcattgaattcaaccccatgtaccccaaagacaatgacatcgccctcatgaagctgcagttcccactcactttctcaggcacagtcaggcccatctgtctgcccttctttgatgaggagctcactccagccaccccactctggatcattggatggggctttacgaagcagaatggagggaagatgtctgacatactgctgcaggcgtcagtccaggtcattgacagcacacggtgcaatgcagacgatgcgtaccagggggaagtcaccgagaagatgatgtgtgcaggcatcccggaagggggtgtggacacctgccagggtgacagtggtgggcccctgatgtaccaatctgaccagtggcatgtggtgggcatcgttagctggggctatggctgcgggggcccgagcaccccaggagtatacaccaaggtctcagcctatctcaactggatctacaatgtctggaaggctgagctgtaatgctgctgcccctttgcagtgctgggagccgcttccttcctgccctgcccacctggggatcccccaaagtcagacacagagcaagagtccccttgggtacacccctctgcccacagcctcagcatttcttggagcagcaaagggcctcaattcctgtaagagaccctcgcagcccagaggcgcccagaggaagtcagcagccctagctcggccacacttggtgctcccagcatcccagggagagacacagcccactgaacaaggtctcaggggtattgctaagccaagaaggaactttcccacactactgaatggaagcaggctgtcttgtaaaagcccagatcactgtgggctggagaggagaaggaaagggtctgcgccagccctgtccgtcttcacccatccccaagcctactagagcaagaaaccagttgtaatataaaatgcactgccctactgttggtatgactaccgttacctactgttgtcattgttattacagctatggccactattattaaagagctgtgtaacatctctgg

SEQ ID NO: 321105 - DNA, 1970 bp, Homo sapiens
gttttaatcaagctgcccaaagtcccccaatcactcctggaatacacagagagaggcagcagcttgctcagcggacaaggatgctgggcgtgagggaccaaggcctgccctgcactcgggcctcctccagccagtgctgaccagggacttctgacctgctggccagccaggacctgtgtggggaggccctcctgctgccttggggtgacaatctcagctccaggctacagggagaccgggaggatcacagagccagcatgttacaggatcctgacagtgatcaacctctgaacagcctcgatgtcaaacccctgcgcaaaccccgtatccccatggagaccttcagaaaggtggggatccccatcatcatagcactactgagcctggcgagtatcatcattgtggttgtcctcatcaaggtgattctggataaatactacttcctctgcgggcagcctctccacttcatcccgaggaagcagctgtgtgacggagagctggactgtcccttgggggaggacgaggagcactgtgtcaagagcttccccgaagggcctgcagtggcagtccgcctctccaaggaccgatccacactgcaggtgctggactcggccacagggaactggttctctgcctgtttcgacaacttcacagaagctctcgctgagacagcctgtaggcagatgggctacagcagcaaacccactttcagagctgtggagattggcccagaccaggatctggatgttgttgaaatcacagaaaacagccaggagcttcgcatgcggaactcaagtgggccctgtctctcaggctccctggtctccctgcactgtcttgcctgtgggaagagcctgaagaccccccgtgtggtgggtggggaggaggcctctgtggattcttggccttggcaggtcagcatccagtacgacaaacagcacgtctgtggagggagcatcctggacccccactgggtcctcacggcagcccactgcttcaggaaacataccgatgtgttcaactggaaggtgcgggcaggctcagacaaactgggcagcttcccatccctggctgtggccaagatcatcatcattgaattcaaccccatgtaccccaaagacaatgacatcgccctcatgaagctgcagttcccactcactttctcaggcacagtcaggcccatctgtctgcccttctttgatgaggagctcactccagccaccccactctggatcattggatggggctttacgaagcagaatggagggtgacagtggtgggcccctgatgtaccaatctgaccagtggcatgtggtgggcatcgttagctggggctatggctgcgggggcccgagcaccccaggagtatacaccaaggtctcagcctatctcaactggatctacaatgtctggaaggctgagctgtaatgctgctgcccctttgcagtgctgggagccgcttccttcctgccctgcccacctggggatcccccaaagtcagacacagagcaagagtccccttgggtacacccctctgcccacagcctcagcatttcttggagcagcaaagggcctcaattcctgtaagagaccctcgcagcccagaggcgcccagaggaagtcagcagccctagctcggccacacttggtgctcccagcatcccagggagagacacagcccactgaacaaggtctcaggggtattgctaagccaagaaggaactttcccacactactgaatggaagcaggctgtcttgtaaaagcccagatcactgtgggctggagaggagaaggaaagggtctgcgccagccctgtccgtcttcacccatccccaagcctactagagcaagaaaccagttgtaatataaaatgcactgccctactgttggtatgactaccgttacctactgttgtcattgttattacagctatggccactattattaaagagctgtgtaacatctctgg

SEQ ID NO: 321106 - DNA, 1023 bp, Homo sapiens
gttttaatcaagctgcccaaagtcccccaatcactcctggaatacacagagagaggcagcagcttgctcagcggacaaggatgctgggcgtgagggaccaaggcctgccctgcactcgggcctcctccagccagtgctgaccagggacttctgacctgctggccagccaggacctgtgtggggaggccctcctgctgccttggggtgacaatctcagctccaggctacagggagaccgggaggatcacagagccagcatgttacaggatcctgacagtgatcaacctctgaacagcctcgatgtcaaacccctgcgcaaaccccgtatccccatggagaccttcagaaaggtggggatccccatcatcatagcactactgagcctggcgagtatcatcattgtggttgtcctcatcaaggtgattctggataaatactacttcctctgcgggcagcctctccacttcatcccgaggaagcagctgtgtgacggagagctggactgtcccttgggggaggacgaggagcactgtgtcaagagcttccccgaagggcctgcagtggcagtccgcctctccaaggaccgatccacactgcaggtgctggactcggccacagggaactggttctctgcctgtttcgacaacttcacagaagctctcgctgagacagcctgtaggcagatgggctacagcagcaaacccactttcagagctgtggagattggcccagaccaggatctggatgttgttgaaatcacagaaaacagccaggagcttcgcatgcggaactcaagtgggcctgtctctcaggtcctggtctccctgcactgtctttgctgttgggagagctgaatacccacgtgtgtggttgtgagaggcccttgggggttcttggcctgcggcggtccgtcggcaccgccgtctggggggtctgaccccatggctcagggcctgcgtggactcgtctttcccgggggggcggccccgggctcccgcggcgcttcgtccctccgcatccctg

SEQ ID NO: 321107 - DNA, 3477 bp, Homo sapiens
  misc_feature (1967)..(1967): n is a, c, g, or t
gttttaatcaagctgcccaaagtcccccaatcactcctggaatacacagagagaggcagcagcttgctcagcggacaaggatgctgggcgtgagggaccaaggcctgccctgcactcgggcctcctccagccagtgctgaccagggacttctgacctgctggccagccaggacctgtgtggggaggccctcctgctgccttggggtgacaatctcagctccaggctacagggagaccgggaggatcacagagccagcatgttacaggatcctgacagtgatcaacctctgaacagcctcgatgtcaaacccctgcgcaaaccccgtatccccatggagaccttcagaaaggtggggatccccatcatcatagcactactgagcctggcgagtatcatcattgtggttgtcctcatccgcctctccaaggaccgatccacactgcaggtgctggactcggccacagggaactggttctctgcctgtttcgacaacttcacagaagctctcgctgagacagcctgtaggcagatgggctacagcagcaaacccactttcagagctgtggagattggcccagaccaggatctggatgttgttgaaatcacagaaaacagccaggagcttcgcatgcggaactcaagtgggccctgtctctcaggctccctggtctccctgcactgtcttgcctgtgggaagagcctgaagaccccccgtgtggtgggtggggaggaggcctctgtggattcttggccttggcaggtcagcatccagtacgacaaacagcacgtctgtggagggagcatcctggacccccactgggtcctcacggcagcccactgcttcaggaaacataccgatgtgttcaactggaaggtgcgggcaggctcagacaaactgggcagcttcccatccctggctgtggccaagatcatcatcattgaattcaaccccatgtaccccaaagacaatgacatcgccctcatgaagctgcagttcccactcactttctcaggcacagtcaggcccatctgtctgcccttctttgatgaggagctcactccagccaccccactctggatcattggatggggctttacgaagcagaatggagggaagatgtctgacatactgctgcaggcgtcagtccaggtcattgacagcacacggtgcaatgcagacgatgcgtaccagggggaagtcaccgagaagatgatgtgtgcaggcatcccggaagggggtgtggacacctgccagggtgacagtggtgggcccctgatgtaccaatctgaccagtggcatgtggtgggcatcgttagctggggctatggctgcgggggcccgagcaccccaggagtatacaccaaggtctcagcctatctcaactggatctacaatgtctggaaggctgagctgtaatgctgctgcccctttgcagtgctgggagccgcttccttcctgccctgcccacctggggatcccccaaagtcagacacagagcaagagtccccttgggtacacccctctgcccacagcctcagcatttcttggagcagcaaagggcctcaattcctgtaagagaccctcgcagcccagaggcgcccagaggaagtcagcagccctagctcggccacacttggtgctcccagcatcccagggagagacacagcccactgaacaaggtctcaggggtattgctaagccaagaaggaactttcccacactactgaatggaagcaggctgtcttgtaaaagcccagatcactgtgggctggagaggagaaggaaagggtctgcgccagccctgtccgtcttcacccatccccaagcctactagagcaagaaaccagttgtaatataaaatgcactgccctactgttggtatgactaccgttacctactgttgtcattgttattacagctatggccactattattaaagagctgtgtaacatctctggcaaaaantagctggaatgcttgataagaactgagctgggatgattgaactttcattctttggcttggggagaaaagaagtcctggggaagcaattgagtctcaaagtagaggcaggggaaaaaagagttagggagaccagatctgctgagtggcagcaagagtgagctgcagattacagaaaccagggtgagcaagtttgagtcccacacagggccttctccctttgcctctttccctccctccctgcctgtgataatcagccaggaccagggataacctatgacttgggaaagagatgagttaggcagtcaagggtgacattcaatcagggatccacaagtggctggaaagaaatgctggtcctgtgtcctaactttttccacctggagagccctcagtgtggcttcttacatttaaaaaacaaaaaggatcagctgccaggtgtgaggcagtccccaagctgagttgtgaggatgtaagcatgaataagtccctgcactcaaaatggtcaaagaattaaaccccatggacttttttggcatctgtatgaaagcttgggttttctgaggactgtcttgctatagttaagtcagatcctagatgaaatatacttgttcatactgtactaggttcttaggaaacaacagaattcctcaaatgcctaaaacaaagaaaatagaaacccagaaaacaaaacaaaataaaacaaaaccatcagaactgtgagtggaaactaaggtgatgatctgggagcaatacactaaaatcttgggtcgagacctatatgaaggctggcagtggagctaaacctggacacactgaagacaagggagctgaaccagggctcctacatgaagcagggataactgatggcagtaaatgtggtctcaaattgcagatggtctggaggaaaatttcccaaatttagagcctcaggattcccaaagatcctccaaatatgagctcacaatcaaagatcagagacgttgaaaaataaaaaacaccttaagtgggcagcataaaaaacagctaatttagaaccccaaaggcttcagatgtcagaatattagagacttatgataataagcaatatttgcagagtatttgtatgtgccagacactattgtaagtgcttcatcatgtactgattcatttaatactcacagaaatctgtgagatgggtattattcttatcctcactctatggattaaaaaaactaaggcacaaagtggttaagctccttgcctgagattatagactgtaagttgaacgtgagcacttggaatacagagttcatgctgtaaactaccacactatagggcctccaatatgataatttataaaatatttgaataaaaaatgaatactagttccacattttaaaatcatgtttaactgtggtcaaatgcacataacacaagttgccatcttcaccatttttaggtgtatagttcagtggtgttatgtacattcacactattgtgcagtcatcaccacactgcctacactagtgga

SEQ ID NO: 321108 - DNA, 2176 bp, Homo sapiens
gttttaatcaagctgcccaaagtcccccaatcactcctggaatacacagagagaggcagcagcttgctcagcggacaaggatgctgggcgtgagggaccaaggcctgccctgcactcgggcctcctccagccagtgctgaccagggacttctgacctgctggccagccaggacctgtgtggggaggccctcctgctgccttggggtgacaatctcagctccaggctacagggagaccgggaggatcacagagccagcatgttacaggatcctgacagtgatcaacctctgaacagcctcgatgtcaaacccctgcgcaaaccccgtatccccatggagaccttcagaaaggtggggatccccatcatcatagcactactgagcctggcgagtatcatcattgtggttgtcctcatcaaggtgattctggataaatactacttcctctgcgggcagcctctccacttcatcccgaggaagcagctgtgtgacggagagctggactgtcccttgggggaggacgaggagcactgtgtcaagagcttccccgaagggcctgcagtggcagtccgcctctccaaggaccgatccacactgcaggtgctggactcggccacagggaactggttctctgcctgtttcgacaacttcacagaagctctcgctgagacagcctgtaggcagatgggctacagcagcaaacccactttcagagctgtggagattggcccagaccaggatctggatgttgttgaaatcacagaaaacagccaggagcttcgcatgcggaactcaagtgggccctgtctctcaggctccctggtctccctgcactgtcttgcctgtgggaagagcctgaagaccccccgtgtggtgggtggggaggaggcctctgtggattcttggccttggcaggtcagcatccagtacgacaaacagcacgtctgtggagggagcatcctggacccccactgggtcctcacggcagcccactgcttcaggaaacataccgatgtgttcaactggaaggtgcgggcaggctcagacaaactgggcagcttcccatccctggctgtggccaagatcatcatcattgaattcaaccccatgtaccccaaagacaatgacatcgccctcatgaagctgcagttcccactcactttctcaggcacagtcaggcccatctgtctgcccttctttgatgaggagctcactccagccaccccactctggatcattggatggggctttacgaagcagaatggaggtaagtcctgggtgcaggaccacagggcaggagatgcccttgtatgagggagcagcttccagaagtaatgggaaggaggaccacccttcagagaaacccatcctggaggaccaagcaccaaggcgccaggcagaaagcaaagtggtttggcaatccagggctgggggatagaaggcaaggatgggaatgtgagtgtttttaccctcccagggaagatgtctgacatactgctgcaggcgtcagtccaggtcattgacagcacacggtgcaatgcagacgatgcgtaccagggggaagtcaccgagaagatgatgtgtgcaggcatcccggaagggggtgtggacacctgccaggtggggcctccaagaatcatggggagttctaagaatagggtttaggtcctagagagatgagaaaacccagaggctgcatgccctacaggaagccttgcatatcatgggcactcaatgtgtgatgatgggaggaagagagggagggaaggaaaggatagtcagataaaagtgtaccaatagatgagtgggtggatggatggatgcagacaagcagagagatttcaaatgtctctttcacattcgaagatgatgttactggcctggctggtcttgaactcctgacctcaagtgattcacccgcctcagcctcccaaggtgctgggattacaggtgtgagccaccgctcctggccaacaaccaggcttttttaagacatcactcagagcctttaatttgctaatgtgagttgtgaatctctgagagaaggctaacggcatgcttgcaacttacttgtccacagacaagcctttctgccccagaagagaagaccattctagggtgctaatgagcaaagagggtgagggtggaatatcggagagcagcagggagtgcagggg

SEQ ID NO: 321109 - DNA, 998 bp, Homo sapiens
gttttaatcaagctgcccaaagtcccccaatcactcctggaatacacagagagaggcagcagcttgctcagcggacaaggatgctgggcgtgagggaccaaggcctgccctgcactcgggcctcctccagccagtgctgaccagggacttctgacctgctggccagccaggacctgtgtggggaggccctcctgctgccttggggtgacaatctcagctccaggctacagggagaccgggaggatcacagagccagcatgttacaggatcctgacagtgatcaacctctgaacagcctcgatgtcaaacccctgcgcaaaccccgtatccccatggagaccttcagaaaggtggggatccccatcatcatagcactactgagcctggcgagtatcatcattgtggttgtcctcatcaaggtgattctggataaatactacttcctctgcgggcagcctctccacttcatcccgaggaagcagctgtgtgacggagagctggactgtcccttgggggaggacgaggagcactgtgtcaagagcttccccgaagggcctgcagtggcagtccgcctctccaaggaccgatccacactgcaggtgctggactcggccacagggaactggttctctgcctgtttcgacaacttcacagaaccctagctcggccacacttggtgctcccagcatcccagggagagacacagcccactgaacaaggtctcaggggtattgctaagccaagaaggaactttcccacactactgaatggaagcaggctgtcttgtaaaagcccagatcactgtgggctggagaggagaaggaaagggtctgcgccagccctgtccgtcttcacccatccccaagcctactagagcaagaaaccagttgtaatataaaatgcactgccctactgttggtatgactaccgttacctactgttgtcattgttattacagctatggccactattattaaagagctgtgtaacatctctgg

SEQ ID NO: 321110 - DNA, 490 bp, Homo sapiens
atgcaccccagcttctgctagcagctggctggggacacagggttcctcaggagcctgtcttgattggaaggcagcaagcagcctctcctagcacaggcaaactcgctttctcatttttgttcggctgtcattcatttccttcctgtgactgttttattgttttccattctctcaaggagcgcctttttgattgcctgtaaattcctctataatcatactcttccccacaaacatgagatcataactggataatttcttttcttgtgctgggtagtgcagtttgaatgtgaaggtcaaaagttgaaacttcaaaagagcaggcatcttacttccataatttaggctgtggttctgctttactgttttgcagatgattaaattgatctgaaggcaaggtgggaaataaaaggagatgctttcataccacctgatagctcagtgccttgggtttcggttaagtacctctggaagcgtcaggggagagcaggcg

SEQ ID NO: 321111 - DNA, 3094 bp, Homo sapiens
ggagcccagggctcgaggtgcgcggagcctgagtctgggctttccgaggacggcgagcagctgtgcccagagctctgggaaagtcccctctctttgcttcttataaattaagttcctttccaccagttagggcaagtccgccaagatagactgaagaggagcaagaacagaaacagggagccagttacagatctatcccaagaattctggggagagatgatggtgtctgcagcagagtgacagcagtggagattgagagaaaaggttgaaaatggttgcttgtgttcaactactgtgaagagttggaatcagacaactacggctttgattttccaagtggttcagaatgtaaatatgatctgacctttccctgatggacagttaaatcatggacacgctaaacaatttactttggactgtccttcctaaagatgctctggcttctctcttgaatgctcactaagctttcgtagctgacaaggaaaggaaggaaaactgtgaactggaaagttatcttacaatgaaaattactagcacatcttgcatctgtccagtcctagtgtgtctctgttttgtgcagaggtgttatggaactgctcaccacagctccatcaaggtgatgagaaaccaaaccaaacacattgaaggtgaaaccgaagtccatcatcgtcccaaaaggggatgggtatggaatcagttctttgttttagaagaacatatgggaccagatcctcagtatgttggaaagctgcactccaattctgacaaaggtgatggatctgtcaagtacatccttactggagagggtgctgggactatatttatcattgacgataccacgggtgatatccactcaacaaaaagcctagacagagagcagaagacccactatgtgcttcatgctcaagctattgatagacgtacaaacaaacctcttgagcctgaatccgagttcatcatcaaagtgcaagacatcaatgacaacgctccaaaattcacagatggaccatacattgttactgtgcctgaaatgtcagatatgggtacctctgttctacaggtgacagctactgatgcagatgaccctacctatggaaacagcgctcgggtggtttacagcattctccagggacaaccctacttctccgtcgaccctaaaacaggagttattagaacggccttacataacatggacagagaagccagagaacattactccgtagtcattcaagccaaagacatggctgggcaagttggagggctttcaggatctacaacagtcaacatcaccttaaccgatgtcaatgacaacccaccacgctttcctcaaaaacactatcagctatatgttcctgagtcagctcaagttggttcagctgttgggaaaatcaaggcaaatgatgctgacactggctcaaatgctgacatgacctactccatcataaatggtgatggcatgggaatattctcaatctccactgacaaagagaccagagaaggaatcctttctttaaagaagccactgaactatgagaaaaagaagtcatataccctcaacatagaaggagcaaatacacatcttgattttcgcttttctcacttgggtccttttaaagatgctactatgctgaagatcattgttggggatgtagatgaaccaccactattttccatgccttcctacctcatggaagtctacgaaaatgccaagattgggaccgtcgttggtacagttttggcacaagatcctgacagtactaacagcttagtaagatacttcatcaactacaatgttgaagacgacagatttttcaacattgatgccaatactgggaccattaggactacaaaggttctcgacagagaagaaactccatggtacaacatcacagtcactgcttcagaaattgataatcctgatttgctgagccatgtcacagtgggtattagagttctggatgtcaatgacaatccacccgaacttgccagggaatatgatattattgtatgtgaaaattctaagcctggccaggttattcataccatcagtgccactgataaagatgattttgccaatggaccaaggtttaacttctttcttgatgaacgcctgcctgtaaatccaaacttcactctgaaggacaatgaagataacacagccagcattctgacaaggcggaggagatttagtcgaactgttcaggatgtgtattatctgcccattatgatctctgatggtggaatcccctctctcagcagcagcagcaccctcaccatcagggtttgtgcatgcgagagagatgggcgtgtgcggacctgccatgcagaagccttcctgtcctcggctggtttgagtacaggagccttaatcgctattcttctctgtgttctcattctcctggcaattgtggtactttttatcaccctgaggcgcagcaaaaaagagcccttgatcatttcagaagaggatgtacgggagaacgtggtcacctatgatgatgaaggaggcggagaggaagacacagaggcctttgacatcacagccttgaggaatccttctgctgctgaggagctcaagtaccggagggatatcagacctgaagtgaagctcactcccagacaccagacatcatccaccctggaaagcatagatgttcaggaatttattaagcaaagactggcagaagcagacctagaccctagcgttcccccttatgactctcttcagacttatgcctatgagggtcagagatcagaagctgggtctatcagctcgctggattcagcaacgacacaatcagaccaggattatcactaccttggagactggggacccgagtttaaaaagttagctgaactctatggagaaatagaatctgaaagaacaacttagggggtcagttcttgcaaccttgtggaatttgcttcctgagtaagtggatatacaacctcagcaatgacaaggaagaagtgtggaaacagtacttggaactgaggaagctggacacagctcctgtagaaacaagtgcccttttcatgatcgaaactgggttatttaattggaagaaagtaaaaaaaaaaaaaaaaagacaat

SEQ ID NO: 321112 - DNA, 2975 bp, Homo sapiens
ggagcccagggctcgaggtgcgcggagcctgagtctgggctttccgaggacggcgagcagctgtgcccagagctctgggaaagtcccctctctttgcttcttataaattaagttcctttccaccagttagggcaagtccgccaaggttgaaaatggttgcttgtgttcaactactgtgaagagttggaatcagacaactacggctttgattttccaagtggttcagaatgtaaatatgatctgacctttccctgatggacagttaaatcatggacacgctaaacaatttactttggactgtccttcctaaagatgctctggcttctctcttgaatgctcactaagctttcgtagctgacaaggaaaggaaggaaaactgtgaactggaaagttatcttacaatgaaaattactagcacatcttgcatctgtccagtcctagtgtgtctctgttttgtgcagaggtgttatggaactgctcaccacagctccatcaaggtgatgagaaaccaaaccaaacacattgaaggtgaaaccgaagtccatcatcgtcccaaaaggggatgggtatggaatcagttctttgttttagaagaacatatgggaccagatcctcagtatgttggaaagctgcactccaattctgacaaaggtgatggatctgtcaagtacatccttactggagagggtgctgggactatatttatcattgacgataccacgggtgatatccactcaacaaaaagcctagacagagagcagaagacccactatgtgcttcatgctcaagctattgatagacgtacaaacaaacctcttgagcctgaatccgagttcatcatcaaagtgcaagacatcaatgacaacgctccaaaattcacagatggaccatacattgttactgtgcctgaaatgtcagatatgggtacctctgttctacaggtgacagctactgatgcagatgaccctacctatggaaacagcgctcgggtggtttacagcattctccagggacaaccctacttctccgtcgaccctaaaacaggagttattagaacggccttacataacatggacagagaagccagagaacattactccgtagtcattcaagccaaagacatggctgggcaagttggagggctttcaggatctacaacagtcaacatcaccttaaccgatgtcaatgacaacccaccacgctttcctcaaaaacactatcagctatatgttcctgagtcagctcaagttggttcagctgttgggaaaatcaaggcaaatgatgctgacactggctcaaatgctgacatgacctactccatcataaatggtgatggcatgggaatattctcaatctccactgacaaagagaccagagaaggaatcctttctttaaagaagccactgaactatgagaaaaagaagtcatataccctcaacatagaaggagcaaatacacatcttgattttcgcttttctcacttgggtccttttaaagatgctactatgctgaagatcattgttggggatgtagatgaaccaccactattttccatgccttcctacctcatggaagtctacgaaaatgccaagattgggaccgtcgttggtacagttttggcacaagatcctgacagtactaacagcttagtaagatacttcatcaactacaatgttgaagacgacagatttttcaacattgatgccaatactgggaccattaggactacaaaggttctcgacagagaagaaactccatggtacaacatcacagtcactgcttcagaaattgataatcctgatttgctgagccatgtcacagtgggtattagagttctggatgtcaatgacaatccacccgaacttgccagggaatatgatattattgtatgtgaaaattctaagcctggccaggttattcataccatcagtgccactgataaagatgattttgccaatggaccaaggtttaacttctttcttgatgaacgcctgcctgtaaatccaaacttcactctgaaggacaatgaagataacacagccagcattctgacaaggcggaggagatttagtcgaactgttcaggatgtgtattatctgcccattatgatctctgatggtggaatcccctctctcagcagcagcagcaccctcaccatcagggtttgtgcatgcgagagagatgggcgtgtgcggacctgccatgcagaagccttcctgtcctcggctggtttgagtacaggagccttaatcgctattcttctctgtgttctcattctcctggcaattgtggtactttttatcaccctgaggcgcagcaaaaaagagcccttgatcatttcagaagaggatgtacgggagaacgtggtcacctatgatgatgaaggaggcggagaggaagacacagaggcctttgacatcacagccttgaggaatccttctgctgctgaggagctcaagtaccggagggatatcagacctgaagtgaagctcactcccagacaccagacatcatccaccctggaaagcatagatgttcaggaatttattaagcaaagactggcagaagcagacctagaccctagcgttcccccttatgactctcttcagacttatgcctatgagggtcagagatcagaagctgggtctatcagctcgctggattcagcaacgacacaatcagaccaggattatcactaccttggagactggggacccgagtttaaaaagttagctgaactctatggagaaatagaatctgaaagaacaacttagggggtcagttcttgcaaccttgtggaatttgcttcctgagtaagtggatatacaacctcagcaatgacaaggaagaagtgtggaaacagtacttggaactgaggaagctggacacagctcctgtagaaacaagtgcccttttcatgatcgaaactgggttatttaattggaagaaagtaaaaaaaaaaaaaaaaagacaat

SEQ ID NO: 321113 - DNA, 463 bp, Homo sapiens
  misc_feature (6)..(6): n is a, c, g, or t
gcggcngcctactactactactaaattcgcggccgcgtcgagttggttttactaaaaaacgcaacaatcagatacggaagacctcttatgctcagcaccaacaggtccgccaaatccggaagaagatgatggaaatcatgacccgagaggtgcagacaaatgacttgaaagaagtggtcaataaattgattccagacagcattggaaaagacatagaaaaggcttgccaatctatttatcctctccatgatgtcttcgttagaaaagtaaaaatgctgaagaagcccaagtttgaattgggaaagctcatggagcttcatggtgaaggcagtagttctggaaaagccactggggacgagacaggtgctaaagttgaacgagctgatggatatgaaccaccagtccaagaatctgtttaaagttcagacttcaaatagtggcaaataaaaagtgctatttgtga

SEQ ID NO: 321114 - DNA, 577 bp, Homo sapiens
tttctgatgttcccatgcaatatacagttagctaagagggtgtaatggaaaaagcataaggcttggactcagaagactctactaactttgccactagctagctatgtaattcagatcatctatcctttacatgtgaaaggtaaataatggcttatcttaacaggaggatttatgcaggttaaatgaggtaggtgttatgtgtaggtttattccaaggcttctctacttttaaaggaaatggcttatcttatatctgagaactaggacttttagaaaaaaatttactgttactggtttgcaggattccagacagcattggaaaagacatagaaaaggcttgccaatctatttatcctctccatgatgtcttcgttagaaaagtaaaaatgctgaagaagcccaagtttgaattgggaaagctcatggagcttcatggtgaaggcagtagttctggaaaagccactggggacgagacaggtgctaaagttgaacgagctgatggatatgaaccaccagtccaagaatctgtttaaagttcagacttcaaatagtggcaaataaaaagtgctatttgtga

SEQ ID NO: 321115 - DNA, 927 bp, Homo sapiens
  misc_feature (927)..(927): n is a, c, g, or t
taaacttacggctaggtacgaggctgggtgagcaccatggcggttggcaagaacaagcgccttacgaaaggcggcaaaaagggagccaagaagaaagtggttgatccattttctaagaaagattggtatgatgtgaaagcacctgctatgttcaatataagaaatattggaaagacgctcgtcaccaggacccaaggaaccaaaattgcatctgatggtctcaagggtcgtgtgtttgaagtgagtcttgctgatttgcagaatgatgaagttgcatttagaaaattcaagctgattactgaagatgttcagggtaaaaactgcctgactaacttccatggcatggatcttacccgtgacaaaatgtgttccatggtcaaaaaatggcagacaatgattgaagctcacgttgatgtcaagactaccgatggttacttgcttcgtctgttctgtgttggttttactaaaaaacgcaacaatcagatacggaagacctcttatgctcagcaccaacaggtccgccaaatccggaagaagatgatggaaatcatgacccgagaggtgcagacaaatgacttgaaagaagtggtcaataaattgattccagacagcattggaaaagacatagaaaaggcttgccaatctatttatcctctccatgatgtcttcgttagaaaagtaaaaatgctgaagaagcccaagtttgaatttgggaaagctcatggagcttcatggtgaggcggagtctggaaagcctggggccggacgggctagtgacgagcgtgggttgacccgtccgattgttagtcgactcctgggcaaaggcttgggaaaaacaaaaaaaaatggggcggcccattaaacgtggggccgaaagaattcaaaggggggtgccacggcgggaatgttgtaacacgcgcgcggtan

SEQ ID NO: 321116 - DNA, 957 bp, Homo sapiens
atattgtcataccatagtaggaagaaaaacctttatttggaatatacaaacttacagtagtgagcaccatggcggttggcaagaacaagcgccttacgaaaggcggcaaaaagggagccaagaagaaagtggttgatccattttctaagaaagattggtatgatgtgaaagcacctgctatgttcaatataagaaatattggaaagacgctcgtcaccaggacccaaggaaccaaaattgcatctgatggtctcaagggtcgtgtgtttgaagtgagtcttgctgatttgcagaatgatgaagttgcatttagaaaattcaagctgattactgaagatgttcagggtaaaaactgcctgactaacttccatggcatggatcttacccgtgacaaaatgtgttccatggtcaaaaaatggcagacaatgattgaagctcacgttgatgtcaagactaccgatggttacttgcttcgtctgttctgtgttggttttactaaaaaacgcaacaatcagatacggaagacctcttatgctcagcaccaacaggtccgccaaatccggaagaagatgatggaaatcatgacccgagaggtgcagacaaatgacttgaaagaagtggtcaataaattgattccagacagcattggaaaagacatagaaaaggcttgccaatctatttatcctctccatgatgtcttcgttagaaaagtaaaaatgctgaagaagcccaagtttgaattgggaaagctcatggagcttcatggtgaaggcagtagttctggaaaagccactggggacgagacaggtgctaaagttgaacgagctgatggatatgaaccaccagtccaagaatctgtttaaagttcagacttcaaatagtggcaaataaaaagtgctatttgtgaaaaacaaaaaaaaaaaccggaggacatattggggggggaaaaagtagtga

SEQ ID NO: 321117 - DNA, 606 bp, Homo sapiens
tttctgatgttcccatgcaatatacagttagctaagagggtgtaatggaaaaagcataaggcttggactcagaagactctactaactttgccactagctagctatgtaattcagatcatctatcctttacatgtgaaaggtaaataatggcttatcttaacaggaggatttatgcaggttaaatgaggtaggtgttatgtgtaggtttattccaaggcttctctacttttaaaggaaatggcttatcttatatctgagaactaggacttttagaaaaaaatttactgttactggtttgcaggattccagacagcattggaaaagacatagaaaaggcttgccaatctatttatcctctccatgatgtcttcgttagaaaagtaaaaatgctgaagaagcccaagtttgaattgggaaagctcatggagcttcatggtgaaggcagtagttctggaaaagccactggggacgagacaggtgctaaagttgaacgagctgatggatatgaaccaccagtccaagaatctgtttaaagttcagacttcaaatagtggcaaataaaaagtgctatttgtgaaaaaaaaagtcgacgcggccgcgaattta

SEQ ID NO: 321118 - DNA, 355 bp, Homo sapiens
  misc_feature (6)..(6): n is a, c, g, or t
gcggcngcctactactactactaaattcgcggccgcgtcgagattccagacagcattggaaaagacatagaaaaggcttgccaatctatttatcctctccatgatgtcttcgttagaaaagtaaaaatgctgaagaagcccaagtttgaattgggaaagctcatggagcttcatggtgaaggcagtagttctggaaaagccactggggacgagacaggtgctaaagttgaacgagctgatggatatgaaccaccagtccaagaatctgtttaaagttcagacttcaaatagtggcaaataaaaagtgctatttgtgaaaaggaaaaaaccccccaggaggaggtagaaccgagcc

SEQ ID NO: 321119 - DNA, 239 bp, Homo sapiens
ggccgcctactactactactgctcgaattcaagcttctaacgatgtacggggacatggtgaaggcagtagttctggaaaagccactggggacgagacaggtgctaaagttgaacgagctgatggatatgaaccaccagtccaagaatctgtttaaagttcagacttcaaatagtggcaaataaaaagtgctatttgtgaaaaaataaaaagaaaacaaataaaaaactaaaaccaaaaa

SEQ ID NO: 321120 - DNA, 875 bp, Homo sapiens
taaacttacggctaggtacgaggctgggtgagcaccatggcggttggcaagaacaagcgccttacgaaaggcggcaaaaagggagccaagaagaaagtggttgatccattttctaagaaagattggtatgatgtgaaagcacctgctatgttcaatataagaaatattggaaagacgctcgtcaccaggacccaaggaaccaaaattgcatctgatggtctcaagggtcgtgtgtttgaagtgagtcttgctgatttgcagaatgatgaagttgcatttagaaaattcaagctgattactgaagatgttcagggtaaaaactgcctgactaacttccatggcatggatcttacccgtgacaaaatgtgttccatggtcaaaaaatggcagacaatgattgaagctcacgttgatgtcaagactaccgatggttacttgcttcgtctgttctgtgttggttttactaaaaaacgcaacaatcagatacggaagacctcttatgctcagcaccaacaggtccgccaaatccggaagaagatgatggaaatcatgacccgagaggtgcagacaaatgacttgaaagaagtggtcaataaattgattccagacagcattggaaaagacatagaaaaggcttgccaatctatttatcctctccatgatgtcttcgttagaaaagtaaaaatgctgaagaagcccaagtttgaattgggaaagctcatggagcttcatggtgaaggcagtagttctggaaaagccactggggacgagacaggtgctaaagttgaacgagctgatggatatgaaccaccagtccaagaatctgtttaaagttcagacttcaaatagtggcaaataaaaagtgctatttgtga

SEQ ID NO: 321121 - DNA, 799 bp, Homo sapiens
  misc_feature (38)..(38): n is a, c, g, or t
  misc_feature (42)..(42): n is a, c, g, or t
gaggcggggttaatcggacgagggcttagaaaggcggnaaanggagccaagaagaaagtggttgatccattttctaagaaagattggtatgatgtgaaagcacctgctatgttcaatataagaaatattggaaagacgctcgtcaccaggacccaaggaaccaaaattgcatctgatggtctcaagggtcgtgtgtttgaagtgagtcttgctgatttgcagaatgatgaagttgcatttagaaaattcaagctgattactgaagatgttcagggtaaaaactgcctgactaacttccatggcatggatcttacccgtgacaaaatgtgttccatggtcaaaaaatggcagacaatgattgaagctcacgttgatgtcaagactaccgatggttacttgcttcgtctgttctgtgttggttttactaaaaaacgcaacaatcagatacggaagacctcttatgctcagcaccaacaggtccgccaaatccggaagaagatgatggaaatcatgacccgagaggtgcagacaaatgacttgaaagaagtggtcaataaattgattccagacagcattggaaaagacatagaaaaggcttgccaatctatttatcctctccatgatgtcttcgttagaaaagtaaaaatgctgaagaagcccaagtttgaattgggaaagctcatggagcttcatggtgaaggcagtagttctggaaaagccactggggacgagacaggtgctaaagttgaacgagctgatggatatgaaaaatacacccgcacgtcgggcgaggaatttc

SEQ ID NO: 321122 - DNA, 930 bp, Homo sapiens
aacggctagtacgaggccgggtgttaatcggccgaggcctaagttctcgcgcgactcccacttccgcccttttggctctctgaccagcaccatggcggttggcaagaacaagcgccttacgaaaggcggcaaaaagggagccaagaagaaagtggttgatccattttctaagaaagattggtatgatgtgaaagcacctgctatgttcaatataagaaatattggaaagacgctcgtcaccaggacccaaggaaccaaaattgcatctgatggtctcaagggtcgtgtgtttgaagtgagtcttgctgatttgcagaatgatgaagttgcatttagaaaattcaagctgattactgaagatgttcagggtaaaaactgcctgactaacttccatggcatggatcttacccgtgacaaaatgtgttccatggtcaaaaaatggcagacaatgattgaagctcacgttgatgtcaagactaccgatggttacttgcttcgtctgttctgtgttggttttactaaaaaacgcaacaatcagatacggaagacctcttatgctcagcaccaacaggtccgccaaatccggaagaagatgatggaaatcatgacccgagaggtgcagacaaatgacttgaaagaagtggtcaataaattgattccagacagcattggaaaagacatagaaaaggcttgccaatctatttatcctctccatgatgtcttcgttagaaaagtaaaaatgctgaagaagcccaagtttgaattgggaaagctcatggagcttcatggtgaaggcagtagttctggaaaagccactggggacgagacaggtgctaaagttgaacgagctgatggatatgaaccaccagtccaagaatctgtttaaagttcagacttcaaatagtggcaaataaaaagtgctatttgtga

SEQ ID NO: 321123 - DNA, 1075 bp, Homo sapiens
aacggctagtacgaggccgggtgttaatcggccgaggcctaagttctcgcgcgactcccacttccgcccttttggctctctgaccagcaccatggcggttggcaagaacaagcgccttacgaaaggcggcaaaaagggagccaagaagaaagtggttgatccattttctaagaaagattggtatgatgtgaaagcacctgctatgttcaatataagaaatattggaaagacgctcgtcaccaggacccaaggaaccaaaattgcatctgatggtctcaagggtcgtgtgtttgaagtgagtcttgctgatttgcagaatgatgaagttgcatttagaaaattcaagctgattactgaagatgttcagggtaaaaactgcctgactaacttccatggcatggatcttacccgtgacaaaatgtgttccatggtcaaaaaatggcagacaatgattgaagctcacgttgatgtcaagactaccgatggttacttgcttcgtctgttctgtgttggttttactaaaaaacgcaacaatcagatacggaagacctcttatgctcagcaccaacaggtccgccaaatccggaagaagatgatggaaatcatgacccgagaggtgcagacaaatgacttgaaagaagtggtcaataaattgattccagacagcattggaaaagacatagaaaaggcttgccaatctatttatcctctccatgatgtcttcgttagaaaagtaaaaatgctgaagaagcccaagtttgaattgggaaagctcatggagcttcatggtgaaggcagtagttctggaaaagccactggggacgagacaggtgctaaagttgaacgagctgatggatatgaaccaccagtccaagaatctgtttaaagttcagacttcaaatagtggcaaataaaaagtgctatttgtgaaccaccaaaaaacacaaaaaactccaagagccacaatccgagcggggcacaaaaggcgctcaagagaacgggccacatggccataagaggatacactgcaccacgcttcattctggcaacagggggacaactgacacggcccaca

SEQ ID NO: 321124 - DNA, 1083 bp, Homo sapiens
aacggctagtacgaggccgggtgttaatcggccgaggcctaagttctcgcgcgactcccacttccgcccttttggctctctgaccagcaccatggcggttggcaagaacaagcgccttacgaaaggcggcaaaaagggagccaagaagaaagtggttgatccattttctaagaaagattggtatgatgtgaaagcacctgctatgttcaatataagaaatattggaaagacgctcgtcaccaggacccaaggaaccaaaattgcatctgatggtctcaagggtcgtgtgtttgaagtgagtcttgctgatttgcagaatgatgaagttgcatttagaaaattcaagctgattactgaagatgttcagggtaaaaactgcctgactaacttccatggcatggatcttacccgtgacaaaatgtgttccatggtcaaaaaatggcagacaatgattgaagctcacgttgatgtcaagactaccgatggttacttgcttcgtctgttctgtgttggttttactaaaaaacgcaacaatcagatacggaagacctcttatgctcagcaccaacaggtccgccaaatccggaagaagatgatggaaatcatgacccgagaggtgcagacaaatgacttgaaagaagtggtcaataaattgattccagacagcattggaaaagacatagaaaaggcttgccaatctatttatcctctccatgatgtcttcgttagaaaagtaaaaatgctgaagaagcccaagtttgaattgggaaagctcatggagcttcatggtgaaggcagtagttctggaaaagccactggggacgagacaggtgctaaagttgaacgagctgatggatatgaaccaccagtccaagaatctgtttaaagttcagacttcaaatagtggcaaataaaaagtgctatttgtgacggaacaaacacactaaaaaaaaaaaaatttggtgggcggctcggccctaaaaaagttttataacctttgtttgggggcggccaagggtattacaccgtgccactgtccccggaacccggctcaactgtgggggttccccaaaaacccgggag

SEQ ID NO: 321125 - DNA, 1014 bp, Homo sapiens
  misc_feature (942)..(942): n is a, c, g, or t
aacggctagtacgaggccgggtgttaatcggccgaggcctaagttctcgcgcgactcccacttccgcccttttggctctctgaccagcaccatggcggttggcaagaacaagcgccttacgaaaggcggcaaaaagggagccaagaagaaagtggttgatccattttctaagaaagattggtatgatgtgaaagcacctgctatgttcaatataagaaatattggaaagacgctcgtcaccaggacccaaggaaccaaaattgcatctgatggtctcaagggtcgtgtgtttgaagtgagtcttgctgatttgcagaatgatgaagttgcatttagaaaattcaagctgattactgaagatgttcagggtaaaaactgcctgactaacttccatggcatggatcttacccgtgacaaaatgtgttccatggtcaaaaaatggcagacaatgattgaagctcacgttgatgtcaagactaccgatggttacttgcttcgtctgttctgtgttggttttactaaaaaacgcaacaatcagatacggaagacctcttatgctcagcaccaacaggtccgccaaatccggaagaagatgatggaaatcatgacccgagaggtgcagacaaatgacttgaaagaagtggtcaataaattgattccagacagcattggaaaagacatagaaaaggcttgccaatctatttatcctctccatgatgtcttcgttagaaaagtaaaaatgctgaagaagcccaagtttgaattgggaaagctcatggagcttcatggtgaaggcagtagttctggaaaagccactggggacgagacaggtgctaaagttgaacgagctgatggatatgaaccaccagtccaagaatctgtttaaagttcagacttcaaatagtggcaaataaaaagtgctatttgtgacacaacaaaaancaagaacacaagaagccaggggcaaaacgggcgcgacacagggacataaagcgcgggccaacgggtcgcgac

SEQ ID NO: 321126 - DNA, 1037 bp, Homo sapiens
  misc_feature (948)..(948): n is a, c, g, or t
aacggctagtacgaggccgggtgttaatcggccgaggcctaagttctcgcgcgactcccacttccgcccttttggctctctgaccagcaccatggcggttggcaagaacaagcgccttacgaaaggcggcaaaaagggagccaagaagaaagtggttgatccattttctaagaaagattggtatgatgtgaaagcacctgctatgttcaatataagaaatattggaaagacgctcgtcaccaggacccaaggaaccaaaattgcatctgatggtctcaagggtcgtgtgtttgaagtgagtcttgctgatttgcagaatgatgaagttgcatttagaaaattcaagctgattactgaagatgttcagggtaaaaactgcctgactaacttccatggcatggatcttacccgtgacaaaatgtgttccatggtcaaaaaatggcagacaatgattgaagctcacgttgatgtcaagactaccgatggttacttgcttcgtctgttctgtgttggttttactaaaaaacgcaacaatcagatacggaagacctcttatgctcagcaccaacaggtccgccaaatccggaagaagatgatggaaatcatgacccgagaggtgcagacaaatgacttgaaagaagtggtcaataaattgattccagacagcattggaaaagacatagaaaaggcttgccaatctatttatcctctccatgatgtcttcgttagaaaagtaaaaatgctgaagaagcccaagtttgaattgggaaagctcatggagcttcatggtgaaggcagtagttctggaaaagccactggggacgagacaggtgctaaagttgaacgagctgatggatatgaaccaccagtccaagaatctgtttaaagttcagacttcaaatagtggcaaataaaaagtgctatttgtgacaacaaaaaacaaaacanaaacccgggctcttgggggggaaacaggtaaaaggcactgttatgttccggaccctttttaagggaaagcggccaaagggaatacaacg

SEQ ID NO: 321127 - DNA, 1029 bp, Homo sapiens
  misc_feature (947)..(947): n is a, c, g, or t
  misc_feature (996)..(996): n is a, c, g, or t
  misc_feature (1000)..(1000): n is a, c, g, or t
  misc_feature (1002)..(1002): n is a, c, g, or t
  misc_feature (1004)..(1004): n is a, c, g, or t
  misc_feature (1008)..(1008): n is a, c, g, or t
  misc_feature (1015)..(1016): n is a, c, g, or t
  misc_feature (1019)..(1019): n is a, c, g, or t
  misc_feature (1024)..(1024): n is a, c, g, or t
aacggctagtacgaggccgggtgttaatcggccgaggcctaagttctcgcgcgactcccacttccgcccttttggctctctgaccagcaccatggcggttggcaagaacaagcgccttacgaaaggcggcaaaaagggagccaagaagaaagtggttgatccattttctaagaaagattggtatgatgtgaaagcacctgctatgttcaatataagaaatattggaaagacgctcgtcaccaggacccaaggaaccaaaattgcatctgatggtctcaagggtcgtgtgtttgaagtgagtcttgctgatttgcagaatgatgaagttgcatttagaaaattcaagctgattactgaagatgttcagggtaaaaactgcctgactaacttccatggcatggatcttacccgtgacaaaatgtgttccatggtcaaaaaatggcagacaatgattgaagctcacgttgatgtcaagactaccgatggttacttgcttcgtctgttctgtgttggttttactaaaaaacgcaacaatcagatacggaagacctcttatgctcagcaccaacaggtccgccaaatccggaagaagatgatggaaatcatgacccgagaggtgcagacaaatgacttgaaagaagtggtcaataaattgattccagacagcattggaaaagacatagaaaaggcttgccaatctatttatcctctccatgatgtcttcgttagaaaagtaaaaatgctgaagaagcccaagtttgaattgggaaagctcatggagcttcatggtgaaggcagtagttctggaaaagccactggggacgagacaggtgctaaagttgaacgagctgatggatatgaaccaccagtccaagaatctgtttaaagttcagacttcaaatagtggcaaataaaaagtgctatttgtgacacaacaaaaaaaaaanaaaaaaaaaaaatttggggggggctggggcctgggaaaaagtttttaancccncncngtgnggggcgnnggncccangtagg

SEQ ID NO: 321128 - DNA, 992 bp, Homo sapiens
  misc_feature (946)..(946): n is a, c, g, or t
  misc_feature (950)..(950): n is a, c, g, or t
  misc_feature (954)..(954): n is a, c, g, or t
  misc_feature (965)..(965): n is a, c, g, or t
aacggctagtacgaggccgggtgttaatcggccgaggcctaagttctcgcgcgactcccacttccgcccttttggctctctgaccagcaccatggcggttggcaagaacaagcgccttacgaaaggcggcaaaaagggagccaagaagaaagtggttgatccattttctaagaaagattggtatgatgtgaaagcacctgctatgttcaatataagaaatattggaaagacgctcgtcaccaggacccaaggaaccaaaattgcatctgatggtctcaagggtcgtgtgtttgaagtgagtcttgctgatttgcagaatgatgaagttgcatttagaaaattcaagctgattactgaagatgttcagggtaaaaactgcctgactaacttccatggcatggatcttacccgtgacaaaatgtgttccatggtcaaaaaatggcagacaatgattgaagctcacgttgatgtcaagactaccgatggttacttgcttcgtctgttctgtgttggttttactaaaaaacgcaacaatcagatacggaagacctcttatgctcagcaccaacaggtccgccaaatccggaagaagatgatggaaatcatgacccgagaggtgcagacaaatgacttgaaagaagtggtcaataaattgattccagacagcattggaaaagacatagaaaaggcttgccaatctatttatcctctccatgatgtcttcgttagaaaagtaaaaatgctgaagaagcccaagtttgaattgggaaagctcatggagcttcatggtgaaggcagtagttctggaaaagccactggggacgagacaggtgctaaagttgaacgagctgatggatatgaaccaccagtccaagaatctgtttaaagttcagacttcaaatagtggcaaataaaaagtgctatttgtgaaaaaagaaaaaggaanttcncgcngccgcgatttnggtgtagtgtcccccgcggattccgcc

SEQ ID NO: 321129 - DNA, 1364 bp, Homo sapiens
aacggctagtacgaggccgggtgttaatcggccgaggcctaagttctcgcgcgactcccacttccgcccttttggctctctgaccagcaccatggcggttggcaagaacaagcgccttacgaaaggcggcaaaaagggagccaagaagaaagtggttgatccattttctaagaaagattggtatgatgtgaaagcacctgctatgttcaatataagaaatattggaaagacgctcgtcaccaggacccaaggaaccaaaattgcatctgatggtctcaagggtcgtgtgtttgaagtgagtcttgctgatttgcagaatgatgaagttgcatttagaaaattcaagctgattactgaagatgttcagggtaaaaactgcctgactaacttccatggcatggatcttacccgtgacaaaatgtgttccatggtcaaaaaatggcagacaatgattgaagctcacgttgatgtcaagactaccgatggttacttgcttcgtctgttctgtgttggttttactaaaaaacgcaacaatcagatacggaagacctcttatgctcagcaccaacaggtccgccaaatccggaagaagatgatggaaatcatgacccgagaggtgcagacaaatgacttgaaagaagtggtcaataaattgattccagacagcattggaaaagacatagaaaaggcttgccaatctatttatcctctccatgatgtcttcgttagaaaagtaaaaatgctgaagaagcccaagtttgaattgggaaagctcatggagcttcatggtgaaggcagtagttctggaaaagccactggggacgagacaggtgctaaagttgaacgagctgatggatatgaaccaccagtccaagaatctgtttaaagttcagacttcaaatagtggcaaataaaaagtgctatttgtgaaaaaaaaaaaaaaaaaaaaaaaaaaaaaaaaaaaaaaaaaaaaaaaaaaaaaaaaaaaaaaaaaaaaaaaaaacaaaacaaaaacaacaaaaaaaaaaaaaaaaaaaaaaaaaaaaaaaaacaaagggacaaaaaagcgaacgggccggcgggcgagccgcagacgaacacgcggaggggcgcaggaaaaagactgcaacacacagaacgccagatacgaaacgcatgacagacagaacgcacgaagcagccaggcagacgacacgcggaagcaggagcagcagaagaaagaaacgaaaccacagagtgggcgagcaagaacagggggaaggaacccgcagcaggaaccagccaggctcgggaggggagcgcggaacgacgacggtcaaaagggcgtaacaggaagaggacatcacatagcagagaggggagaa

SEQ ID NO: 321130 - DNA, 1070 bp, Homo sapiens
aacggctagtacgaggccgggtgttaatcggccgaggcctaagttctcgcgcgactcccacttccgcccttttggctctctgaccagcaccatggcggttggcaagaacaagcgccttacgaaaggcggcaaaaagggagccaagaagaaagtggttgatccattttctaagaaagattggtatgatgtgaaagcacctgctatgttcaatataagaaatattggaaagacgctcgtcaccaggacccaaggaaccaaaattgcatctgatggtctcaagggtcgtgtgtttgaagtgagtcttgctgatttgcagaatgatgaagttgcatttagaaaattcaagctgattactgaagatgttcagggtaaaaactgcctgactaacttccatggcatggatcttacccgtgacaaaatgtgttccatggtcaaaaaatggcagacaatgattgaagctcacgttgatgtcaagactaccgatggttacttgcttcgtctgttctgtgttggttttactaaaaaacgcaacaatcagatacggaagacctcttatgctcagcaccaacaggtccgccaaatccggaagaagatgatggaaatcatgacccgagaggtgcagacaaatgacttgaaagaagtggtcaataaattgattccagacagcattggaaaagacatagaaaaggcttgccaatctatttatcctctccatgatgtcttcgttagaaaagtaaaaatgctgaagaagcccaagtttgaattgggaaagctcatggagcttcatggtgaaggcagtagttctggaaaagccactggggacgagacaggtgctaaagttgaacgagctgatggatatgaaccaccagtccaagaatctgtttaaagttcagacttcaaatagtggcaaataaaaagtgctatttgtgaacacacaccaaaaaatccaaggctcttattcgggtcgccaaaagagttactcaatggccatggcaaagcgtttccgaaccacttttctttccaggggaaattgcggttcccctaaggagcgattaatcgaaacccgatcc

SEQ ID NO: 321131 - DNA, 881 bp, Homo sapiens
aacggctagtacgaggccgggtgttaatcggccgagagcaccatggcggttggcaagaacaagcgccttacgaaaggcggcaaaaagggagccaagaagaaagtggttgatccattttctaagaaagattggtatgatgtgaaagcacctgctatgttcaatataagaaatattggaaagacgctcgtcaccaggacccaaggaaccaaaattgcatctgatggtctcaagggtcgtgtgtttgaagtgagtcttgctgatttgcagaatgatgaagttgcatttagaaaattcaagctgattactgaagatgttcagggtaaaaactgcctgactaacttccatggcatggatcttacccgtgacaaaatgtgttccatggtcaaaaaatggcagacaatgattgaagctcacgttgatgtcaagactaccgatggttacttgcttcgtctgttctgtgttggttttactaaaaaacgcaacaatcagatacggaagacctcttatgctcagcaccaacaggtccgccaaatccggaagaagatgatggaaatcatgacccgagaggtgcagacaaatgacttgaaagaagtggtcaataaattgattccagacagcattggaaaagacatagaaaaggcttgccaatctatttatcctctccatgatgtcttcgttagaaaagtaaaaatgctgaagaagcccaagtttgaattgggaaagctcatggagcttcatggtgaaggcagtagttctggaaaagccactggggacgagacaggtgctaaagttgaacgagctgatggatatgaaccaccagtccaagaatctgtttaaagttcagacttcaaatagtggcaaataaaaagtgctatttgtga

SEQ ID NO: 321132 - DNA, 1467 bp, Homo sapiens
aacggctagtacgaggccgggtgttaatcggccgaggcctaagttctcgcgcgactcccacttccgcccttttggctctctgaccagcaccatggcggttggcaagaacaagcgccttacgaaaggcggcaaaaagggagccaagaagaaagtggttgatccattttctaagaaagattggtatgatgtgaaagcacctgctatgttcaatataagaaatattggaaagacgctcgtcaccaggacccaaggaaccaaaattgcatctgatggtctcaagggtcgtgtgtttgaagtgagtcttgctgatttgcagaatgatgaagttgcatttagaaaattcaagctgattactgaagatgttcagggtaaaaactgcctgactaacttccatggcatggatcttacccgtgacaaaatgtgttccatggtcaaaaaatggcagacaatgattgaagctcacgttgatgtcaagactaccgatggttacttgcttcgtctgttctgtgttggttttactaaaaaacgcaacaatcagatacggaagacctcttatgctcagcaccaacaggtccgccaaatccggaagaagatgatggaaatcatgacccgagaggtgcagacaaatgacttgaaagaagtggtcaataaattgattccagacagcattggaaaagacatagaaaaggcttgccaatctatttatcctctccatgatgtcttcgttagaaaagtaaaaatgctgaagaagcccaagtttgaattgggaaagctcatggagcttcatggtgaaggcagtagttctggaaaagccactggggacgagacaggtgctaaagttgaacgagctgatggatatgaaccaccagtccaagaatctgtttaaagttcagacttcaaatagtggcaaataaaaagtgctatttgtgaaacaaaaaacaaaacaaaacaacccccggggctttttattccggggggcggaaaaaacaggtctgcgcacggggcccactggggccacaaagggtgttcccggacccagtttttctttgcgtccccacgagggggggtaagaattctgggcccggggatctcccccatatagaggggacggtcggcaaatatacaaatttctcgcaataaagcgcccgcgggttttaaccccgggacgttaaaaggaaacgccgcggcacaaagagcccgcaaaccgccgacgcgacacaccacagcaggccacgccgccaccaccaacacacgggggctacaacccaaccaactagagacacacaacaacacacacgcgcgaccacggccaaaaccaccaccacagccacacctgccgaaaccacagacccccaacaccgacgaccaccaaagaacaatcaacaccgagaccacacacgccgacccgccccatactcaacaaccaccgaccatccgacagcacaccaacgaccgaccagcaacgaa

SEQ ID NO: 321133 - DNA, 1176 bp, Homo sapiens
aacggctagtacgaggccgggtgttaatcggccgaggcctaagttctcgcgcgactcccacttccgcccttttggctctctgaccagcaccatggcggttggcaagaacaagcgccttacgaaaggcggcaaaaagggagccaagaagaaagtggttgatccattttctaagaaagattggtatgatgtgaaagcacctgctatgttcaatataagaaatattggaaagacgctcgtcaccaggacccaaggaaccaaaattgcatctgatggtctcaagggtcgtgtgtttgaagtgagtcttgctgatttgcagaatgatgaagttgcatttagaaaattcaagctgattactgaagatgttcagggtaaaaactgcctgactaacttccatggcatggatcttacccgtgacaaaatgtgttccatggtcaaaaaatggcagacaatgattgaagctcacgttgatgtcaagactaccgatggttacttgcttcgtctgttctgtgttggttttactaaaaaacgcaacaatcagatacggaagacctcttatgctcagcaccaacaggtccgccaaatccggaagaagatgatggaaatcatgacccgagaggtgcagacaaatgacttgaaagaagtggtcaataaattgattccagacagcattggaaaagacatagaaaaggcttgccaatctatttatcctctccatgatgtcttcgttagaaaagtaaaaatgctgaagaagcccaagtttgaattgggaaagctcatggagcttcatggtgaaggcagtagttctggaaaagccactggggacgagacaggtgctaaagttgaacgagctgatggatatgaaccaccagtccaagaatctgtttaaagttcagacttcaaatagtggcaaataaaaagtgctatttgtgaaaacaaaaaaaaaaaaaaaaaaaaaaagaagaaaaaaaaaaaaaaaaaaaaaaaaaaaaaaaaagcgggggggatatttgggggggggagcagaaaaagaggaagaaaaaagagcggcagaagagagagaacaagaggatagacacacacgcaagatcctgtagaaagagggggaaaaattagcgggagcccccaaaagggagggacaaaaaacagagaaagcgcaggagacaccgaaaaaagaag

SEQ ID NO: 321134 - DNA, 971 bp, Homo sapiens
aacggctagtacgaggccgggtgttaatcggccgaggcctaagttctcgcgcgactcccacttccgcccttttggctctctgaccagcaccatggcggttggcaagaacaagcgccttacgaaaggcggcaaaaagggagccaagaagaaagtggttgatccattttctaagaaagattggtatgatgtgaaagcacctgctatgttcaatataagaaatattggaaagacgctcgtcaccaggacccaaggaaccaaaattgcatctgatggtctcaagggtcgtgtgtttgaagtgagtcttgctgatttgcagaatgatgaagttgcatttagaaaattcaagctgattactgaagatgttcagggtaaaaactgcctgactaacttccatggcatggatcttacccgtgacaaaatgtgttccatggtcaaaaaatggcagacaatgattgaagctcacgttgatgtcaagactaccgatggttacttgcttcgtctgttctgtgttggttttactaaaaaacgcaacaatcagatacggaagacctcttatgctcagcaccaacaggtccgccaaatccggaagaagatgatggaaatcatgacccgagaggtgcagacaaatgacttgaaagaagtggtcaataaattgattccagacagcattggaaaagacatagaaaaggcttgccaatctatttatcctctccatgatgtcttcgttagaaaagtaaaaatgctgaagaagcccaagtttgaattgggaaagctcatggagcttcatggtgaaggcagtagttctggaaaagccactggggacgagacaggtgctaaagttgaacgagctgatggatatgaaccaccagtccaagaatctgtttaaagttcagacttcaaatagtggcaaataaaaagtgctatttgtgacactttttatttgccactatttggtcgacgcggccgcgaat

SEQ ID NO: 321135 - DNA, 957 bp, Homo sapiens
aacggctagtacgaggccgggtgttaatcggccgaggcctaagttctcgcgcgactcccacttccgcccttttggctctctgaccagcaccatggcggttggcaagaacaagcgccttacgaaaggcggcaaaaagggagccaagaagaaagtggttgatccattttctaagaaagattggtatgatgtgaaagcacctgctatgttcaatataagaaatattggaaagacgctcgtcaccaggacccaaggaaccaaaattgcatctgatggtctcaagggtcgtgtgtttgaagtgagtcttgctgatttgcagaatgatgaagttgcatttagaaaattcaagctgattactgaagatgttcagggtaaaaactgcctgactaacttccatggcatggatcttacccgtgacaaaatgtgttccatggtcaaaaaatggcagacaatgattgaagctcacgttgatgtcaagactaccgatggttacttgcttcgtctgttctgtgttggttttactaaaaaacgcaacaatcagatacggaagacctcttatgctcagcaccaacaggtccgccaaatccggaagaagatgatggaaatcatgacccgagaggtgcagacaaatgacttgaaagaagtggtcaataaattgattccagacagcattggaaaagacatagaaaaggcttgccaatctatttatcctctccatgatgtcttcgttagaaaagtaaaaatgctgaagaagcccaagtttgaattgggaaagctcatggagcttcatggtgaaggcagtagttctggaaaagccactggggacgagacaggtgctaaagttgaacgagctgatggatatgaaccaccagtccaagaatctgtttaaagttcagacttcaaatagtggcaaataaaaagtgctatttgtgatataaccccccgagggttggcctactc

SEQ ID NO: 321136 - DNA, 1136 bp, Homo sapiens
  misc_feature (1136)..(1136): n is a, c, g, or t
aacggctagtacgaggccgggtgttaatcggccgaggcctaagttctcgcgcgactcccacttccgcccttttggctctctgaccagcaccatggcggttggcaagaacaagcgccttacgaaaggcggcaaaaagggagccaagaagaaagtggttgatccattttctaagaaagattggtatgatgtgaaagcacctgctatgttcaatataagaaatattggaaagacgctcgtcaccaggacccaaggaaccaaaattgcatctgatggtctcaagggtcgtgtgtttgaagtgagtcttgctgatttgcagaatgatgaagttgcatttagaaaattcaagctgattactgaagatgttcagggtaaaaactgcctgactaacttccatggcatggatcttacccgtgacaaaatgtgttccatggtcaaaaaatggcagacaatgattgaagctcacgttgatgtcaagactaccgatggttacttgcttcgtctgttctgtgttggttttactaaaaaacgcaacaatcagatacggaagacctcttatgctcagcaccaacaggtccgccaaatccggaagaagatgatggaaatcatgacccgagaggtgcagacaaatgacttgaaagaagtggtcaataaattgattccagacagcattggaaaagacatagaaaaggcttgccaatctatttatcctctccatgatgtcttcgttagaaaagtaaaaatgctgaagaagcccaagtttgaattgggaaagctcatggagcttcatggtgaaggcagtagttctggaaaagccactggggacgagacaggtgctaaagttgaacgagctgatggatatgaaccaccagtccaagaatctgtttaaagttcagacttcaaatagtggcaaataaaaagtgctatttgtgaaaaaaaaaaaaaaaaaaaaaaaaaaaaaaaaaacccgggggccacatatggcggggggcgcgagaaacagcggggtatcgagaatggggccactgggtccaaaacgtgtctctgggaccaagttttctgtgtaccaaggggggaacctcggggggccccctaaaggggagcgcgaaaaattcagaaaacccggttaaccggtaagn

SEQ ID NO: 321137 - DNA, 969 bp, Homo sapiens
aacggctagtacgaggccgggtgttaatcggccgaggcctaagttctcgcgcgactcccacttccgcccttttggctctctgaccagcaccatggcggttggcaagaacaagcgccttacgaaaggcggcaaaaagggagccaagaagaaagtggttgatccattttctaagaaagattggtatgatgtgaaagcacctgctatgttcaatataagaaatattggaaagacgctcgtcaccaggacccaaggaaccaaaattgcatctgatggtctcaagggtcgtgtgtttgaagtgagtcttgctgatttgcagaatgatgaagttgcatttagaaaattcaagctgattactgaagatgttcagggtaaaaactgcctgactaacttccatggcatggatcttacccgtgacaaaatgtgttccatggtcaaaaaatggcagacaatgattgaagctcacgttgatgtcaagactaccgatggttacttgcttcgtctgttctgtgttggttttactaaaaaacgcaacaatcagatacggaagacctcttatgctcagcaccaacaggtccgccaaatccggaagaagatgatggaaatcatgacccgagaggtgcagacaaatgacttgaaagaagtggtcaataaattgattccagacagcattggaaaagacatagaaaaggcttgccaatctatttatcctctccatgatgtcttcgttagaaaagtaaaaatgctgaagaagcccaagtttgaattgggaaagctcatggagcttcatggtgaaggcagtagttctggaaaagccactggggacgagacaggtgctaaagttgaacgagctgatggatatgaaccaccagtccaagaatctgtttaaagttcagacttcaaatagtggcaaataaaaagtgctatttgtgaggctccgcgtgggcgcggggtggttcgtgggtctgtcgt

SEQ ID NO: 321138 - DNA, 1082 bp, Homo sapiens
aacggctagtacgaggccgggtgttaatcggccgaggcctaagttctcgcgcgactcccacttccgcccttttggctctctgaccagcaccatggcggttggcaagaacaagcgccttacgaaaggcggcaaaaagggagccaagaagaaagtgtaagtcgcgactgtcgtggcgtcttgctttttgggggtctgctggaatcggcgggctggtcctagatcgcggcgtaggccggatggcgaggattccagtcggattgtgcgggccgtggcgggttggtgcacccaggaacgcggcctggaggggttgatccattttctaagaaagattggtatgatgtgaaagcacctgctatgttcaatataagaaatattggaaagacgctcgtcaccaggacccaaggaaccaaaattgcatctgatggtctcaagggtcgtgtgtttgaagtgagtcttgctgatttgcagaatgatgaagttgcatttagaaaattcaagctgattactgaagatgttcagggtaaaaactgcctgactaacttccatggcatggatcttacccgtgacaaaatgtgttccatggtcaaaaaatggcagacaatgattgaagctcacgttgatgtcaagactaccgatggttacttgcttcgtctgttctgtgttggttttactaaaaaacgcaacaatcagatacggaagacctcttatgctcagcaccaacaggtccgccaaatccggaagaagatgatggaaatcatgacccgagaggtgcagacaaatgacttgaaagaagtggtcaataaattgattccagacagcattggaaaagacatagaaaaggcttgccaatctatttatcctctccatgatgtcttcgttagaaaagtaaaaatgctgaagaagcccaagtttgaattgggaaagctcatggagcttcatggtgaaggcagtagttctggaaaagccactggggacgagacaggtgctaaagttgaacgagctgatggatatgaaccaccagtccaagaatctgtttaaagttcagacttcaaatagtggcaaataaaaagtgctatttgtga

SEQ ID NO: 321139 - DNA, 1016 bp, Homo sapiens
aacggctagtacgaggccgggtgttaatcggccgaggcctaagttctcgcgcgactcccacttccgcccttttggctctctgaccagcaccatggcggttggcaagaacaagcgccttacgaaaggcggcaaaaagggagccaagaagaaagtgtaagtcgcgactgtcgtggcgtcttgctttttgggggtctgctggaatcggcgggctggtcctagatcgcggcgtaggccggatgggttgatccattttctaagaaagattggtatgatgtgaaagcacctgctatgttcaatataagaaatattggaaagacgctcgtcaccaggacccaaggaaccaaaattgcatctgatggtctcaagggtcgtgtgtttgaagtgagtcttgctgatttgcagaatgatgaagttgcatttagaaaattcaagctgattactgaagatgttcagggtaaaaactgcctgactaacttccatggcatggatcttacccgtgacaaaatgtgttccatggtcaaaaaatggcagacaatgattgaagctcacgttgatgtcaagactaccgatggttacttgcttcgtctgttctgtgttggttttactaaaaaacgcaacaatcagatacggaagacctcttatgctcagcaccaacaggtccgccaaatccggaagaagatgatggaaatcatgacccgagaggtgcagacaaatgacttgaaagaagtggtcaataaattgattccagacagcattggaaaagacatagaaaaggcttgccaatctatttatcctctccatgatgtcttcgttagaaaagtaaaaatgctgaagaagcccaagtttgaattgggaaagctcatggagcttcatggtgaaggcagtagttctggaaaagccactggggacgagacaggtgctaaagttgaacgagctgatggatatgaaccaccagtccaagaatctgtttaaagttcagacttcaaatagtggcaaataaaaagtgctatttgtga

SEQ ID NO: 321140 - DNA, 897 bp, Homo sapiens
aacggctagtacgaggccgggtgttaatcggccgaggcctaagttctcgcgcgactcccacttccgcccttttggctctctgaccagcaccatggcggttggcaagaacaagcgccttacgaaaggcggcaaaaagggagccaagaagaaagtggttgatccattttctaagaaagattggtatgatgtgaaagcacctgctatgttcaatataagaaatattggaaagacgctcgtcaccaggacccaaggaaccaaaattgcatctgatggtctcaagggtcgtgtgtttgaagtgagtcttgctgatttgcagaatgatgaagttgcatttagaaaattcaagctgattactgaagatgttcagggtaaaaactgcctgactaacttccatggcatggatcttacccgtgacaaaatgtgttccatggtcaaaaaatggcagacaatgattgaagctcacgttgatgtcaagactaccgatggttacttgcttcgtctgttctgtgttggttttactaaaaaacgcaacaatcagatacggaagacctcttatgctcagcaccaacaggtccgccaaatccggaagaagatgatggaaatcatgacccgagaggtgcagacaaatgacttgaaagaagtggtcaataaattgattccagacagcattggaaaagacatagaaaaggcttgccaatctatttatcctctccatgatgtcttcgttagaaaagtaaaaatgctgaagaagcccaagtttgaattgggaaagctcatggagcttcatggtgaaggcagtagttctggaaaagccactggggagcggcacatgggttgggggatcctaaagagtcgtgctgcatgcgtagggtaactgacgtgagcagacaagatccc

SEQ ID NO: 321141 - DNA, 982 bp, Homo sapiens
  misc_feature (982)..(982): n is a, c, g, or t
aacggctagtacgaggccgggtgttaatcggccgaggcctaagttctcgcgcgactcccacttccgcccttttggctctctgaccagcaccatggcggttggcaagaacaagcgccttacgaaaggcggcaaaaagggagccaagaagaaagtggttgatccattttctaagaaagattggtatgatgtgaaagcacctgctatgttcaatataagaaatattggaaagacgctcgtcaccaggacccaaggaaccaaaattgcatctgatggtctcaagggtcgtgtgtttgaagtgagtcttgctgatttgcagaatgatgaagttgcatttagaaaattcaagctgattactgaagatgttcagggtaaaaactgcctgactaacttccatggcatggatcttacccgtgacaaaatgtgttccatggtcaaaaaatggcagacaatgattgaagctcacgttgatgtcaagactaccgatggttacttgcttcgtctgttctgtgttggttttactaaaaaacgcaacaatcagatacggaagacctcttatgctcagcaccaacaggtccgccaaatccggaagaagatgatggaaatcatgacccgagaggtgcagacaaatgacttgaaagaagtggtcaataaattgattccagacagcattggaaaagacatagaaaaggcttgccaatctatttatcctctccatgatgtcttcgttagaaaagtaaaaatgctgaagaagcccaagtttgaatttgggaaagctcatggagcttcatggtgaggcggagtctggaaagcctggggccggacgggctagtgacgagcgtgggttgacccgtccgattgttagtcgactcctgggcaaaggcttgggaaaaacaaaaaaaaatggggcggcccattaaacgtggggccgaaagaattcaaaggggggtgccacggcgggaatgttgtaacacgcgcgcggtan

SEQ ID NO: 321142 - DNA, 638 bp, Homo sapiens
aacggctagtacgaggccgggtgttaatcggccgaggcctaagttctcgcgcgactcccacttccgcccttttggctctctgaccagcaccatggcggttggcaagaacaagcgccttacgaaaggcggcaaaaagggagccaagaagaaagtacaatgattgaagctcacgttgatgtcaagactaccgatggttacttgcttcgtctgttctgtgttggttttactaaaaaacgcaacaatcagatacggaagacctcttatgctcagcaccaacaggtccgccaaatccggaagaagatgatggaaatcatgacccgagaggtgcagacaaatgacttgaaagaagtggtcaataaattgattccagacagcattggaaaagacatagaaaaggcttgccaatctatttatcctctccatgatgtcttcgttagaaaagtaaaaatgctgaagaagcccaagtttgaattgggaaagctcatggagcttcatggtgaaggcagtagttctggaaaagccactggggacgagacaggtgctaaagttgaacgagctgatggatatgaaccaccagtccaagaatctgtttaaagttcagacttcaaatagtggcaaataaaaagtgctatttgtga

SEQ ID NO: 321143 - DNA, 742 bp, Homo sapiens
aacggctagtacgaggccgggtgttaatcggccgaggcctaagttctcgcgcgactcccacttccgcccttttggctctctgaccagcaccatggcggttggcaagaacaagcgccttacgaaaggcggcaaaaagggagccaagaagaaagtggttgatccattttctaagaaagattggtatgatgtgaaagcacctgctatgttcaatataagaaatattggaaagacgctcgtcaccaggacccaaggaaccaacaatgattgaagctcacgttgatgtcaagactaccgatggttacttgcttcgtctgttctgtgttggttttactaaaaaacgcaacaatcagatacggaagacctcttatgctcagcaccaacaggtccgccaaatccggaagaagatgatggaaatcatgacccgagaggtgcagacaaatgacttgaaagaagtggtcaataaattgattccagacagcattggaaaagacatagaaaaggcttgccaatctatttatcctctccatgatgtcttcgttagaaaagtaaaaatgctgaagaagcccaagtttgaattgggaaagctcatggagcttcatggtgaaggcagtagttctggaaaagccactggggacgagacaggtgctaaagttgaacgagctgatggatatgaaccaccagtccaagaatctgtttaaagttcagacttcaaatagtggcaaataaaaagtgctatttgtga

SEQ ID NO: 321144 - DNA, 727 bp, Homo sapiens
aacggctagtacgaggccgggtgttaatcggccgaggcctaagttctcgcgcgactcccacttccgcccttttggctctctgaccagcaccatggcggttggcaagaacaagcgccttacgaaaggcggcaaaaagggagccaagaagaaagtacaatgattgaagctcacgttgatgtcaagactaccgatggttacttgcttcgtctgttctgtgttggttttactaaaaaacgcaacaatcagatacggaagacctcttatgctcagcaccaacaggtccgccaaatccggaagaagatgatggaaatcatgacccgagaggtgcagacaaatgacttgaaagaagtggtcaataaattgattccagacagcattggaaaagacatagaaaaggcttgccaatctatttatcctctccatgatgtcttcgttagaaaagtaaaaatgctgaagaagcccaagtttgaattgggaaagctcatggagcttcatggtgaaggcagtagttctggaaaagccactggggacgagacaggtgctaaagttgaacgagctgatggatatgaaccaccagtccaagaatctgtttaaagttcagacttcaaatagtggcaaataaaaagtgctatttgtgaaaacaacaaacacaacaaccaaaacaacccccggagaccacccccacaccacctgcggcgccccaagggcgccacccgggccccccacg

SEQ ID NO: 321145 - DNA, 840 bp, Homo sapiens
aacggctagtacgaggccgggtgttaatcggccgaggcctaagttctcgcgcgactcccacttccgcccttttggctctctgaccagcaccatggcggttggcaagaacaagcgccttacgaaaggcggcaaaaagggagccaagaagaaagtggttgatccattttctaagaaagattggtatgatgtgaaagcacctgctatgttcaatataagaaatattggaaagacgctcgtcaccaggacccaaggaaccaaaattgcatctgatggtctcaagggtcgtgtgtttgaagtgagtcttgctgatttgcagaatgatgaagttgcatttagaaaattcaagctgattactgaagatgttcagggtaaaaactgcctgactaacttccatggcatggatcttacccgtgacaaaatgtgttccatggtcaaaaaatggcagacaatgattgaagctcacgttgatgtcaagactaccgatggttacttgcttcgtctgttctgtgttggttttactaaaaaacgcaacaatcagatacggaagacctcttatgctcagcaccaacaggtccgccaaatccggaagaagatgatggaaatcatgacccgagaggtgcagacaaatgacttgaaagaagtggtcaataaatttgggaaagctcatggagcttcatggtgaaggcagtagttctggaaaagccactggggacgagacaggtgctaaagttgaacgagctgatggatatgaaccaccagtccaagaatctgtttaaagttcagacttcaaatagtggcaaataaaaagtgctatttgtgatttgtgatggtttgcttctg

SEQ ID NO: 321146 - DNA, 1396 bp, Homo sapiens
aacggctagtacgaggccgggtgttaatcggccgaggcctaagttctcgcgcgactcccacttccgcccttttggctctctgaccagcaccatggcggttggcaagaacaagcgccttacgaaaggcggcaaaaagggagccaagaagaaagtggttgatccattttctaagaaagattggtatgatgtgaaagcacctgctatgttcaatataagaaatattggaaagacgctcgtcaccaggacccaaggaaccaaaattgcatctgatggtctcaagggtcgtgtgtttgaagtgagtcttgctgatttgcagaatgatgaagttgcatttagaaaattcaagctgattactgaagatgttcagggtaaaaactgcctgactaacttccatggcatggatcttacccgtgacaaaatgtgttccatggtcaaaaaatggcagacaatgattgaagctcacgttgatgtcaagactaccgatggttacttgcttcgtctgttctgtgttggttttactaaaaaacgcaacaatcagatacggaagacctcttatgctcagcaccaacaggtccgccaaatccggaagaagatgatggaaatcatgacccgagaggtgcagacaaatgacttgaaagaagtggtcaataaatttgggaaagctcatggagcttcatggtgaaggcagtagttctggaaaagccactggggacgagacaggtgctaaagttgaacgagctgatggatatgaaccaccagtccaagaatctgtttaaagttcagacttcaaatagtggcaaataaaaagtgctatttgtgaaaaaaaaaaaaaaaaaaaaaaaaaaaaaaaaaagagggggcggccgcgcccctaagagattttcccctcgcggggggccccagattcttcgcgcgcgtccccgagtttttttggggtaccaagggggcccccttaaaggagagagctccgtttattaataagcctagaggccacggtggaccccaccgtttttacacacagacggttcgggtgaagcggggaaacaaccctgctctaacccgtgggagaaatcctgtggcgcgaagaggaaccctcttatcttctcgggggggggtgggcaacctttatgtgcggcacacaacacctctaccctctgaacggagagatatttaaaggcgctctctatagggcggataaaatttatataaacacttgtttcaaaagcgcttgttatacacgcggcgtgtctaacaccattaagccggtcgccaaatatatgccctgggcccgtgccctgtgaaagaaactttttgtgggctatagcccgggaatttatttgactttttctgtgcaagacctctttttattcccccgggagcttcgtgtgcaaatacc

SEQ ID NO: 321147 - DNA, 693 bp, Homo sapiens
aacggctagtacgaggccgggtgttaatcggccgaggcctaagttctcgcgcgactcccacttccgcccttttggctctctgaccagcaccatggcggttggcaagaacaagcgccttacgaaaggcggcaaaaagggagccaagaagaaagtggttgatccattttctaagaaagattggtatgatgtgaaagcacctgctatgttcaatataagaaatattggaaagacgctcgtcaccaggacccaaggaaccaaaattgcatctgatggtctcaagggtcgtgtgtttgaagtgagtcttgctgatttgcagaatgatgaagttgcatttagaaaattcaagctgattactgaagatgttcagggtaaaaactgcctgactaacttccatggcatggatcttacccgtgacaaaatgtgttccatggtcaaaaaatggcagacaatgattgaagctcacgttgatgtcaagactaccgatggttacttgcttcgtctgttctgtgttggttttactaaaaaacgcaacaatcagatacggaagacctcttatgctcagcaccaacaggtccgccaaatccggaagaagatgatggaaatcatgacccgagaggtgcagacaaatgacttgaaagaagtggtcaataaatttattccagtaacagcttactttcgggtaccgagcttgaa

SEQ ID NO: 321148 - DNA, 948 bp, Homo sapiens
aacggctagtacgaggccgggtgttaatcggccgaggcctaagttctcgcgcgactcccacttccgcccttttggctctctgaccagcaccatggcggttggcaagaacaagcgccttacgaaaggcggcaaaaagggagccaagaagaaagtggttgatccattttctaagaaagattggtatgatgtgaaagcacctgctatgttcaatataagaaatattggaaagacgctcgtcaccaggacccaaggaaccaaaattgcatctgatggtctcaagggtcgtgtgtttgaagtgagtcttgctgatttgcagaatgatgaagttgcatttagaaaattcaagctgattactgaagatgttcagggtaaaaactgcctgactaacttccatggcatggatcttacccgtgacaaaatgtgttccatggtcaaaaaatggcagacaatgattgaagctcacgttgatgtcaagactaccgatggttacttgcttcgtctgttctgtgttggttttactaaaaaacgcaacaatcagatacggaagacctcttatgctcagcaccaacaggtccgccaaatccggaagaagatgatggcacgagcgataggaacatacatgatcgccgagcgacgggcacgacgacgatgagatccttgaacactgaaagcggtcaatacaagccgatggaccaagaacatgcatagcggccaagacacagaaacaacgagtttgccaatctaagtatgcctttccatatgtctttgttagaaaagatatctatgcatgatcgatgaccaaagttgatgatgctccgaccatacgctcttgcgagatttattggtgagacgtcagtcagtgtatgcacacagacgctatcgtcgctacgagataggtggagaagaggaacgagcgtgagaacctataaccacgtgctccaattgatt

SEQ ID NO: 321149 - DNA, 634 bp, Homo sapiens
aacggctagtacgaggccgggtgttaatcggccgaggcctaagttctcgcgcgactcccacttccgcccttttggctctctgaccagcaccatggcggttggcaagaacaagcgccttacgaaaggcggcaaaaagggagccaagaagaaagtggttgatccattttctaagaaagattggtatgatgtgaaagcacctgctatgttcaatataagaaatattggaaagacgctcgtcaccaggacccaaggaaccaaaattgcatctgatggtctcaagggtcgtgtgtttgaagtgagtcttgctgatttgcagaatgatgaagttgcatttagaaaattcaagctgattactgaagatgttcagggtaaaaactgcctgactaacttccatggcatggatcttacccgtgacaaaatgtgttccatggtcaaaaaatggcagacaatgattgaagctcacgttgatgtcaagactaccgatggttacttgcttcgtctgttctgtgttggttttactaaaaaacgcaacaatcagatacggaagacctcttatgctcagcaccaacaggtccgccaaatccggaagaagatgatggggggtgtggattagccgggggggcagcaatgcttg

SEQ ID NO: 321150 - DNA, 632 bp, Homo sapiens
aacggctagtacgaggccgggtgttaatcggccgaggcctaagttctcgcgcgactcccacttccgcccttttggctctctgaccagcaccatggcggttggcaagaacaagcgccttacgaaaggcggcaaaaagggagccaagaagaaagtggttgatccattttctaagaaagattggtatgatgtgaaagcacctgctatgttcaatataagaaatattggaaagacgctcgtcaccaggacccaaggaaccaacaatgattgaagctcacgttgatgtcaagactaccgatggttacttgcttcgtctgttctgtgttggttttactaaaaaacgcaacaatcagatacggaagacctcttatgctcagcaccaacaggtccgccaaatccggaagaagatgatggaaatcatgacccgagaggtgcagacaaatgacttgaaagaagtggtcaataaatttgggaaagctcatggagcttcatggtgaaggcagtagttctggaaaagccactggggacgagacaggtgctaaagttgaacgagctgatggatatgaaccaccagtccaagaatctgtttaaagttcagacttcaaatagtggcaaataaaaagtgctatttgtga

SEQ ID NO: 321151 - DNA, 315 bp, Homo sapiens
aacggctagtacgaggccgggtgttaatcggccgaggcctaagttctcgcgcgactcccacttccgcccttttggctctctgaccagcaccatggcggttggcaagaacaagcgccttacgaaaggcggcaaaaagggagccaagaagaaagtggttgatccattttctaagaaagattggtatgatgtgaaagcacctgctatgttcaatataagaaatattggaaagacgctcgtcaccaggacccaaggaaccaccaaattgctctgtgtctcaggcggagggctagccagagagctgaacagcacagacag

SEQ ID NO: 321152 - DNA, 418 bp, Homo sapiens
aaattgcatctgatggtctcaagggtcgtgtgtttgaagtgagtcttgctgatttgcagaatgatgaagttgcatttagaaaattcaagctgattactgaagatgttcagggtaaaaactgcctgactaacttccatggcatggatcttacccgtgacaaaatgtgttccatggtcaaaaaatggcaggtgagacccaaagttccttagagtggttgtgctatgggtgtttgaccaaggatagcatggtttgatgactggaaggagcaagttcattttatttatttattgagaccagtgaaatgtccacaaagttcattttaaatttttgttttcttgccgttgttgagtgctaactctggggttgccacaccatattttacttactatttaaatctaagatttaatagtggtgtatc

SEQ ID NO: 321153 - DNA, 988 bp, Homo sapiens
  misc_feature (899)..(899): n is a, c, g, or t
aacggctagtacgaggccgggtgttaatcggccgagagcaccatggcggttggcaagaacaagcgccttacgaaaggcggcaaaaagggagccaagaagaaagtggttgatccattttctaagaaagattggtatgatgtgaaagcacctgctatgttcaatataagaaatattggaaagacgctcgtcaccaggacccaaggaaccaaaattgcatctgatggtctcaagggtcgtgtgtttgaagtgagtcttgctgatttgcagaatgatgaagttgcatttagaaaattcaagctgattactgaagatgttcagggtaaaaactgcctgactaacttccatggcatggatcttacccgtgacaaaatgtgttccatggtcaaaaaatggcagacaatgattgaagctcacgttgatgtcaagactaccgatggttacttgcttcgtctgttctgtgttggttttactaaaaaacgcaacaatcagatacggaagacctcttatgctcagcaccaacaggtccgccaaatccggaagaagatgatggaaatcatgacccgagaggtgcagacaaatgacttgaaagaagtggtcaataaattgattccagacagcattggaaaagacatagaaaaggcttgccaatctatttatcctctccatgatgtcttcgttagaaaagtaaaaatgctgaagaagcccaagtttgaattgggaaagctcatggagcttcatggtgaaggcagtagttctggaaaagccactggggacgagacaggtgctaaagttgaacgagctgatggatatgaaccaccagtccaagaatctgtttaaagttcagacttcaaatagtggcaaataaaaagtgctatttgtgacaacaaaaaacaaaacanaaacccgggctcttgggggggaaacaggtaaaaggcactgttatgttccggaccctttttaagggaaagcggccaaagggaatacaacg

SEQ ID NO: 321154 - DNA, 907 bp, Homo sapiens
atattgtcataccatagtaggaagaaaaacctttatttggaatatacaaacttacagtagtgagcaccatggcggttggcaagaacaagcgccttacgaaaggcggcaaaaagggagccaagaagaaagtggttgatccattttctaagaaagattggtatgatgtgaaagcacctgctatgttcaatataagaaatattggaaagacgctcgtcaccaggacccaaggaaccaaaattgcatctgatggtctcaagggtcgtgtgtttgaagtgagtcttgctgatttgcagaatgatgaagttgcatttagaaaattcaagctgattactgaagatgttcagggtaaaaactgcctgactaacttccatggcatggatcttacccgtgacaaaatgtgttccatggtcaaaaaatggcagacaatgattgaagctcacgttgatgtcaagactaccgatggttacttgcttcgtctgttctgtgttggttttactaaaaaacgcaacaatcagatacggaagacctcttatgctcagcaccaacaggtccgccaaatccggaagaagatgatggaaatcatgacccgagaggtgcagacaaatgacttgaaagaagtggtcaataaattgattccagacagcattggaaaagacatagaaaaggcttgccaatctatttatcctctccatgatgtcttcgttagaaaagtaaaaatgctgaagaagcccaagtttgaattgggaaagctcatggagcttcatggtgaaggcagtagttctggaaaagccactggggacgagacaggtgctaaagttgaacgagctgatggatatgaaccaccagtccaagaatctgtttaaagttcagacttcaaatagtggcaaataaaaagtgctatttgtga

SEQ ID NO: 321155 - DNA, 973 bp, Homo sapiens
  misc_feature (891)..(891): n is a, c, g, or t
  misc_feature (940)..(940): n is a, c, g, or t
  misc_feature (944)..(944): n is a, c, g, or t
  misc_feature (946)..(946): n is a, c, g, or t
  misc_feature (948)..(948): n is a, c, g, or t
  misc_feature (952)..(952): n is a, c, g, or t
  misc_feature (959)..(960): n is a, c, g, or t
  misc_feature (963)..(963): n is a, c, g, or t
  misc_feature (968)..(968): n is a, c, g, or t
ttatttcagtgctgggctggcgcttacttgtacgttacgtgtgccatcgatcctgccatattctacacggcggcaaaaagggagccaagaagaaagtggttgatccattttctaagaaagattggtatgatgtgaaagcacctgctatgttcaatataagaaatattggaaagacgctcgtcaccaggacccaaggaaccaaaattgcatctgatggtctcaagggtcgtgtgtttgaagtgagtcttgctgatttgcagaatgatgaagttgcatttagaaaattcaagctgattactgaagatgttcagggtaaaaactgcctgactaacttccatggcatggatcttacccgtgacaaaatgtgttccatggtcaaaaaatggcagacaatgattgaagctcacgttgatgtcaagactaccgatggttacttgcttcgtctgttctgtgttggttttactaaaaaacgcaacaatcagatacggaagacctcttatgctcagcaccaacaggtccgccaaatccggaagaagatgatggaaatcatgacccgagaggtgcagacaaatgacttgaaagaagtggtcaataaattgattccagacagcattggaaaagacatagaaaaggcttgccaatctatttatcctctccatgatgtcttcgttagaaaagtaaaaatgctgaagaagcccaagtttgaattgggaaagctcatggagcttcatggtgaaggcagtagttctggaaaagccactggggacgagacaggtgctaaagttgaacgagctgatggatatgaaccaccagtccaagaatctgtttaaagttcagacttcaaatagtggcaaataaaaagtgctatttgtgacacaacaaaaaaaaaanaaaaaaaaaaaatttggggggggctggggcctgggaaaaagtttttaancccncncngtgnggggcgnnggncccangtagg

SEQ ID NO: 321156 - DNA, 557 bp, Homo sapiens
  misc_feature (6)..(6): n is a, c, g, or t
  misc_feature (48)..(48): n is a, c, g, or t
gcggcngcctactactactactaaattcgcggccgcgtcgacaaaatntgttccatggtcaaaaaatggcagacaatgattgaagctcacgttgatgtcaagactaccgatggttacttgcttcgtctgttctgtgttggttttactaaaaaacgcaacaatcagatacggaagacctcttatgctcagcaccaacaggtccgccaaatccggaagaagatgatggaaatcatgacccgagaggtgcagacaaatgacttgaaagaagtggtcaataaattgattccagacagcattggaaaagacatagaaaaggcttgccaatctatttatcctctccatgatgtcttcgttagaaaagtaaaaatgctgaagaagcccaagtttgaattgggaaagctcatggagcttcatggtgaaggcagtagttctggaaaagccactggggacgagacaggtgctaaagttgaacgagctgatggatatgaaccaccagtccaagaatctgtttaaagttcagacttcaaatagtggcaaataaaaagtgctatttgtga

SEQ ID NO: 321157 - DNA, 874 bp, Homo sapiens
ttatttcagtgctgggctggcgcttacttgtacgttacgtgtgccatcgatcctgccatattctacacggcggcaaaaagggagccaagaagaaagtggttgatccattttctaagaaagattggtatgatgtgaaagcacctgctatgttcaatataagaaatattggaaagacgctcgtcaccaggacccaaggaaccaaaattgcatctgatggtctcaagggtcgtgtgtttgaagtgagtcttgctgatttgcagaatgatgaagttgcatttagaaaattcaagctgattactgaagatgttcagggtaaaaactgcctgactaacttccatggcatggatcttacccgtgacaaaatgtgttccatggtcaaaaaatggcagacaatgattgaagctcacgttgatgtcaagactaccgatggttacttgcttcgtctgttctgtgttggttttactaaaaaacgcaacaatcagatacggaagacctcttatgctcagcaccaacaggtccgccaaatccggaagaagatgatggaaatcatgacccgagaggtgcagacaaatgacttgaaagaagtggtcaataaattgattccagacagcattggaaaagacatagaaaaggcttgccaatctatttatcctctccatgatgtcttcgttagaaaagtaaaaatgctgaagaagcccaagtttgaattgggaaagctcatggagcttcatggtgaaggcagtagttctggaaaagccactggggacgagacaggtgctaaagttgaacgagctgatggatatgaaccaccagtccaagaatctgtttaaagttcagacttcaaatagtggcaaataaaaagtgctatttgtga

SEQ ID NO: 321158 - DNA, 980 bp, Homo sapiens
aacggctagtacgaggccgggtgttaatcggccgaggcctaagttctcgcgcgactcccacttccgcccttttggctctctgaccagcaccatggcggttggcaagaacaagcgccttacgaaaggcggcaaaaagggagccaagaagaaagtggttgatccattttctaagaaagattggtatgatgtgaaagcacctgctatgttcaatataagaaatattggaaagacgctcgtcaccaggacccaaggaaccaaaattgcatctgatggtctcaagggtcgtgtgtttgaagtgagtcttgctgatttgcagaatgatgaagttgcatttagaaaattcaagctgattactgaagatgttcagggtaaaaactgcctgactaacttccatggcatggatcttacccgtgacaaaatgtgttccatggtcaaaaaatggcagacaatgattgaagctcacgttgatgtcaagactaccgatggttacttgcttcgtctgttctgtgttggttttactaaaaaacgcaacaatcagatacggaagacctcttatgctcagcaccaacaggtccgccaaatccggaagaagatgatggaaatcatgacccgagaggtgcagacaaatgacttgaaagaagtggtcaataaattgattccagacagcattggaaaagacatagaaaaggcttgccaatctatttatcctctccatgatgtcttcgttagaaaagtaaaaatgctgaagaagcccaagtttgaattgggaaagctcatggagcttcatggtgaaggcagtagttctggaaaagccactggggacgagacaggtgctaaagttgaacgagctgatggatatgaaccaccagtccaagaatctgtttaaagttcagacttcaaatagtggcaaataaaaagtgctatttgtgaaaaacaaaaaaaaaaaccggaggacatattggggggggaaaaagtagtga

SEQ ID NO: 321159 - DNA, 1244 bp, Homo sapiens
aacggctagtacgaggccgggtgttaatcggccgaggcctaagttctcgcgcgactcccacttccgcccttttggctctctgaccagcaccatggcggttggcaagaacaagcgccttacgaaaggcggcaaaaagggagccaagaagaaagtggttgatccattttctaagaaagattggtatgatgtgaaagcacctgctatgttcaatataagaaatattggaaagacgctcgtcaccaggacccaaggaaccaaaattgcatctgatggtctcaagggtcgtgtgtttgaagtgagtcttgctgatttgcagaatgatgaagttgcatttagaaaattcaagctgattactgaagatgttcagggtaaaaactgcctgactaacttccatggcatggatcttacccgtgacaaaatgtgttccatggtcaaaaaatggcagacaatgattgaagctcacgttgatgtcaagactaccgatggttacttgcttcgtctgttctgtgttggttttactaaaaaacgcaacaatcagatacggaagacctcttatgctcagcaccaacaggtccgccaaatccggaagaagatgatggaaatcatgacccgagaggtgcagacaaatgacttgaaagaagtggtcaataaattgattccagacagcattggaaaagacatagaaaaggcttgccaatctatttatcctctccatgatgtcttcgttagaaaagtaaaaatgctgaagaagcccaagtttgaattgggaaagctcatggagcttcatggtgaaggcagtagttctggaaaagccactggggacgagacaggtgctaaagttgaacgagctgatggatatgaaccaccagtccaagaatctgtttaaagttcagacttcaaatagtggcaaataaaaagtgctatttgtgaaaacaaaacaaaaacaacaaaaaaaaaaaaaaaaaaaaaaaaaaaaaggggggggggggaaaaatttcccggggggggcccatttggggaaccccaggttttttggtacaagggggggccaaatgggggggggatataaaagaggggccggggggggggtttaaaacaggtggtggcgggaaaatgtctctgtgggaatttgtgggaggacctatttgggggggaatattgtggaagactctagaaaattaagtcagggaaatatactagggttagggtgacaggattcgtggggaatgtcgagatattgaata

SEQ ID NO: 321160 - DNA, 998 bp, Homo sapiens
  misc_feature (954)..(954): n is a, c, g, or t
aacggctagtacgaggccgggtgttaatcggccgaggcctaagttctcgcgcgactcccacttccgcccttttggctctctgaccagcaccatggcggttggcaagaacaagcgccttacgaaaggcggcaaaaagggagccaagaagaaagtggttgatccattttctaagaaagattggtatgatgtgaaagcacctgctatgttcaatataagaaatattggaaagacgctcgtcaccaggacccaaggaaccaaaattgcatctgatggtctcaagggtcgtgtgtttgaagtgagtcttgctgatttgcagaatgatgaagttgcatttagaaaattcaagctgattactgaagatgttcagggtaaaaactgcctgactaacttccatggcatggatcttacccgtgacaaaatgtgttccatggtcaaaaaatggcagacaatgattgaagctcacgttgatgtcaagactaccgatggttacttgcttcgtctgttctgtgttggttttactaaaaaacgcaacaatcagatacggaagacctcttatgctcagcaccaacaggtccgccaaatccggaagaagatgatggaaatcatgacccgagaggtgcagacaaatgacttgaaagaagtggtcaataaattgattccagacagcattggaaaagacatagaaaaggcttgccaatctatttatcctctccatgatgtcttcgttagaaaagtaaaaatgctgaagaagcccaagtttgaattgggaaagctcatggagcttcatggtgaaggcagtagttctggaaaagccactggggacgagacaggtgctaaagttgaacgagctgatggatatgaaccaccagtccaagaatctgtttaaagttcagacttcaaatagtggcaaataaaaagtgctatttgtgacttcgtggaacacaacacaaaccnggggctttttggggggaaacgggcagggcgggcactgttccgcc

SEQ ID NO: 321161 - DNA, 1207 bp, Homo sapiens
  misc_feature (952)..(952): n is a, c, g, or t
  misc_feature (956)..(956): n is a, c, g, or t
  misc_feature (1197)..(1198): n is a, c, g, or t
aacggctagtacgaggccgggtgttaatcggccgaggcctaagttctcgcgcgactcccacttccgcccttttggctctctgaccagcaccatggcggttggcaagaacaagcgccttacgaaaggcggcaaaaagggagccaagaagaaagtggttgatccattttctaagaaagattggtatgatgtgaaagcacctgctatgttcaatataagaaatattggaaagacgctcgtcaccaggacccaaggaaccaaaattgcatctgatggtctcaagggtcgtgtgtttgaagtgagtcttgctgatttgcagaatgatgaagttgcatttagaaaattcaagctgattactgaagatgttcagggtaaaaactgcctgactaacttccatggcatggatcttacccgtgacaaaatgtgttccatggtcaaaaaatggcagacaatgattgaagctcacgttgatgtcaagactaccgatggttacttgcttcgtctgttctgtgttggttttactaaaaaacgcaacaatcagatacggaagacctcttatgctcagcaccaacaggtccgccaaatccggaagaagatgatggaaatcatgacccgagaggtgcagacaaatgacttgaaagaagtggtcaataaattgattccagacagcattggaaaagacatagaaaaggcttgccaatctatttatcctctccatgatgtcttcgttagaaaagtaaaaatgctgaagaagcccaagtttgaattgggaaagctcatggagcttcatggtgaaggcagtagttctggaaaagccactggggacgagacaggtgctaaagttgaacgagctgatggatatgaaccaccagtccaagaatctgtttaaagttcagacttcaaatagtggcaaataaaaagtgctatttgtgacacgactcataggggataaaangccntgggcggttcacaaaaaaaaaccgggtctattcgggggggaaaagttgaaaggacagggtaaatgtgtttggacccttttgttgaaggggaataggggcccaaagagggtaataggagatgagtatttcatcatacatacactaaaaacacagaagaagataagaatacataaaacaaagaaaagacgagagaataaggcaagagagcataagaaagcaacaaaagaagagaaatgagggnnggctactat

SEQ ID NO: 321162 - DNA, 983 bp, Homo sapiens
  misc_feature (942)..(942): n is a, c, g, or t
aacggctagtacgaggccgggtgttaatcggccgaggcctaagttctcgcgcgactcccacttccgcccttttggctctctgaccagcaccatggcggttggcaagaacaagcgccttacgaaaggcggcaaaaagggagccaagaagaaagtggttgatccattttctaagaaagattggtatgatgtgaaagcacctgctatgttcaatataagaaatattggaaagacgctcgtcaccaggacccaaggaaccaaaattgcatctgatggtctcaagggtcgtgtgtttgaagtgagtcttgctgatttgcagaatgatgaagttgcatttagaaaattcaagctgattactgaagatgttcagggtaaaaactgcctgactaacttccatggcatggatcttacccgtgacaaaatgtgttccatggtcaaaaaatggcagacaatgattgaagctcacgttgatgtcaagactaccgatggttacttgcttcgtctgttctgtgttggttttactaaaaaacgcaacaatcagatacggaagacctcttatgctcagcaccaacaggtccgccaaatccggaagaagatgatggaaatcatgacccgagaggtgcagacaaatgacttgaaagaagtggtcaataaattgattccagacagcattggaaaagacatagaaaaggcttgccaatctatttatcctctccatgatgtcttcgttagaaaagtaaaaatgctgaagaagcccaagtttgaattgggaaagctcatggagcttcatggtgaaggcagtagttctggaaaagccactggggacgagacaggtgctaaagttgaacgagctgatggatatgaaccaccagtccaagaatctgtttaaagttcagacttcaaatagtggcaaataaaaagtgctatttgtgaaacaacacacanacacaaaaacccggggcctataaatccaggagtccgcacac

SEQ ID NO: 321163 - DNA, 1512 bp, Homo sapiens
  misc_feature (1006)..(1006): n is a, c, g, or t
  misc_feature (1008)..(1008): n is a, c, g, or t
  misc_feature (1012)..(1012): n is a, c, g, or t
aacggctagtacgaggccgggtgttaatcggccgaggcctaagttctcgcgcgactcccacttccgcccttttggctctctgaccagcaccatggcggttggcaagaacaagcgccttacgaaaggcggcaaaaagggagccaagaagaaagtggttgatccattttctaagaaagattggtatgatgtgaaagcacctgctatgttcaatataagaaatattggaaagacgctcgtcaccaggacccaaggaaccaaaattgcatctgatggtctcaagggtcgtgtgtttgaagtgagtcttgctgatttgcagaatgatgaagttgcatttagaaaattcaagctgattactgaagatgttcagggtaaaaactgcctgactaacttccatggcatggatcttacccgtgacaaaatgtgttccatggtcaaaaaatggcagacaatgattgaagctcacgttgatgtcaagactaccgatggttacttgcttcgtctgttctgtgttggttttactaaaaaacgcaacaatcagatacggaagacctcttatgctcagcaccaacaggtccgccaaatccggaagaagatgatggaaatcatgacccgagaggtgcagacaaatgacttgaaagaagtggtcaataaattgattccagacagcattggaaaagacatagaaaaggcttgccaatctatttatcctctccatgatgtcttcgttagaaaagtaaaaatgctgaagaagcccaagtttgaattgggaaagctcatggagcttcatggtgaaggcagtagttctggaaaagccactggggacgagacaggtgctaaagttgaacgagctgatggatatgaaccaccagtccaagaatctgtttaaagttcagacttcaaatagtggcaaataaaaagtgctatttgtgaaaaaaaaaaaaaaaaaaaaaaaaaaaaaaaaaaaaaaaaaaaaaaaaaaaaaaaaaaaaaaaaaaaaaaagggggngncgcnccaaaaaatccccccggggggcgccccatccgccccccccccttttgttttcaaagggggccccccaaagggggggttataatacacatcgcaacgaggcggcggcccgcgtttaataacaacagccgtttggtggctgatgagaacataactgcgccctagtcctggtgcgatcaactcttgtggagaagagcaagcccccaattatctggtggggggggggagcgccaaaaaacatgtggtgggggcgcccaacaaccaaccccatcagaagaagtattatatacggcgcgcctctgtgaggagagaaacaatatcaacaactctcagacgcggggggtctatatcgggggtggggtaacaaccaacacggtacaatacatcatttcgcctgtggcggctgaaagaaaaacgtgttcgtgctgctcacacgagagagagttatctctatttcagagaaatttttttcacgcggggcggtgtggtgattaaaaactgac

SEQ ID NO: 321164 - DNA, 1455 bp, Homo sapiens
aacggctagtacgaggccgggtgttaatcggccgaggcctaagttctcgcgcgactcccacttccgcccttttggctctctgaccagcaccatggcggttggcaagaacaagcgccttacgaaaggcggcaaaaagggagccaagaagaaagtggttgatccattttctaagaaagattggtatgatgtgaaagcacctgctatgttcaatataagaaatattggaaagacgctcgtcaccaggacccaaggaaccaaaattgcatctgatggtctcaagggtcgtgtgtttgaagtgagtcttgctgatttgcagaatgatgaagttgcatttagaaaattcaagctgattactgaagatgttcagggtaaaaactgcctgactaacttccatggcatggatcttacccgtgacaaaatgtgttccatggtcaaaaaatggcagacaatgattgaagctcacgttgatgtcaagactaccgatggttacttgcttcgtctgttctgtgttggttttactaaaaaacgcaacaatcagatacggaagacctcttatgctcagcaccaacaggtccgccaaatccggaagaagatgatggaaatcatgacccgagaggtgcagacaaatgacttgaaagaagtggtcaataaattgattccagacagcattggaaaagacatagaaaaggcttgccaatctatttatcctctccatgatgtcttcgttagaaaagtaaaaatgctgaagaagcccaagtttgaattgggaaagctcatggagcttcatggtgaaggcagtagttctggaaaagccactggggacgagacaggtgctaaagttgaacgagctgatggatatgaaccaccagtccaagaatctgtttaaagttcagacttcaaatagtggcaaataaaaagtgctatttgtgagtgcaaaaaaaaaaatgaatggatagaaaagaacagaaaaaaaatatagataacgaaaaaaggaggagggggggctatagagataatagcgaggggagggaccaatatatggtgggagacacgtttgtttgagaacacagacgagggccaccaaaaaaataagaagccgctgcatcataaaacagagacagcaagcggcgcagcacagagtaaacacagccagtcgcgacacatggcgaacacagaggctagaacaggggacgggaccctttggggacaaaagaagaaacacaacaagtacgagcggagggggcacacaacaaataagcagagcccaccacaacccacccgaaagagaaataaagaacccacgtagaggggcgaaaaaaaacaaacacactaaagcgataagtaaacgggtggagctaagtaacacaaagcgccgcagaacgcgcgtgacaagcacaaagaaaagtacacggacagccaacgcaggaaatagaataagtgaggcagacagcgttg

SEQ ID NO: 321165 - DNA, 960 bp, Homo sapiens
aacggctagtacgaggccgggtgttaatcggccgaggcctaagttctcgcgcgactcccacttccgcccttttggctctctgaccagcaccatggcggttggcaagaacaagcgccttacgaaaggcggcaaaaagggagccaagaagaaagtggttgatccattttctaagaaagattggtatgatgtgaaagcacctgctatgttcaatataagaaatattggaaagacgctcgtcaccaggacccaaggaaccaaaattgcatctgatggtctcaagggtcgtgtgtttgaagtgagtcttgctgatttgcagaatgatgaagttgcatttagaaaattcaagctgattactgaagatgttcagggtaaaaactgcctgactaacttccatggcatggatcttacccgtgacaaaatgtgttccatggtcaaaaaatggcagacaatgattgaagctcacgttgatgtcaagactaccgatggttacttgcttcgtctgttctgtgttggttttactaaaaaacgcaacaatcagatacggaagacctcttatgctcagcaccaacaggtccgccaaatccggaagaagatgatggaaatcatgacccgagaggtgcagacaaatgacttgaaagaagtggtcaataaattgattccagacagcattggaaaagacatagaaaaggcttgccaatctatttatcctctccatgatgtcttcgttagaaaagtaaaaatgctgaagaagcccaagtttgaattgggaaagctcatggagcttcatggtgaaggcagtagttctggaaaagccactggggacgagacaggtgctaaagttgaacgagctgatggatatgaaccaccagtccaagaatctgtttaaagttcagacttcaaatagtggcaaataaaaagtgctatttgtgaaagttaacggtaggagagacattgggatcc

SEQ ID NO: 321166 - DNA, 988 bp, Homo sapiens
aacggctagtacgaggccgggtgttaatcggccgaggcctaagttctcgcgcgactcccacttccgcccttttggctctctgaccagcaccatggcggttggcaagaacaagcgccttacgaaaggcggcaaaaagggagccaagaagaaagttgaaaaatacagtaagaattgatctgcaatggaacttaagcatcttcttaaaatccagggttgatccattttctaagaaagattggtatgatgtgaaagcacctgctatgttcaatataagaaatattggaaagacgctcgtcaccaggacccaaggaaccaaaattgcatctgatggtctcaagggtcgtgtgtttgaagtgagtcttgctgatttgcagaatgatgaagttgcatttagaaaattcaagctgattactgaagatgttcagggtaaaaactgcctgactaacttccatggcatggatcttacccgtgacaaaatgtgttccatggtcaaaaaatggcagacaatgattgaagctcacgttgatgtcaagactaccgatggttacttgcttcgtctgttctgtgttggttttactaaaaaacgcaacaatcagatacggaagacctcttatgctcagcaccaacaggtccgccaaatccggaagaagatgatggaaatcatgacccgagaggtgcagacaaatgacttgaaagaagtggtcaataaattgattccagacagcattggaaaagacatagaaaaggcttgccaatctatttatcctctccatgatgtcttcgttagaaaagtaaaaatgctgaagaagcccaagtttgaattgggaaagctcatggagcttcatggtgaaggcagtagttctggaaaagccactggggacgagacaggtgctaaagttgaacgagctgatggatatgaaccaccagtccaagaatctgtttaaagttcagacttcaaatagtggcaaataaaaagtgctatttgtga

SEQ ID NO: 321167 - DNA, 993 bp, Homo sapiens
  misc_feature (313)..(313): n is a, c, g, or t
  misc_feature (315)..(315): n is a, c, g, or t
  misc_feature (327)..(327): n is a, c, g, or t
aacggctagtacgaggccgggtgttaatcggccgaggcctaagttctcgcgcgactcccacttccgcccttttggctctctgaccagcaccatggcggttggcaagaacaagcgccttacgaaaggcggcaaaaagggagccaagaagaaagtggttgatccattttctaagaaagattggtatgatgtgaaagcacctgctatgttcaatataagaaatattggaaagacgctcgtcaccaggacccaaggaaccaaagagttgggcattcttggaatgggttcgtcaaaaggggattcgggtggttagttntntggaaaaacggnttgggaaagggttttcctttggcttggaatttttgggccagaaaatgggatgcaaagttggcattgtagcagaaaattcaagctgattactgaagatgttcagggtaaaaactgcctgactaacttccatggcatggatcttacccgtgacaaaatgtgttccatggtcaaaaaatggcagacaatgattgaagctcacgttgatgtcaagactaccgatggttacttgcttcgtctgttctgtgttggttttactaaaaaacgcaacaatcagatacggaagacctcttatgctcagcaccaacaggtccgccaaatccggaagaagatgatggaaatcatgacccgagaggtgcagacaaatgacttgaaagaagtggtcaataaattgattccagacagcattggaaaagacatagaaaaggcttgccaatctatttatcctctccatgatgtcttcgttagaaaagtaaaaatgctgaagaagcccaagtttgaattgggaaagctcatggagcttcatggtgaaggcagtagttctggaaaagccactggggacgagacaggtgctaaagttgaacgagctgatggatatgaaccaccagtccaagaatctgtttaaagttcagacttcaaatagtggcaaataaaaagtgctatttgtga

SEQ ID NO: 321168 - DNA, 1628 bp, Homo sapiens
aacggctagtacgaggccgggtgttaatcggccgaggcctaagttctcgcgcgactcccacttccgcccttttggctctctgaccagcaccatggcggttggcaagaacaagcgccttacgaaaggcggcaaaaagggagccaagaagaaagtgtaagtcgcgactgtcgtggcgtcttgctttttgggggtctgctggaatcggcgggctggtcctagatcgcggcgtaggccggatggcgaggattccagtcggattgtgcgggccgtggcgggttggtgcacccaggaacgcggcctggagggtcggtgttgagtagcggcagggttgatccattttctaagaaagattggtatgatgtgaaagcacctgctatgttcaatataagaaatattggaaagacgctcgtcaccaggacccaaggaaccaaaattgcatctgatggtctcaagggtcgtgtgtttgaagtgagtcttgctgatttgcagaatgatgaagttgcatttagaaaattcaagctgattactgaagatgttcagggtaaaaactgcctgactaacttccatggcatggatcttacccgtgacaaaatgtgttccatggtcaaaaaatggcagacaatgattgaagctcacgttgatgtcaagactaccgatggttacttgcttcgtctgttctgtgttggttttactaaaaaacgcaacaatcagatacggaagacctcttatgctcagcaccaacaggtccgccaaatccggaagaagatgatggaaatcatgacccgagaggtgcagacaaatgacttgaaagaagtggtcaataaattgattccagacagcattggaaaagacatagaaaaggcttgccaatctatttatcctctccatgatgtcttcgttagaaaagtaaaaatgctgaagaagcccaagtttgaattgggaaagctcatggagcttcatggtgaaggcagtagttctggaaaagccactggggacgagacaggtgctaaagttgaacgagctgatggatatgaaccaccagtccaagaatctgtttaaagttcagacttcaaatagtggcaaataaaaagtgctatttgtgagtgcaaaaaaaaaaatgaatggatagaaaagaacagaaaaaaaatatagataacgaaaaaaggaggagggggggctatagagataatagcgaggggagggaccaatatatggtgggagacacgtttgtttgagaacacagacgagggccaccaaaaaaataagaagccgctgcatcataaaacagagacagcaagcggcgcagcacagagtaaacacagccagtcgcgacacatggcgaacacagaggctagaacaggggacgggaccctttggggacaaaagaagaaacacaacaagtacgagcggagggggcacacaacaaataagcagagcccaccacaacccacccgaaagagaaataaagaacccacgtagaggggcgaaaaaaaacaaacacactaaagcgataagtaaacgggtggagctaagtaacacaaagcgccgcagaacgcgcgtgacaagcacaaagaaaagtacacggacagccaacgcaggaaatagaataagtgaggcagacagcgttg

SEQ ID NO: 321169 - DNA, 1027 bp, Homo sapiens
  misc_feature (518)..(518): n is a, c, g, or t
aacggctagtacgaggccgggtgttaatcggccgaggcctaagttctcgcgcgactcccacttccgcccttttggctctctgaccagcaccatggcggttggcaagaacaagcgccttacgaaaggcggcaaaaagggagccaagaagaaagtggttgatccattttctaagaaagattggtatgatgtgaaagcacctgctatgttcaatataagaaatattggaaagacgctcgtcaccaggacccaaggaaccaaaattgcatctgatggtctcaagggtcgtgtgtttgaagtgagtcttgctgatttgcagaatgatgaagttgcatttataaggaaaataatttccaaaaaggcttcgacttctgaaccttccgcacaccggaattcgctctccacgcgcgctcacacaaaaaccttaggacgcctttgggaaactttaaacacaccattataacacccacattaggacggacacaaattggggaaactacctataaccccgtgacaaaatntgttccatggtcaaaaaatggcagacaatgattgaagctcacgttgatgtcaagactaccgatggttacttgcttcgtctgttctgtgttggttttactaaaaaacgcaacaatcagatacggaagacctcttatgctcagcaccaacaggtccgccaaatccggaagaagatgatggaaatcatgacccgagaggtgcagacaaatgacttgaaagaagtggtcaataaattgattccagacagcattggaaaagacatagaaaaggcttgccaatctatttatcctctccatgatgtcttcgttagaaaagtaaaaatgctgaagaagcccaagtttgaattgggaaagctcatggagcttcatggtgaaggcagtagttctggaaaagccactggggacgagacaggtgctaaagttgaacgagctgatggatatgaaccaccagtccaagaatctgtttaaagttcagacttcaaatagtggcaaataaaaagtgctatttgtga

SEQ ID NO: 321170 - DNA, 875 bp, Homo sapiens
aacggctagtacgaggccgggtgttaatcggccgaggcctaagttctcgcgcgactcccacttccgcccttttggctctctgaccagcaccatggcggttggcaagaacaagcgccttacgaaaggcggcaaaaagggagccaagaagaaagtggttgatccattttctaagaaagattggtatgatgtgaaagcacctgctatgttcaatataagaaatattggaaagacgctcgtcaccaggacccaaggaaccaaaattgcatctgatggtctcaagggtcgtgtgtttgaagtgagtcttgctgatttgcagaatgatgaagttgcatttagaaaattcaagctgattactgaagatgttcagggtaaaaactgcctgactaacttccatggcatggatcttacccgtgacaaaatgtgttccatggtcaaaaaatggcagacaatgattgaagctcacgttgatgtcaagactaccgatggttacttgcttcgtctgttctgtgttggttttactaaaaaacgcaacaatcagatacggaagacctcttatgctcagcaccaacaggtccgccaaatccggaagaagatgatggaaatcatgacccgagaggtgcagacaaatgacttgaaagaagtggtcaataaattgattccagacagcattggaaaagacatagaaaaggcttgccaatctatttatcctctccatgatgtcttcgttagaaaagtgaaggcagtagttctggaaaagccactggggacgagacaggtgctaaagttgaacgagctgatggatatgaaccaccagtccaagaatctgtttaaagttcagacttcaaatagtggcaaataaaaagtgctatttgtga

SEQ ID NO: 321171 - DNA, 1197 bp, Homo sapiens
aacggctagtacgaggccgggtgttaatcggccgaggcctaagttctcgcgcgactcccacttccgcccttttggctctctgaccagcaccatggcggttggcaagaacaagcgccttacgaaaggcggcaaaaagggagccaagaagaaagtggttgatccattttctaagaaagattggtatgatgtgaaagcacctgctatgttcaatataagaaatattggaaagacgctcgtcaccaggacccaaggaaccaaaattgcatctgatggtctcaagggtcgtgtgtttgaagtgagtcttgctgatttgcagaatgatgaagttgcatttagaaaattcaagctgattactgaagatgttcagggtaaaaactgcctgactaacttccatggcatggatcttacccgtgacaaaatgtgttccatggtcaaaaaatggcagacaatgattgaagctcacgttgatgtcaagactaccgatggttacttgcttcgtctgttctgtgttggttttactaaaaaacgcaacaatcagatacggaagacctcttatgctcagcaccaacaggtccgccaaatccggaagaagatgatggaaatcatgacccgagaggtgcagacaaatgacttgaaagaagtggtcaataaattgtaagtgtttctttgcttcctcacacaacacaaccttgagtattggattattcctgagatgagagaacgcatatgagacaaggtaaaggtctgttgaaatcctgtctgtgaatccttctagctatatctctttaagttgaaagagtgttaagtactcaagtaaatatgattattacttactattattatttgagtcagagtcttgctctgttgcccaggctcgagtgcagtattgtgatcctccttggctcactgtaaccactgcttcctgggttcaagcagttcttgagcctcagcctcctgagtatctgggaatacaggggactgccaccatacccagctaatttttttaaatttttagtagagatggggtttcatcatgttggccaggctggtcttgaactcctgacttcaggtgatctgccagtactctaaatgataacagttttttcgtgtttatttattttgaatgaagctgtctcacagtagatggagttgaaggacaggaaatgtttttcccctacttggaaaatacactgaata

SEQ ID NO: 321172 - DNA, 820 bp, Homo sapiens
aacggctagtacgaggccgggtgttaatcggccgaggcctaagttctcgcgcgactcccacttccgcccttttggctctctgaccagcaccatggcggttggcaagaacaagcgccttacgaaaggcggcaaaaagggagccaagaagaaagtggttgatccattttctaagaaagattggtatgatgtgaaagcacctgctatgttcaatataagaaatattggaaagacgctcgtcaccaggacccaaggaaccaaaattgcatctgatggtctcaagggtcgtgtgtttgaagtgagtcttgctgatttgcagaatgatgaagttgcatttagaaaattcaagctgattactgaagatgttcagggtaaaaactgcctgactaacttccatggcatggatcttacccgtgacaaaatgtgttccatggtcaaaaaatggcagacaatgattgaagctcacgttgatgtcaagactaccgatggttacttgcttcgtctgttctgtgttggttttactaaaaaacgcaacaatcagatacggaagacctcttatgctcagcaccaacaggtccgccaaatccggaagaagatgatggaaatcatgacccgagaggtgcagacaaatgacttgaaagaagtggtcaataaatttgggaaagctcatggagcttcatggtgaaggcagtagttctggaaaagccactggggacgagacaggtgctaaagttgaacgagctgatggatatgaaccaccagtccaagaatctgtttaaagttcagacttcaaatagtggcaaataaaaagtgctatttgtga

SEQ ID NO: 321173 - DNA, 875 bp, Homo sapiens
aacggctagtacgaggccgggtgttaatcggccgaggcctaagttctcgcgcgactcccacttccgcccttttggctctctgaccagcaccatggcggttggcaagaacaagcgccttacgaaaggcggcaaaaagggagccaagaagaaagtggttgatccattttctaagaaagattggtatgatgtgaaagcacctgctatgttcaatataagaaatattggaaagacgctcgtcaccaggacccaaggaaccaaaattgcatctgatggtctcaagggtcgtgtgtttgaagtgagtcttgctgatttgcagaatgatgaagttgcatttagaaaattcaagctgattactgaagatgttcagggtaaaaactgcctgactaacttccatggcatggatcttacccgtgacaaaatgtgttccatggtcaaaaaatggcagacaatgattgaagctcacgttgatgtcaagactaccgatggttacttgcttcgtctgttctgtgttggttttactaaaaaacgcaacaatcagatacggaagacctcttatgctcagcaccaacaggtccgccaaatccggaagaagatgatgggattccagacagcattggaaaagacatagaaaaggcttgccaatctatttatcctctccatgatgtcttcgttagaaaagtaaaaatgctgaagaagcccaagtttgaattgggaaagctcatggagcttcatggtgaaggcagtagttctggaaaagccactggggacgagacaggtgctaaagttgaacgagctgatggatatgaaccaccagtccaagaatctgtttaaagttcagacttcaaatagtggcaaataaaaagtgctatttgtga

SEQ ID NO: 321174 - DNA, 907 bp, Homo sapiens
aacggctagtacgaggccgggtgttaatcggccgaggcctaagttctcgcgcgactcccacttccgcccttttggctctctgaccagcaccatggcggttggcaagaacaagcgccttacgaaaggcggcaaaaagggagccaagaagaaagtggttgatccattttctaagaaagattggtatgatgtgaaagcacctgctatgttcaatataagaaatattggaaagacgctcgtcaccaggacccaaggaaccaaaattgcatctgatggtctcaagggtcgtgtgtttgaagtgagtcttgctgatttgcagaatgatgaagttgcatttagaaaattcaagctgattactgaagatgttcagggtaaaaactgcctgactaacttccatggcatggatcttacccgtgacaaaatgtgttccatggtcaaaaaatggcagacaatgattgaagctcacgttgatgtcaagactaccgatggttacttgcttcgtctgttctgtgttggttttactaaaaaacgcaacaatcagatacggaagacctcttatgctcagcaccaacaggtccgccaaatccggaagaagatgatggaaccatcggtagtcttgacatcaacgtgagcttcaatcattgtctgccattttttgaccatggaacacattttgtcacgggtaagatccatgccatggaagttagtcaggcagtttttaccctgaacatcttcagtaatcagcttgaattttctaaatgcaacttcatcattctgcaaatcagcaagactcacttcaaacacacgacccttgagaccatcagatgcaattttggttccttgggtcctggtgacgagcgtctttccaatatttggtatattgaacatagcaggtgctttcacgtcgacc

SEQ ID NO: 321175 - DNA, 454 bp, Homo sapiens
aacggctagtacgaggccgggtgttaatcggccgaggcctaagttctcgcgcgactcccacttccgcccttttggctctctgaccagcaccatggcggttggcaagaacaagcgccttacgaaaggcggcaaaaagggagccaagaagaaagtggttgatccattttctaagaaagattggtatgatgtgaaagcacctgctatgttcaatataagaaatattggaaagacgctcgtcaccaggacccaaggaaccaccaaattggcatctaatggctctcaggggtcggtgtgtttaaagtgagtctcgctgattcacagagtgatgaggtgacatagagagatacacgctgatcactagagtgtacaggaaaactactgcctctatcactacgtcgcatggctctcaccgacacatatgtgctacgatgacaaatgtgccgactatgatgcg

SEQ ID NO: 321176 - DNA, 350 bp, Homo sapiens
gtattattgctcatttacataaaagattagattcagttcatatgaactagtttatactggtaaaatgtttctttaaaaacaacaacctgagttaatttgtatttaagaaataatcctaattgaaaaattcttaatgattaggggcagcaaagaaaactgtataatcaagtcagcaggacagattctacttacatttgtcttttatttattctgtataagaataagcatttcttattccaactgcagcatgactgtcactaaaaagattttgatgttcaaagacaagtcattgagagttcttcggttttcttccttcaaaaacattgaatgattttatgctacataccagg

SEQ ID NO: 321177 - DNA, 342 bp, Homo sapiens
tcaatctcaataaaaagttattttctaaacaacgaatgaatgaaataagcaattaatagtataatcatctagatattgagagataaagaacaaaaacaatattttattaagcttgtggagtgtggttaacaatgagcccaaaggttaattgatgatgttgaatgcttttactgtttaaaaagaaagactaggccaggtgcggtggctcacgcctgtaatccgagcactttgggaggccgaggcggggaggaccacgagttcaagagattcctggccaacatggtgaaatcccatctctactaaaaatacaaaaattagctgggtgtggtggtgcaggcctgt

SEQ ID NO: 321178 - DNA, 480 bp, Homo sapiens
  misc_feature (6)..(6): n is a, c, g, or t
  misc_feature (21)..(21): n is a, c, g, or t
ccgccnctcgacgcggccgcntcgactacggctgcgagaagacgacagaagggcaggtgaccactcaagttctttcaatgaagacctgatgatgtatttagttcccattttccacggtgattgactcaatttaagtgtattgtggctatatgtaatttacaggctgctttgcgttgcaggtgggaaaatctcccaggctggtgtgaggctgaactggggtaaaagaccccctgacccctcctcattcttctaaggtcaccacctcttagagggtctcttattttctttcagagatcaaatgcacagttatgctgtacaactaaattctgcagtcttgggaatccttacgagtaccaactattagtcactttttaaagtccccaaagtggagtgaggatagggggagtggaagcagtgtttggttcttactttacccaaactgtgtataaagaataaagttagcagaatgatgccacagtc

SEQ ID NO: 321179 - DNA, 3509 bp, Homo sapiens
aggaggaagaagaggaggaggaggagggggccggtgtcccagcttgcccgcccaagggcccaggcgacgttccgctgtcccctggagctcccttggagcggcccgccgaagaagaggaggacgaagaggacggccaggagcctgggggactcgccttgccgccgccgcctcctcccccgcctccgcccccgccccgcagccgggagcagcggcggaactaccagccgcggtggcggggcgagtacctgatggactacgacggcagccggcgcggcctggtgtgtatggtgtgcgggggcgcgctggccacgctcaaggtgagcaccatcaagcgccacatcctgcaggtgcaccccttctccatggacttcacgcctgaggagcgccagactatcctggaggcctacgaggaggcggcgctgcgctgctacggccacgagggcttcgggccgcccgccccggcgccgcgtgacggcggcgcggacctcaagtctggcgctgtgtgtcgggcgtagcggcctagcgggcccccgggtcaggtcgggtcgggtcggatcggccccgccccgccctgtgctcgcccggcccttcggctgggagaccctcgcgtccggtgttagcgcttcccgcggccgcgccccccgctggccgggccgggcggagacgggggatcgggtggggccaccggcgtctgcgcggtgccacttgggtccctgagccagtcggtgcgctgcgggaagcgcactctcccatcggcccggagccctgccctccccgcgcagggcccacgttttccgagaatcctcagtggcctccacgtgttagcgccgagcgctcccggccgcaccccgcgagggggttctccgcaggccgggactgggggcgccgtcagtcagtattagggccgaaggggggccgtgcgggctctggctctggccctggctgggggcccagttccctgcagccttgcacgctggcaggcacggctcccggcttgggggctgctggctgcccttccctaattgggattctcggcctctcggaggccccggctgcggactggggcttccagcgggaggctgggccgcagggctcgggagccttcccggggtgggaaggcgcgttggaccgagggcggggctacgcgcccggggcccgggctggaccagctgcgcttacctccccggcaggctcagtgagaaccgtgcgcccggcggccccactctcctcccaggccgctgccacgccctccaggaaagctcttgtaaagggattagcacttttttcctttgctcctcttgccccgagggtctctgctcttcacaaagccaggctgctgcaggaacagttcccgcggtcctaaagccggggcggggaggctagtgggtggaacttgagggttgggtctggaggaagagatgcctgggcagcgtggtccagcccctgcctcggggtggaaaggcagagagcaaagaggaggcccctcttattccggacccccaggccagagcccaggagtgggaaagcagagggcaaagaggaggcccctcctctcatccctgacccccaggccagagcctaaggttcaagtgcctcaggcccagtccccttgacgcttcctgtttgggagttggattttataccacggattttatagcatttttatataattgaggattgtcagaattggaaagggccctggagatcactagtactaccctcctcaccttcacagataggtaaattggagcccaggaaccgagatgatcacacagccaggtagggacagtacaagaactagaatgaaaatcctagctcctgactcagtgttctttgcacgatgccacactgcttcccaattcgctggtcagttattaaaatttgtcaggcctgccgaaggattgacatgctgggcaatgcaggccaccacggtggatctgtgactcctgaaggtggcaaagccctgcacactgccttgggatgagcacactgagctctgcagggcctcagctggaaggcgccatccaatcgtccttcccctccccagcagaactccagaggtggggcggctgccgcagggcccaaggctgcctcggcagggggctttgtgctttttgttgtggaggccaccagggattcaggaagatcctgaatgggttgtcaattgactgaaaagtaaattcccagtgagtttgaacctccacggtttttgagacagtattaaaagcttgagaacggagattatggatggcaccaggctgggcactgccattcttttactttccttcatgcattttttcggatccagagtattaacaccactttttttactctgcccattcaaaaacagtaggcaaattgggggaaccaatttataatcactcaagcccactgccaaagttcggataagccagggcagaggggttagattcccccccctccgtaggcagagagaggcctcaggagagtggacatctttactgagacagccccaaacacaccagtggctctcaaagtgtgtccctgagaccagcagcatcaccttaggaatctgctagaaataaaaattcttgggccataccccagggttactgaatcagaaacttggttggggcctagcagtgttttcatgagccctccattgatcttgatgcagctgaagtgccgggcaccagtgaaagggaagggctgcggtagtgattccattgattcctgctttgatggaagttatggcctcacaggttagacgttgcaagttgagttggccctcttgcctaggtgtgcctccttgccttgggattctgacatgaacaggtgaagtctcttcatgattttttttgttgttgttgttaatggtatgcttgctattatggccaatatgtaaatgttactctgaatacatatttatataccatgttacttagtgacattattcaaacatttgtatgcgtatttgtgaaattgtttgcatcagtcatttaaaaaatatttcagcctaagttttctaagaggtatgttgaatacatttttaaaagccagcttaagggtcacagcagccttagtttaggagaagagctaatcacaggtgaccactcaagttctttcaatgaagacctgatgatgtatttagttcccattttccacggtgattgactcaatttaagtgtattgtggctatatgtaatttacaggctgctttgcgttgcaggtgggaaaatctcccaggctggtgtgaggctgaactggggtaaaagaccccctgacccctcctcattcttctaaggtcaccacctcttagagggtctcttattttctttcagagatcaaatgcacagttatgctgtacaactaaattctgcagtcttgggaatccttacgagtaccaactattagtcactttttaaagtccccaaagtggagtgaggatagggggagtggaagcagtgtttggttcttactttacccaaactgtgtataaagaataaagttagcagaatgatgccacagtc

SEQ ID NO: 321180 - DNA, 2192 bp, Homo sapiens
aggaggaagaagaggaggaggaggagggggccggtgtcccagcttgcccgcccaagggcccaggcgacgttccgctgtcccctggagctcccttggagcggcccgccgaagaagaggaggacgaagaggacggccaggagcctgggggactcgccttgccgccgccgcctcctcccccgcctccgcccccgccccgcagccgggagcagcggcggaactaccagccgcggtggcggggcgagtacctgatggactacgacggcagccggcgcggcctggtgtgtatggtgtgcgggggcgcgctggccacgctcaaggtgagcaccatcaagcgccacatcctgcaggtgcaccccttctccatggacttcacgcctgaggagcgccagactatcctggaggcctacgaggaggcggcgctgcgctgctacggccacgagggcttcgggccgcccgccccggcgccgcgtgacggcggcgcggacctcaagtctggcgctgtgtgtcgggcgtagcggcctagcgggcccccgggtcaggtcgggtcgggtcggatcggccccgccccgccctgtgctcgcccggcccttcggctgggagaccctcgcgtccggtgttagcgcttcccgcggccgcgccccccgctggccgggccgggcggagacgggggatcgggtggggccaccggcgtctgcgcggtgccacttgggtccctgagccagtcggtgcgctgcgggaagcgcactctcccatcggcccggagccctgccctccccgcgcagggcccacgttttccgagaatcctcagtggcctccacgtgttagcgccgagcgctcccggccgcaccccgcgagggggttctccgcaggccgggactgggggcgccgtcagtcagtattagggccgaaggggggccgtgcgggctctggctctggccctggctgggggcccagttccctgcagccttgcacgctggcaggcacggctcccggcttgggggctgctggctgcccttccctaattgggattctcggcctctcggaggccccggctgcggactggggcttccagcgggaggctgggccgcagggctcgggagccttcccggggtgggaaggcgcgttggaccgagggcggggctacgcgcccggggcccgggctggaccagctgcgcttacctccccggcaggctcagtgagaaccgtgcgcccggcggccccactctcctcccaggccgctgccacgccctccaggaaagctcttgtaaagggattagcacttttttcctttgctcctcttgccccgagggtctctgctcttcacaaagccaggctgctgcaggaacagttcccgcggtcctaaagccggggcggggaggctagtgggtggaacttgagggttgggtctggaggaagagatgcctgggcagcgtggtccagcccctgcctcggggtggaaaggcagagagcaaagaggaggcccctcttattccggacccccaggccagagcccaggagtgggaaagcagagggcaaagaggaggcccctcctctcatccctgacccccaggccagagcctaaggttcaagtgcctcaggcccagtccccttgacgcttcctgtttgggagttggattttataccacggattttatagcatttttatataattgaggattgtcagaattggaaagggccctggagatcactagtactaccctcctcaccttcacagataggtaaattggagcccaggaaccgagatgatcacacagccaggtagggacagtacaagaactagaatgaaaatcctagctcctgactcagtgttctttgcacgatgccacactgcttcccaattcgctggtcagttattaaaatttgtcaggcctgccgaaggattgacatgctgggcaatgcaggccaccacggtggatctgtgactcctgaaggtggcaaagccctgcacactgccttgggatgagcacactgagctctgcagggcctcagctggaaggcgccatccaatcgtccttcccctccccagcagaaatccttacgagtaccaactattagtcactttttaaagtccccaaagtggagtgaggatagggggagtggaagcagtgtttggttcttactttacccaaactgtgtataaagaataaagttagcagaatgatgccacagtc

SEQ ID NO: 321181 - DNA, 427 bp, Homo sapiens
gtgcaaatgtcttatttattatgcgtgtatcagagataagctgtgaggtggtggagggaggacctgaaggaaggaggagcgagggcagaggcggggacgggaggaccccaactagctgtgctgatgttaatcccgctgggagactccgggccctactgtctgcctcttcacaaagccaggctgctgcaggaacagttcccgcggtcctaaagccggggcggggaggctagtgggtggaacttgagggttgggtctggaggaagagatgcctgggcagcgtggtccagcccctgcctcggggtggaaaggcagagagcaaagaggaggcccctcttattccggacccccaggccagagcccaggagtgggaaagcagagggcaaagaggaggcccctcctctcatccctgacccccaggccagagcct

SEQ ID NO: 321182 - DNA, 3116 bp, Homo sapiens
aggaggaagaagaggaggaggaggagggggccggtgtcccagcttgcccgcccaagggcccaggcgacgttccgctgtcccctggagctcccttggagcggcccgccgaagaagaggaggacgaagaggacggccaggagcctgggggactcgccttgccgccgccgcctcctcccccgcctccgcccccgccccgcagccgggagcagcggcggaactaccagccgcggtggcggggcgagtacctgatggactacgacggcagccggcgcggcctggtgtgtatggtgtgcgggggcgcgctggccacgctcaaggtgagcaccatcaagcgccacatcctgcaggtgcaccccttctccatggacttcacgcctgaggagcgccagactatcctggaggcctacgaggaggcggcgctgcgctgctacggccacgagggcttcgggccgcccgccccggcgccgcgtgacggcggcgcggacctcaagtctggcgctgtgtgtcgggcgtagcggcctagcgggcccccgggtcaggtcgggtcgggtcggatcggccccgccccgccctgtgctcgcccggcccttcggctgggagaccctcgcgtccggtgttagcgcttcccgcggccgcgccccccgctggccgggccgggcggagacgggggatcgggtggggccaccggcgtctgcgcggtgccacttgggtccctgagccagtcggtgcgctgcgggaagcgcactctcccatcggcccggagccctgccctccccgcgcagggcccacgttttccgagaatcctcagtggcctccacgtgttagcgccgagcgctcccggccgcaccccgcgagggggttctccgcaggccgggactgggggcgccgtcagtcagtattagggccgaaggggggccgtgcgggctctggctctggccctggctgggggcccagttccctgcagccttgcacgctggcaggcacggctcccggcttgggggctgctggctgcccttccctaattgggattctcggcctctcggaggccccggctgcggactggggcttccagcgggaggctgggccgcagggctcgggagccttcccggggtgggaaggcgcgttggaccgagggcggggctacgcgcccggggcccgggctggaccagctgcgcttacctccccggcaggctcagtgagaaccgtgcgcccggcggccccactctcctcccaggccgctgccacgccctccaggaaagctcttgtaaagggattagcacttttttcctttgctcctcttgccccgagggtctctgctcttcacaaagccaggctgctgcaggaacagttcccgcggtcctaaagccggggcggggaggctagtgggtggaacttgagggttgggtctggaggaagagatgcctgggcagcgtggtccagcccctgcctcggggtggaaaggcagagagcaaagaggaggcccctcttattccggacccccaggccagagcccaggagtgggaaagcagagggcaaagaggaggcccctcctctcatccctgacccccaggccagagcctaaggttcaagtgcctcaggcccagtccccttgacgcttcctgtttgggagttggattttataccacggattttatagcatttttatataattgaggattgtcagaattggaaagggccctggagatcactagtactaccctcctcaccttcacagataggtaaattggagcccaggaaccgagatgatcacacagccaggtagggacagtacaagaactagaatgaaaatcctagctcctgactcagtgttctttgcacgatgccacactgcttcccaattcgctggtcagttattaaaatttgtcaggcctgccgaaggattgacatgctgggcaatgcaggccaccacggtggatctgtgactcctgaaggtggcaaagccctgcacactgccttgggatgagcacactgagctctgcagggcctcagctggaaggcgccatccaatcgtccttcccctccccagcagaactccagaggtggggcggctgccgcagggcccaaggctgcctcggcagggggctttgtgctttttgttgtggaggccaccagggattcaggaagatcctgaatgggttgtcaattgactgaaaagtaaattcccagtgagtttgaacctccacggtttttgagacagtattaaaagcttgagaacggagattatggatggcaccaggctgggcactgccattcttttactttccttcatgcattttttcggatccagagtattaacaccactttttttactctgcccattcaaaaacagtagacgttgcaagttgagttggccctcttgcctaggtgtgcctccttgccttgggattctgacatgaacaggtgaagtctcttcatgattttttttgttgttgttgttaatggtatgcttgctattatggccaatatgtaaatgttactctgaatacatatttatataccatgttacttagtgacattattcaaacatttgtatgcgtatttgtgaaattgtttgcatcagtcatttaaaaaatatttcagcctaagttttctaagaggtatgttgaatacatttttaaaagccagcttaagggtcacagcagccttagtttaggagaagagctaatcacaggtgaccactcaagttctttcaatgaagacctgatgatgtatttagttcccattttccacggtgattgactcaatttaagtgtattgtggctatatgtaatttacaggctgctttgcgttgcaggtgggaaaatctcccaggctggtgtgaggctgaactggggtaaaagaccccctgacccctcctcattcttctaaggtcaccacctcttagagggtctcttattttctttcagagatcaaatgcacagttatgctgtacaactaaattctgcagtcttgggaatccttacgagtaccaactattagtcactttttaaagtccccaaagtggagtgaggatagggggagtggaagcagtgtttggttcttactttacccaaactgtgtataaagaataaagttagcagaatgatgccacagtc

SEQ ID NO: 321183 - DNA, 1018 bp, Homo sapiens
cagaaaaagtgctccctttcctgtcctgtggtgccaccatcctgtcctccttcgtaatcatgaacaatctgatcttgaactcccacataacttaaatcaggcaaaaagaaacattcacagcgtccccttgctgaataaaaatgactttgtttggaggcacttaagatgtatgcctgtgtgtggtgccgcagcattgaaattatctgtagaaggggaattttttttaaaaatacaattttatcactagaaataaattccgatggtggaaacgaagaaaacccttaaattatatcacaaaagccattattttttgcatccaaagagtttttttttttaaggaaaatcattctactttgagaactgtaattaaagccctaaataacagacactactttgttgagctattgtgaaaaaaaaacaacacattcgccaaggttatatggagcccctgatttccatcaaaaaggtttctataagtatattatttacatttttatacatgataactcttgcctttgtgttgaaaaaaaaaaagtctcttttttttcccccactcagcagttattggaaatagactgttcccatctgaaaccgtatcgtaatttgcatcaggaaacccaactgctgacattgaggacctgggtgtgttcaattatgattttgctggaggctgtccctcattttaatgctgcagctattgaaccaccttcctgaaacctagctgatacggaatagcagagacatgcctctcaacaccattagctttgcaaatggcttcatttcagtcaacgtcgacttctgctttggccaattgaaaaatgaaaattaaaggagagaagaaaaaaaacacagatgcacttaaaacatgaaaagaattatttatatgataaaaatatatttagcttttcaaagcacaagactgaatagaagtgctctttttatgctttctggagatgttactgttaaatgtctttctacatcaggcttaataaatctgtaatgacatttgatggattga

SEQ ID NO: 321184 - DNA, 494 bp, Homo sapiens
tagagacagggtttcaccaatttggccaggctggtcttgaactcctaacctcaggtgatctacctgccttggcctcccaaagtgctgggattacaggcgtgagccaccgcgcccagtctaggatgtcgtttttctgatacaacaaaggataaggttttagaataatagtatgttacaatatctttaaaaacagcaggtgcggtggctcacacctgtaagcccagcattttgggggttcaaggcaggaagatcagttgaggccgggagttcaagaccagcctggactgcatagcaagatcctatttgtacaaaaaaatgtaaaacttaaaattgcacaaaatttgtcacctgtaccagcttttagaactgtttatcttatcctcctcagtgatacatcatgaagttgtgtgctttgcctaaaatgcccagttacctgaaattgtataaattcttgccaaaagtgtttgaacttaatacaaacttcccatctctta

SEQ ID NO: 321185 - DNA, 474 bp, Homo sapiens
tgtttgttgttgacattaacattttctttaagagtatttcttcatctgtaaaatgaggataaaaattgtaaaattgtacctacttccagcctcatagaattgttttgatgattacatcagaaagcttgtaaaaaccttaggcctgtttcctgacatatactaaatgccccatgtgctaactgaggatgatcattgtaggaaaatttcatagactatgagggaaagccatgcctaaaataatctccagcttattaagaagtgcattcctttttgtttctttgttttatcttagattgagtctcactgtattgccagtctggagtgcagtggcgcaatctcagctcactgcaacctccacctcactgaggcaggagaaacgcttgaacctgggaggtggaggttgcggtgagctgagatcacaccattgcactccagcctgggcaacaagagcgaaattccatctcaaaaaaaaaa

SEQ ID NO: 321186 - DNA, 1306 bp, Homo sapiens
gcgtgagccacctctcctgtccaatttgcatttttttatttttttttttctgagacggagtctcagctttgtcgcccaggctgaagtgcagtggcgacaatctcagctcactgcaacctccacctcccgggttcagttttcctgcctcactctactaaaaatacaaaaattagccaggcatggtggcacatggctgtaatcccagctactggggaggctgaagcaggaaaatcgcttgaactgagagtcaaggcggaggtcgcggtaagccgagatcacaccattgcactgcagcctgggtgaagaaacaagcctccctctcaaaaaataaataaataaataaataatacctcctctgggataagtagtgctccgtctgtctcatgggcacatattagtgtcgtaatgccaaatactaaggttattgtaagcataaacattgaagataattgctagagaaaaatagactgaaaaagatgtaagaaaaatacacgtagatgagagtaacctgtctggtggaatcatgacattctaagcagtgaaggaatcaccaatgagaaaatctacaaaggctcaagatcaagtctatttaggtgaataaggcaatctagaaagaccttggaataataataccatttcctgaggaccttctaaataagtgccattaaagctttaaatacattaagactattcttcacaaaatctctgctaatagtaggtattaattgagactcaagaaatatcaaataacttatttatggctacacagctagatactaatggcaggagtgtttaattagaagtacttttactatcccaggttgcctcaaatgaaaacattttggacagcaatgtaaggtgaatagctgagcatgatggcacaagctatagccccagctacttgggaggctgaggcacaaggattgcttgagcaaatgagttgagtccagcatggacaactgtattcctgcagcctgcttgtattcctctcctcaaagtgctttttccttctctgccacatgactagtctgtgaattttccaaacttctacgctctgcttcccttttaaatatgttccaactttaagttatttcttgcttccatatctgattgtaggctgctagcatcagccaggccacatcttgaatgctttgctgcttagaaatttcttctgccagataccctgataccctaagtcatcactcttaagttcaaacttccacagattcctagggcctggacacaatgcacccaagctatttgctaaagcatgacatagatgtacctttattcctgttcccaataa

SEQ ID NO: 321187 - DNA, 4328 bp, Homo sapiens
tagagacagggtttcaccaatttggccaggctggtcttgaactcctaacctcaggtgatctacctgccttggcctcccaaagtgctgggattacaggcgtgagccaccgcgcccagtctaggatgtcgtttttctgatacaacaaaggataaggttttagaataatagtatgttacaatatctttaaaaacagcaggtgcggtggctcacacctgtaagcccagcattttgggggttcaaggcaggaagatcagttgaggccgggagttcaagaccagcctggactgcatagcaagatcctatttgtacaaaaaaatgtaaaacttaaaattgcacaaaatttgtcacctgtaccagcttttagaactgtttatcttatcctcctcagtgatacatcatgaagttgtgtgctttgcctaaaatgcccagttacctgaaattgtataaattcttgccaaaagtgtttgaacttaatacaaacttcccatctcttaaaaaatagcactgtgctcatcttgaggggacatagtcccaattttgtattttatataatactgttaatgaatatgtgtagacttcatatggttgtgggtaagagaatactgcattcagatagaaaagatgctatatagctaagttgatccaggatccttgggctacctgctaggcagcttgtggtgaacaatcataatctctaaaaaataccttgtctggaccgggcgcggtggctcacacctgtaatcccagcacctcggcctcccaaagtgctgggattgcaggcatgagccactgtacccggcccctaataagttttaaataaccaatattttaaaatattttaatagttacatagcactttagtttgctgatttaatttatcccaagggacaaggatgttaatgagaaaactgactagatttcagatcacagattttaagagaacaaggatctcaaaaccaaataccctctgcttaaagtgttttttgtgtttttcactactgaaaatgtttagagattgacttacctattgctgatactcaaaacatctgatatcttaatatttttaaataactcactaaaagcatatgttgaaaatggcaatgtatagtctgagactggtgattagactggactaaaagcatatgttggaaatggcaaatatatgatctgagactggtgattaatttacagtattggcacctaaagagatactgagatgaataacttattaatttccttcttaaaatcataattttggatctgtaaaggactatacaaaaaaaaattttagtattatacctgcattttataattgtggaaatggaggccagaaagaataagaggcaagttaggggcagatcttgggtttggatcagctcttctgatgcctggttctgtgacattacaaagcctgaaattcagctccaacatctattaaacatttgcagagtatcagctgggtgcggtggctctcataaggccaggagttcaagaccagcctggccaagatggtgaagccccatctctactaaaaatacaaaaattagccgggcatggtggcaagacacctgtaatcccagctactctggaggctgagtcagagaattgcttgaacctgggaggcggaggttgcagtgatcccagatcgcgccactgcgctctagcatgggcgacaaagcgagaccccatctcaaaaagaaaaacaaaatttttttgcagagtatctactgtgtgtcaagtacattacccaagactacaaagagaaatacaatttagctaatgtcctcaagaagctaacagtatactaaaagagatatgtaggcatcaattatagtaatgacataacatattctaatagaggtaagtacataacacagtgggcatgtctagttgtctttgtttctgctgttaaaacagaatatcacagactgggtgatgggttgattgattgactgattgaggcaactctgtcacccaggctggggttcagtggcatgatcacagttcactgcagcctcaacctccctggatcaagcaatcctcctgcctcagcctcctgaacagctggaactacaggtgtgagccaccatgccccactaatttttatttatttattttttttttctgagacggagtctcagtttgtcgcccaggctgaagtgcagtggcacaatctcagctcactgcaacctccacctcccgggttcagttttcctgcctcaatctactaggatctagctaggattacaggtgtgcgccaccatgcccagctaatttttgtatttttagtagagacggggtttcaccatgttggtcaggctggtctcaaactcctgacctcatgatctgcccacctcggcctcccaaagtgctgggattacaggcgtaagccaccgcgcccagctaatttttaaaaatattttatagagacaggtctcactatgttgcccaggctcgtcttgaacccctgggcccaggcgctcctcccaccttgacctcccaaagttctggaattacacatgtgagccaacacaccaggcccagactgggtaatttataaagaaatttacttctgcccacaccgccccgcctccccgcgcgagtggctgaggcgtagcgctgccatccccgcacccctgggaacatggcgctgcgagtggtgcggagcgtgcgggccgtgctctgcagcctgcacgtggtcctggcacctgccgcgccctgcctatcgaggccctggcagcttgggatgggcgccgtctggttactgtaatctgcctgaagttgggacaaaattgaacaaacaagatgagtttggtgctttggagagtgtgaaagctgctagtgaactctattctcctttatcaggagaagtaaccgaaattaatgaagctcttgcagaaaatccaggacttgtaaacaaatctcgttatgaagatggttggctgatcaagatgacactgagtaacccttcataactagatgaacttatgagtgaagaagcatatgagaaatacataaaatctattgaggagtgaaaatggaaccactaaataagctagtatgaaataacgcaacccagcagagttgtcctaaattagtggtggatagaagacttagaatagcaacttttagcattacccatgggaaaaaaaaactactgttaacactgctaatgaaagaagatgccttttaactttctaatgattgtagataaacataatatgtgtctttttcacaacatcctatgatttttagactaggctctagtattcatgaaattatccatgaaattatccatggtaaaaattagttacaaaaattacataattcaaagataatgttgttattcttaagccttatataatattgtaacttgtgtatgtccatacctggatttgggatgaaatacttaatgatctttccattggaaataactgggagtgaagaagtttttgttgcttgtacagtgtcagatgaagaacaacactatcttaattttgcaatacactgcatttgctggtgctgtttttatatagtgaagcaacagctgtacagcaaaataataaaatactcacttcttcgttaaaaaaaaaaaaaatttacttcttacaattctggaggccaggaagaccatgatcaggtgccagcatctgggaagggccttcttgctgtcctcccatggcagaagatggaagggcaagggagagctaacatgctcccgcaaaccctttttataatggcatcaatcaaatatgaggccagagtccttgtgacctaatcatctcccagaaggctccgcctcccaaccctgttgcattgggattaagtttccaacacatgaattgtggagacaacacattcaaaacatagcattccacaccttgggctccccagattcatgtcctcacatgcaaaataaattcattccatcccaatagcccctaaaaagtcttaacttgttccagcatcaactttaaagtcaaagtccaaagtctcatctaaatcagatatgagtgagactcaaggcatgattcatcatgagacaaaggatgtacatttgcaatgtttgtcatgtcagacaaaacaaaaatatgtaaatatccatcaatagggaactgctgaaaaatttttttgtataatcataaaatgaaacatgcagatgtttaaaccaatgagctagatctcaacgtgctgatatggaaagtgcttcagaatgtattaaggacataaattaagtgtacaataatgtgtgtgtgtgtatatatgtatatgcttacgtgtgtatggaaagtatctcagcagatacaataaaaacttaattgtgatta

SEQ ID NO: 321188 - DNA, 4797 bp, Homo sapiens
tagagacagggtttcaccaatttggccaggctggtcttgaactcctaacctcaggtgatctacctgccttggcctcccaaagtgctgggattacaggcgtgagccaccgcgcccagtctaggatgtcgtttttctgatacaacaaaggataaggttttagaataatagtatgttacaatatctttaaaaacagcaggtgcggtggctcacacctgtaagcccagcattttgggggttcaaggcaggaagatcagttgaggccgggagttcaagaccagcctggactgcatagcaagatcctatttgtacaaaaaaatgtaaaacttaaaattgcacaaaatttgtcacctgtaccagcttttagaactgtttatcttatcctcctcagtgatacatcatgaagttgtgtgctttgcctaaaatgcccagttacctgaaattgtataaattcttgccaaaagtgtttgaacttaatacaaacttcccatctcttaaaaaatagcactgtgctcatcttgaggggacatagtcccaattttgtattttatataatactgttaatgaatatgtgtagacttcatatggttgtgggtaagagaatactgcattcagatagaaaagatgctatatagctaagttgatccaggatccttgggctacctgctaggcagcttgtggtgaacaatcataatctctaaaaaataccttgtctggaccgggcgcggtggctcacacctgtaatcccagcacctcggcctcccaaagtgctgggattgcaggcatgagccactgtacccggcccctaataagttttaaataaccaatattttaaaatattttaatagttacatagcactttagtttgctgatttaatttatcccaagggacaaggatgttaatgagaaaactgactagatttcagatcacagattttaagagaacaaggatctcaaaaccaaataccctctgcttaaagtgttttttgtgtttttcactactgaaaatgtttagagattgacttacctattgctgatactcaaaacatctgatatcttaatatttttaaataactcactaaaagcatatgttgaaaatggcaatgtatagtctgagactggtgattagactggactaaaagcatatgttggaaatggcaaatatatgatctgagactggtgattaatttacagtattggcacctaaagagatactgagatgaataacttattaatttccttcttaaaatcataattttggatctgtaaaggactatacaaaaaaaaattttagtattatacctgcattttataattgtggaaatggaggccagaaagaataagaggcaagttaggggcagatcttgggtttggatcagctcttctgatgcctggttctgtgacattacaaagcctgaaattcagctccaacatctattaaacatttgcagagtatcagctgggtgcggtggctctcataaggccaggagttcaagaccagcctggccaagatggtgaagccccatctctactaaaaatacaaaaattagccgggcatggtggcaagacacctgtaatcccagctactctggaggctgagtcagagaattgcttgaacctgggaggcggaggttgcagtgatcccagatcgcgccactgcgctctagcatgggcgacaaagcgagaccccatctcaaaaagaaaaacaaaatttttttgcagagtatctactgtgtgtcaagtacattacccaagactacaaagagaaatacaatttagctaatgtcctcaagaagctaacagtatactaaaagagatatgtaggcatcaattatagtaatgacataacatattctaatagaggtaagtacataacacagtgggcatgtctagttgtctttgtttctgctgttaaaacagaatatcacagactgggtgatgggttgattgattgactgattgaggcaactctgtcacccaggctggggttcagtggcatgatcacagttcactgcagcctcaacctccctggatcaagcaatcctcctgcctcagcctcctgaacagctggaactacaggtgtgagccaccatgccccactaatttttatttatttattttttttttctgagacggagtctcagtttgtcgcccaggctgaagtgcagtggcacaatctcagctcactgcaacctccacctcccgggttcagttttcctgcctcaatctactaggatctagctaggattacaggtgtgcgccaccatgcccagctaatttttgtatttttagtagagacggggtttcaccatgttggtcaggctggtctcaaactcctgacctcatgatctgcccacctcggcctcccaaagtgctgggattacaggcgtaagccaccgcgcccagctaatttttaaaaatattttatagagacaggtctcactatgttgcccaggctcgtcttgaacccctgggcccaggcgctcctcccaccttgacctcccaaagttctggaattacacatgtgagccaacacaccaggcccagactgggtaatttataaagaaatttacttctgcccacaccgccccgcctccccgcgcgagtggctgaggcgtagcgctgccatccccgcacccctgggaacatggcgctgcgagtggtgcggagcgtgcgggccgtgctctgcagcctgcacgtggtcctggcacctgccgcgccctgcctatcgaggccctggcagcttgggatgggcgccgtctggttactgtaatctgcctgaagttgggacaaaattgaacaaacaagatgagtttggtgctttggagagtgtgaaagctgctagtgaactctattctcctttatcaggagaagtaaccgaaattaatgaagctcttgcagaaaatccaggacttgtaaacaaatctcgttatgaagatggttggctgatcaagatgacactgagtaacccttcataactagatgaacttatgagtgaagaagcatatgagaaatacataaaatctattgaggagtgaaaatggaaccactaaataagctagtatgaaataacgcaacccagcagagttgtcctaaattagtggtggatagaagacttagaatagcaacttttagcattacccatgggaaaaaaaaactactgttaacactgctaatgaaagaagatgccttttaactttctaatgattgtagataaacataatatgtgtctttttcacaacatcctatgatttttagactaggctctagtattcatgaaattatccatgaaattatccatggtaaaaattagttacaaaaattacataattcaaagataatgttgttattcttaagccttatataatattgtaacttgtgtatgtccatacctggatttgggatgaaatacttaatgatctttccattggaaataactgggagtgaagaagtttttgttgcttgtacagtgtcagatgaagaacaacactatcttaattttgcaatacactgcatttgctggtgctgtttttatatagtgaagcaacagctgtacagcaaaataataaaatactcacttcttcgttaaaaaaaaaaaaaatttacttcttacaattctggaggccaggaagaccatgatcaggtgccagcatctgggaagggccttcttgctgtcctcccatggcagaagatggaagggcaagggagagctaacatgctcccgcaaaccctttttataatggcatcaatcaaatatgaggccagagtccttgtgacctaatcatctcccagaaggctccgcctcccaaccctgttgcattgggattaagtttccaacacatgaattgtggagacaacacattcaaaacatagcattccacaccttgggctccccagattcatgtcctcacatgcaaaataaattcattccatcccaatagcccctaaaaagtcttaacttgttccagcatcaactttaaagtcaaagtccaaagtctcatctaaatcagatatgagtgagactcaaggcatgattcatcatgagacaaaggatgtacatttgcaatgtttgtcatgtcagacaaaacaaaaatatgtaaatatccatcaatagggaactgctgaaaaatttttttgtataatcataaaatgaaacatgcagatgtttaaaccaatgagctagatctcaacgtgctgatatggaaagtgcttcagaatgtattaaggacataaattaagtgtacaataatgtgtgtgtgtgtatatatgtatatgcttacgtgtgtatggaaagtatctcagcagatacaataaaaacttaattgtgattaaaaaaaaaaaaaagaaaaaaaaaaaaaaaaaaaaaaagagaaaaaaagagaaaaaaagagacggcgcacaaaaaagaacacagaggagccaacacagcgacacaagagaagacaaaggaagccaaaacaggcgagaaaaagagagagcacgcgaacaaaaacaagagagaaaaaacgagacgagagcaaaggagagacacccacacacccggaggacacaacgggaaccaacacagcagcgcaaccccgaggacgccacacacgaagaagcggagacaaagacgaggcgcacgaaaagagaaaaagaaaaaatcacgacaaaggagaaagacacgacgcgcgcggcgacacaccaaaacacggcggacgcagcggcgccgccacgaccccccccgacgcgagcgcggacaccgcgagcgacccgccgccgacacgccgcaacaccaccaccaaaacaccacgcgcagac

SEQ ID NO: 321189 - DNA, 4723 bp, Homo sapiens
tagagacagggtttcaccaatttggccaggctggtcttgaactcctaacctcaggtgatctacctgccttggcctcccaaagtgctgggattacaggcgtgagccaccgcgcccagtctaggatgtcgtttttctgatacaacaaaggataaggttttagaataatagtatgttacaatatctttaaaaacagcaggtgcggtggctcacacctgtaagcccagcattttgggggttcaaggcaggaagatcagttgaggccgggagttcaagaccagcctggactgcatagcaagatcctatttgtacaaaaaaatgtaaaacttaaaattgcacaaaatttgtcacctgtaccagcttttagaactgtttatcttatcctcctcagtgatacatcatgaagttgtgtgctttgcctaaaatgcccagttacctgaaattgtataaattcttgccaaaagtgtttgaacttaatacaaacttcccatctcttaaaaaatagcactgtgctcatcttgaggggacatagtcccaattttgtattttatataatactgttaatgaatatgtgtagacttcatatggttgtgggtaagagaatactgcattcagatagaaaagatgctatatagctaagttgatccaggatccttgggctacctgctaggcagcttgtggtgaacaatcataatctctaaaaaataccttgtctggaccgggcgcggtggctcacacctgtaatcccagcactttggcaggctgaggcgggcggatcattgaggctggtcttgaacccctgacctcaggtgattcacccgcctcagcctcccaaagtgctgggattccagatgtgagccagcgcacccagcctggccatcttttataaaaagatgaagatgtcagaattccctaataagattctggctctgttacccagactggagtgcaatgcatggcatgatctcagcacactgcaacctccatctcctgggctcaagccatcctcccacttcagtctcccaagtggctgggactacaggcacacgccaccacacctggctaatttttgtattttttgtagagacgaggtttcgccatgttacccaggctggtcttaaactcctgggttcaagtgatccacctgcctcggcctcccaaagtgctgggattgcaggcatgagccactgtacccggcccctaataagttttaaataaccaatattttaaaatattttaatagttacatagcactttagtttgctgatttaatttatcccaagggacaaggatgttaatgagaaaactgactagatttcagatcacagattttaagagaacaaggatctcaaaaccaaataccctctgcttaaagtgttttttgtgtttttcactactgaaaatgtttagagattgacttacctattgctgatactcaaaacatctgatatcttaatatttttaaataactcactaaaagcatatgttgaaaatggcaatgtatagtctgagactggtgattagactggactaaaagcatatgttggaaatggcaaatatatgatctgagactggtgattaatttacagtattggcacctaaagagatactgagatgaataacttattaatttccttcttaaaatcataattttggatctgtaaaggactatacaaaaaaaaattttagtattatacctgcattttataattgtggaaatggaggccagaaagaataagaggcaagttaggggcagatcttgggtttggatcagctcttctgatgcctggttctgtgacattacaaagcctgaaattcagctccaacatctattaaacatttgcagagtatcagctgggtgcggtggctctcataaggccaggagttcaagaccagcctggccaagatggtgaagccccatctctactaaaaatacaaaaattagccgggcatggtggcaagacacctgtaatcccagctactctggaggctgagtcagagaattgcttgaacctgggaggcggaggttgcagtgatcccagatcgcgccactgcgctctagcatgggcgacaaagcgagaccccatctcaaaaagaaaaacaaaatttttttgcagagtatctactgtgtgtcaagtacattacccaagactacaaagagaaatacaatttagctaatgtcctcaagaagctaacagtatactaaaagagatatgtaggcatcaattatagtaatgacataacatattctaatagaggtaagtacataacacagtgggcatgtctagttgtctttgtttctgctgttaaaacagaatatcacagactgggtgatgggttgattgattgactgattgaggcaactctgtcacccaggctggggttcagtggcatgatcacagttcactgcagcctcaacctccctggatcaagcaatcctcctgcctcagcctcctgaacagctggaactacaggtgtgagccaccatgccccactaatttttatttatttattttttttttctgagacggagtctcagtttgtcgcccaggctgaagtgcagtggcacaatctcagctcactgcaacctccacctcccgggttcagttttcctgcctcaatctactaggatctagctaggattacaggtgtgcgccaccatgcccagctaatttttgtatttttagtagagacggggtttcaccatgttggtcaggctggtctcaaactcctgacctcatgatctgcccacctcggcctcccaaagtgctgggattacaggcgtaagccaccgcgcccagctaatttttaaaaatattttatagagacaggtctcactatgttgcccaggctcgtcttgaacccctgggcccaggcgctcctcccaccttgacctcccaaagttctggaattacacatgtgagccaacacaccaggcccagactgggtaatttataaagaaatttacttctgcccacaccgccccgcctccccgcgcgagtggctgaggcgtagcgctgccatccccgcacccctgggaacatggcgctgcgagtggtgcggagcgtgcgggccgtgctctgcagcctgcacgtggtcctggcacctgccgcgccctgcctatcgaggccctggcagcttgggatgggcgccgtctggttactgtaatctgcctgaagttgggacaaaattgaacaaacaagatgagtttggtgctttggagagtgtgaaagctgctagtgaactctattctcctttatcaggagaagtaaccgaaattaatgaagctcttgcagaaaatccaggacttgtaaacaaatctcgttatgaagatggttggctgatcaagatgacactgagtaacccttcataactagatgaacttatgagtgaagaagcatatgagaaatacataaaatctattgaggagtgaaaatggaaccactaaataagctagtatgaaataacgcaacccagcagagttgtcctaaattagtggtggatagaagacttagaatagcaacttttagcattacccatgggaaaaaaaaactactgttaacactgctaatgaaagaagatgccttttaactttctaatgattgtagataaacataatatgtgtctttttcacaacatcctatgatttttagactaggctctagtattcatgaaattatccatgaaattatccatggtaaaaattagttacaaaaattacataattcaaagataatgttgttattcttaagccttatataatattgtaacttgtgtatgtccatacctggatttgggatgaaatacttaatgatctttccattggaaataactgggagtgaagaagtttttgttgcttgtacagtgtcagatgaagaacaacactatcttaattttgcaatacactgcatttgctggtgctgtttttatatagtgaagcaacagctgtacagcaaaataataaaatactcacttcttcgttaaaaaaaaaaaaaatttacttcttacaattctggaggccaggaagaccatgatcaggtgccagcatctgggaagggccttcttgctgtcctcccatggcagaagatggaagggcaagggagagctaacatgctcccgcaaaccctttttataatggcatcaatcaaatatgaggccagagtccttgtgacctaatcatctcccagaaggctccgcctcccaaccctgttgcattgggattaagtttccaacacatgaattgtggagacaacacattcaaaacatagcattccacaccttgggctccccagattcatgtcctcacatgcaaaataaattcattccatcccaatagcccctaaaaagtcttaacttgttccagcatcaactttaaagtcaaagtccaaagtctcatctaaatcagatatgagtgagactcaaggcatgattcatcatgagacaaaggatgtacatttgcaatgtttgtcatgtcagacaaaacaaaaatatgtaaatatccatcaatagggaactgctgaaaaatttttttgtataatcataaaatgaaacatgcagatgtttaaaccaatgagctagatctcaacgtgctgatatggaaagtgcttcagaatgtattaaggacataaattaagtgtacaataatgtgtgtgtgtgtatatatgtatatgcttacgtgtgtatggaaagtatctcagcagatacaataaaaacttaattgtgatta

SEQ ID NO: 321190 - DNA, 4044 bp, Homo sapiens
tagagacagggtttcaccaatttggccaggctggtcttgaactcctaacctcaggtgatctacctgccttggcctcccaaagtgctgggattacaggcgtgagccaccgcgcccagtctaggatgtcgtttttctgatacaacaaaggataaggttttagaataatagtatgttacaatatctttaaaaacagcaggtgcggtggctcacacctgtaagcccagcattttgggggttcaaggcaggaagatcagttgaggccgggagttcaagaccagcctggactgcatagcaagatcctatttgtacaaaaaaatgtaaaacttaaaattgcacaaaatttgtcacctgtaccagcttttagaactgtttatcttatcctcctcagtgatacatcatgaagttgtgtgctttgcctaaaatgcccagttacctgaaattgtataaattcttgccaaaagtgtttgaacttaatacaaacttcccatctcttaaaaaatagcactgtgctcatcttgaggggacatagtcccaattttgtattttatataatactgttaatgaatatgtgtagacttcatatggttgtgggtaagagaatactgcattcagatagaaaagatgctatatagctaagttgatccaggatccttgggctacctgctaggcagcttgtggtgaacaatcataatctctaaaaaataccttgtctggaccgggcgcggtggctcacacctgtaatcccagcacctcggcctcccaaagtgctgggattgcaggcatgagccactgtacccggcccctaataagttttaaataaccaatattttaaaatattttaatagttacatagcactttagtttgctgatttaatttatcccaagggacaaggatgttaatgagaaaactgactagatttcagatcacagattttaagagaacaaggatctcaaaaccaaataccctctgcttaaagtgttttttgtgtttttcactactgaaaatgtttagagattgacttacctattgctgatactcaaaacatctgatatcttaatatttttaaataactcactaaaagcatatgttgaaaatggcaatgtatagtctgagactggtgattagactggactaaaagcatatgttggaaatggcaaatatatgatctgagactggtgattaatttacagtattggcacctaaagagatactgagatgaataacttattaatttccttcttaaaatcataattttggatctgtaaaggactatacaaaaaaaaattttagtattatacctgcattttataattgtggaaatggaggccagaaagaataagaggcaagttaggggcagatcttgggtttggatcagctcttctgatgcctggttctgtgacattacaaagcctgaaattcagctccaacatctattaaacatttgcagagtatcagctgggtgcggtggctctcataaggccaggagttcaagaccagcctggccaagatggtgaagccccatctctactaaaaatacaaaaattagccgggcatggtggcaagacacctgtaatcccagctactctggaggctgagtcagagaattgcttgaacctgggaggcggaggttgcagtgatcccagatcgcgccactgcgctctagcatgggcgacaaagcgagaccccatctcaaaaagaaaaacaaaatttttttgcagagtatctactgtgtgtcaagtacattacccaagactacaaagagaaatacaatttagctaatgtcctcaagaagctaacagtatactaaaagagatatgtaggcatcaattatagtaatgacataacatattctaatagaggtaagtacataacacagtgggcatgtctagttgtctttgtttctgctgttaaaacagaatatcacagactgggtgatgggttgattgattgactgattgaggcaactctgtcacccaggctggggttcagtggcatgatcacagttcactgcagcctttcaccatgttggtcaggctggtctcaaactcctgacctcatgatctgcccacctcggcctcccaaagtgctgggattacaggcgtaagccaccgcgcccagctaatttttaaaaatattttatagagacaggtctcactatgttgcccaggctcgtcttgaacccctgggcccaggcgctcctcccaccttgacctcccaaagttctggaattacacatgtgagccaacacaccaggcccagactgggtaatttataaagaaatttacttctgcccacaccgccccgcctccccgcgcgagtggctgaggcgtagcgctgccatccccgcacccctgggaacatggcgctgcgagtggtgcggagcgtgcgggccgtgctctgcagcctgcacgtggtcctggcacctgccgcgccctgcctatcgaggccctggcagcttgggatgggcgccgtctggttactgtaatctgcctgaagttgggacaaaattgaacaaacaagatgagtttggtgctttggagagtgtgaaagctgctagtgaactctattctcctttatcaggagaagtaaccgaaattaatgaagctcttgcagaaaatccaggacttgtaaacaaatctcgttatgaagatggttggctgatcaagatgacactgagtaacccttcataactagatgaacttatgagtgaagaagcatatgagaaatacataaaatctattgaggagtgaaaatggaaccactaaataagctagtatgaaataacgcaacccagcagagttgtcctaaattagtggtggatagaagacttagaatagcaacttttagcattacccatgggaaaaaaaaactactgttaacactgctaatgaaagaagatgccttttaactttctaatgattgtagataaacataatatgtgtctttttcacaacatcctatgatttttagactaggctctagtattcatgaaattatccatgaaattatccatggtaaaaattagttacaaaaattacataattcaaagataatgttgttattcttaagccttatataatattgtaacttgtgtatgtccatacctggatttgggatgaaatacttaatgatctttccattggaaataactgggagtgaagaagtttttgttgcttgtacagtgtcagatgaagaacaacactatcttaattttgcaatacactgcatttgctggtgctgtttttatatagtgaagcaacagctgtacagcaaaataataaaatactcacttcttcgttaaaaaaaaaaaaaatttacttcttacaattctggaggccaggaagaccatgatcaggtgccagcatctgggaagggccttcttgctgtcctcccatggcagaagatggaagggcaagggagagctaacatgctcccgcaaaccctttttataatggcatcaatcaaatatgaggccagagtccttgtgacctaatcatctcccagaaggctccgcctcccaaccctgttgcattgggattaagtttccaacacatgaattgtggagacaacacattcaaaacatagcattccacaccttgggctccccagattcatgtcctcacatgcaaaataaattcattccatcccaatagcccctaaaaagtcttaacttgttccagcatcaactttaaagtcaaagtccaaagtctcatctaaatcagatatgagtgagactcaaggcatgattcatcatgagacaaaggatgtacatttgcaatgtttgtcatgtcagacaaaacaaaaatatgtaaatatccatcaatagggaactgctgaaaaatttttttgtataatcataaaatgaaacatgcagatgtttaaaccaatgagctagatctcaacgtgctgatatggaaagtgcttcagaatgtattaaggacataaattaagtgtacaataatgtgtgtgtgtgtatatatgtatatgcttacgtgtgtatggaaagtatctcagcagatacaataaaaacttaattgtgatta

SEQ ID NO: 321191 - DNA, 3988 bp, Homo sapiens
tagagacagggtttcaccaatttggccaggctggtcttgaactcctaacctcaggtgatctacctgccttggcctcccaaagtgctgggattacaggcgtgagccaccgcgcccagtctaggatgtcgtttttctgatacaacaaaggataaggttttagaataatagtatgttacaatatctttaaaaacagcaggtgcggtggctcacacctgtaagcccagcattttgggggttcaaggcaggaagatcagttgaggccgggagttcaagaccagcctggactgcatagcaagatcctatttgtacaaaaaaatgtaaaacttaaaattgcacaaaatttgtcacctgtaccagcttttagaactgtttatcttatcctcctcagtgatacatcatgaagttgtgtgctttgcctaaaatgcccagttacctgaaattgtataaattcttgccaaaagtgtttgaacttaatacaaacttcccatctcttaaaaaatagcactgtgctcatcttgaggggacatagtcccaattttgtattttatataatactgttaatgaatatgtgtagacttcatatggttgtgggtaagagaatactgcattcagatagaaaagatgctatatagctaagttgatccaggatccttgggctacctgctaggcagcttgtggtgaacaatcataatctctaaaaaataccttgtctggaccgggcgcggtggctcacacctgtaatcccagcacctcggcctcccaaagtgctgggattgcaggcatgagccactgtacccggcccctaataagttttaaataaccaatattttaaaatattttaatagttacatagcactttagtttgctgatttaatttatcccaagggacaaggatgttaatgagaaaactgactagatttcagatcacagattttaagagaacaaggatctcaaaaccaaataccctctgcttaaagtgttttttgtgtttttcactactgaaaatgtttagagattgacttacctattgctgatactcaaaacatctgatatcttaatatttttaaataactcactaaaagcatatgttgaaaatggcaatgtatagtctgagactggtgattagactggactaaaagcatatgttggaaatggcaaatatatgatctgagactggtgattaatttacagtattggcacctaaagagatactgagatgaataacttattaatttccttcttaaaatcataattttggatctgtaaaggactatacaaaaaaaaattttagtattatacctgcattttataattgtggaaatggaggccagaaagaataagaggcaagttaggggcagatcttgggtttggatcagctcttctgatgcctggttctgtgacattacaaagcctgaaattcagctccaacatctattaaacatttgcagagtatcagctgggtgcggtggctctcataaggccaggagttcaagaccagcctggccaagatggtgaagccccatctctactaaaaatacaaaaattagccgggcatggtggcaagacacctgtaatcccagctactctggaggctgagtcagagaattgcttgaacctgggaggcggaggttgcagtgatcccagatcgcgccactgcgctctagcatgggcgacaaagcgagaccccatctcaaaaagaaaaacaaaatttttttgcagagtatctactgtgtgtcaagtacattacccaagactacaaagagaaatacaatttagctaatgtcctcaagaagctaacagtatactaaaagagatatgtaggcatcaattatagtaatgacataacatattctaatagaggtaagtacataacacagtgggcatgtctagttgtctttgtttctgctgttaaaacagaatatcacagactgggtgatgggttgattgattgactgattgaggcaactctgtcacccaggctggggttcagtggcatgatcacagttcactgcagcctggcctcccaaagtgctgggattacaggcgtaagccaccgcgcccagctaatttttaaaaatattttatagagacaggtctcactatgttgcccaggctcgtcttgaacccctgggcccaggcgctcctcccaccttgacctcccaaagttctggaattacacatgtgagccaacacaccaggcccagactgggtaatttataaagaaatttacttctgcccacaccgccccgcctccccgcgcgagtggctgaggcgtagcgctgccatccccgcacccctgggaacatggcgctgcgagtggtgcggagcgtgcgggccgtgctctgcagcctgcacgtggtcctggcacctgccgcgccctgcctatcgaggccctggcagcttgggatgggcgccgtctggttactgtaatctgcctgaagttgggacaaaattgaacaaacaagatgagtttggtgctttggagagtgtgaaagctgctagtgaactctattctcctttatcaggagaagtaaccgaaattaatgaagctcttgcagaaaatccaggacttgtaaacaaatctcgttatgaagatggttggctgatcaagatgacactgagtaacccttcataactagatgaacttatgagtgaagaagcatatgagaaatacataaaatctattgaggagtgaaaatggaaccactaaataagctagtatgaaataacgcaacccagcagagttgtcctaaattagtggtggatagaagacttagaatagcaacttttagcattacccatgggaaaaaaaaactactgttaacactgctaatgaaagaagatgccttttaactttctaatgattgtagataaacataatatgtgtctttttcacaacatcctatgatttttagactaggctctagtattcatgaaattatccatgaaattatccatggtaaaaattagttacaaaaattacataattcaaagataatgttgttattcttaagccttatataatattgtaacttgtgtatgtccatacctggatttgggatgaaatacttaatgatctttccattggaaataactgggagtgaagaagtttttgttgcttgtacagtgtcagatgaagaacaacactatcttaattttgcaatacactgcatttgctggtgctgtttttatatagtgaagcaacagctgtacagcaaaataataaaatactcacttcttcgttaaaaaaaaaaaaaatttacttcttacaattctggaggccaggaagaccatgatcaggtgccagcatctgggaagggccttcttgctgtcctcccatggcagaagatggaagggcaagggagagctaacatgctcccgcaaaccctttttataatggcatcaatcaaatatgaggccagagtccttgtgacctaatcatctcccagaaggctccgcctcccaaccctgttgcattgggattaagtttccaacacatgaattgtggagacaacacattcaaaacatagcattccacaccttgggctccccagattcatgtcctcacatgcaaaataaattcattccatcccaatagcccctaaaaagtcttaacttgttccagcatcaactttaaagtcaaagtccaaagtctcatctaaatcagatatgagtgagactcaaggcatgattcatcatgagacaaaggatgtacatttgcaatgtttgtcatgtcagacaaaacaaaaatatgtaaatatccatcaatagggaactgctgaaaaatttttttgtataatcataaaatgaaacatgcagatgtttaaaccaatgagctagatctcaacgtgctgatatggaaagtgcttcagaatgtattaaggacataaattaagtgtacaataatgtgtgtgtgtgtatatatgtatatgcttacgtgtgtatggaaagtatctcagcagatacaataaaaacttaattgtgatta

SEQ ID NO: 321192 - DNA, 4559 bp, Homo sapiens
tgtttgttgttgacattaacattttctttaagagtatttcttcatctgtaaaatgaggataaaaattgtaaaattgtacctacttccagcctcatagaattgttttgatgattacatcagaaagcttgtaaaaaccttaggcctgtttcctgacatatactaaatgccccatgtgctaactgaggatgatcattgtaggaaaatttcatagactatgagggaaagccatgcctaaaataatctccagcttattaagaagtgcattcctttttgtttctttgttttatcttagattgagtctcactgtattgccagtctggagtgcagtggcgcaatctcagctcactgcaacctccacctcctgggttcaagcgatcctcctgcctcagcctcctgagtagctgggactacaggagcacaccaccacgcccagctaatttttgtgtttttagtagaggcggggtttcaccatgttgggcaggatggtctcaaactcctgacctcaggtgatccacccgcctcaacctcccagagtgctgggattacaggcgtgagctatccgtgcccagtcaatttttgtatttttagtagagatgaggtttcaccatattggtcaggctggtcttgaacccctgacctcaggtgattcacccgcctcagcctcccaaagtgctgggattccagatgtgagccagcgcacccagcctggccatcttttataaaaagatgaagatgtcagaattccctaataagattctggctctgttacccagactggagtgcaatgcatggcatgatctcagcacactgcaacctccatctcctgggctcaagccatcctcccacttcagtctcccaagtggctgggactacaggcacacgccaccacacctggctaatttttgtattttttgtagagacgaggtttcgccatgttacccaggctggtcttaaactcctgggttcaagtgatccacctgcctcggcctcccaaagtgctgggattgcaggcatgagccactgtacccggcccctaataagttttaaataaccaatattttaaaatattttaatagttacatagcactttagtttgctgatttaatttatcccaagggacaaggatgttaatgagaaaactgactagatttcagatcacagattttaagagaacaaggatctcaaaaccaaataccctctgcttaaagtgttttttgtgtttttcactactgaaaatgtttagagattgacttacctattgctgatactcaaaacatctgatatcttaatatttttaaataactcactaaaagcatatgttgaaaatggcaatgtatagtctgagactggtgattagactggactaaaagcatatgttggaaatggcaaatatatgatctgagactggtgattaatttacagtattggcacctaaagagatactgagatgaataacttattaatttccttcttaaaatcataattttggatctgtaaaggactatacaaaaaaaaattttagtattatacctgcattttataattgtggaaatggaggccagaaagaataagaggcaagttaggggcagatcttgggtttggatcagctcttctgatgcctggttctgtgacattacaaagcctgaaattcagctccaacatctattaaacatttgcagagtatcagctgggtgcggtggctctcataaggccaggagttcaagaccagcctggccaagatggtgaagccccatctctactaaaaatacaaaaattagccgggcatggtggcaagacacctgtaatcccagctactctggaggctgagtcagagaattgcttgaacctgggaggcggaggttgcagtgatcccagatcgcgccactgcgctctagcatgggcgacaaagcgagaccccatctcaaaaagaaaaacaaaatttttttgcagagtatctactgtgtgtcaagtacattacccaagactacaaagagaaatacaatttagctaatgtcctcaagaagctaacagtatactaaaagagatatgtaggcatcaattatagtaatgacataacatattctaatagaggtaagtacataacacagtgggcatgtctagttgtctttgtttctgctgttaaaacagaatatcacagactgggtgatgggttgattgattgactgattgaggcaactctgtcacccaggctggggttcagtggcatgatcacagttcactgcagcctcaacctccctggatcaagcaatcctcctgcctcagcctcctgaacagctggaactacaggtgtgagccaccatgccccactaatttttatttatttattttttttttctgagacggagtctcagtttgtcgcccaggctgaagtgcagtggcacaatctcagctcactgcaacctccacctcccgggttcagttttcctgcctcaatctactaggatctagctaggattacaggtgtgcgccaccatgcccagctaatttttgtatttttagtagagacggggtttcaccatgttggtcaggctggtctcaaactcctgacctcatgatctgcccacctcggcctcccaaagtgctgggattacaggcgtaagccaccgcgcccagctaatttttaaaaatattttatagagacaggtctcactatgttgcccaggctcgtcttgaacccctgggcccaggcgctcctcccaccttgacctcccaaagttctggaattacacatgtgagccaacacaccaggcccagactgggtaatttataaagaaatttacttctgcccacaccgccccgcctccccgcgcgagtggctgaggcgtagcgctgccatccccgcacccctgggaacatggcgctgcgagtggtgcggagcgtgcgggccgtgctctgcagcctgcacgtggtcctggcacctgccgcgccctgcctatcgaggccctggcagcttgggatgggcgccgtctggttactgtaatctgcctgaagttgggacaaaattgaacaaacaagatgagtttggtgctttggagagtgtgaaagctgctagtgaactctattctcctttatcaggagaagtaaccgaaattaatgaagctcttgcagaaaatccaggacttgtaaacaaatctcgttatgaagatggttggctgatcaagatgacactgagtaacccttcataactagatgaacttatgagtgaagaagcatatgagaaatacataaaatctattgaggagtgaaaatggaaccactaaataagctagtatgaaataacgcaacccagcagagttgtcctaaattagtggtggatagaagacttagaatagcaacttttagcattacccatgggaaaaaaaaactactgttaacactgctaatgaaagaagatgccttttaactttctaatgattgtagataaacataatatgtgtctttttcacaacatcctatgatttttagactaggctctagtattcatgaaattatccatgaaattatccatggtaaaaattagttacaaaaattacataattcaaagataatgttgttattcttaagccttatataatattgtaacttgtgtatgtccatacctggatttgggatgaaatacttaatgatctttccattggaaataactgggagtgaagaagtttttgttgcttgtacagtgtcagatgaagaacaacactatcttaattttgcaatacactgcatttgctggtgctgtttttatatagtgaagcaacagctgtacagcaaaataataaaatactcacttcttcgttaaaaaaaaaaaaaatttacttcttacaattctggaggccaggaagaccatgatcaggtgccagcatctgggaagggccttcttgctgtcctcccatggcagaagatggaagggcaagggagagctaacatgctcccgcaaaccctttttataatggcatcaatcaaatatgaggccagagtccttgtgacctaatcatctcccagaaggctccgcctcccaaccctgttgcattgggattaagtttccaacacatgaattgtggagacaacacattcaaaacatagcattccacaccttgggctccccagattcatgtcctcacatgcaaaataaattcattccatcccaatagcccctaaaaagtcttaacttgttccagcatcaactttaaagtcaaagtccaaagtctcatctaaatcagatatgagtgagactcaaggcatgattcatcatgagacaaaggatgtacatttgcaatgtttgtcatgtcagacaaaacaaaaatatgtaaatatccatcaatagggaactgctgaaaaatttttttgtataatcataaaatgaaacatgcagatgtttaaaccaatgagctagatctcaacgtgctgatatggaaagtgcttcagaatgtattaaggacataaattaagtgtacaataatgtgtgtgtgtgtatatatgtatatgcttacgtgtgtatggaaagtatctcagcagatacaataaaaacttaattgtgatta

SEQ ID NO: 321193 - DNA, 3115 bp, Homo sapiens
tagagacagggtttcaccaatttggccaggctggtcttgaactcctaacctcaggtgatctacctgccttggcctcccaaagtgctgggattacaggcgtgagccaccgcgcccagtctaggatgtcgtttttctgatacaacaaaggataaggttttagaataatagtatgttacaatatctttaaaaacagcaggtgcggtggctcacacctgtaagcccagcattttgggggttcaaggcaggaagatcagttgaggccgggagttcaagaccagcctggactgcatagcaagatcctatttgtacaaaaaaatgtaaaacttaaaattgcacaaaatttgtcacctgtaccagcttttagaactgtttatcttatcctcctcagtgatacatcatgaagttgtgtgctttgcctaaaatgcccagttacctgaaattgtataaattcttgccaaaagtgtttgaacttaatacaaacttcccatctcttaaaaaatagcactgtgctcatcttgaggggacatagtcccaattttgtattttatataatactgttaatgaatatgtgtagacttcatatggttgtgggtaagagaatactgcattcagatagaaaagatgctatatagctaagttgatccaggatccttgggctacctgctaggcagcttgtggtgaacaatcataatctctaaaaaataccttgtctggaccgggcgcggtggctcacacctgtaatcccagcactttggcaggctgaggcgggcggatcattgaggctggtcttgaacccctgacctcaggtgattcacccgcctcagcctcccaaagtgctgggattccagatgtgagccagcgcacccagcctggccatcttttataaaaagatgaagatgtcagaattccctaataagattctggctctgttacccagactggagtgcaatgcatggcatgatctcagcacactgcaacctccatctcctgggctcaagccatcctcccacttcagtctcccaagtggctgggactacaggcacacgccaccacacctggctaatttttgtattttttgtagagacgaggtttcgccatgttacccaggctggtcttaaactcctgggttcaagtgatccacctgggcctcccaaagtgctgggattacaggcgtaagccaccgcgcccagctaatttttaaaaatattttatagagacaggtctcactatgttgcccaggctcgtcttgaacccctgggcccaggcgctcctcccaccttgacctcccaaagttctggaattacacatgtgagccaacacaccaggcccagactgggtaatttataaagaaatttacttctgcccacaccgccccgcctccccgcgcgagtggctgaggcgtagcgctgccatccccgcacccctgggaacatggcgctgcgagtggtgcggagcgtgcgggccgtgctctgcagcctgcacgtggtcctggcacctgccgcgccctgcctatcgaggccctggcagcttgggatgggcgccgtctggttactgtaatctgcctgaagttgggacaaaattgaacaaacaagatgagtttggtgctttggagagtgtgaaagctgctagtgaactctattctcctttatcaggagaagtaaccgaaattaatgaagctcttgcagaaaatccaggacttgtaaacaaatctcgttatgaagatggttggctgatcaagatgacactgagtaacccttcataactagatgaacttatgagtgaagaagcatatgagaaatacataaaatctattgaggagtgaaaatggaaccactaaataagctagtatgaaataacgcaacccagcagagttgtcctaaattagtggtggatagaagacttagaatagcaacttttagcattacccatgggaaaaaaaaactactgttaacactgctaatgaaagaagatgccttttaactttctaatgattgtagataaacataatatgtgtctttttcacaacatcctatgatttttagactaggctctagtattcatgaaattatccatgaaattatccatggtaaaaattagttacaaaaattacataattcaaagataatgttgttattcttaagccttatataatattgtaacttgtgtatgtccatacctggatttgggatgaaatacttaatgatctttccattggaaataactgggagtgaagaagtttttgttgcttgtacagtgtcagatgaagaacaacactatcttaattttgcaatacactgcatttgctggtgctgtttttatatagtgaagcaacagctgtacagcaaaataataaaatactcacttcttcgttaaaaaaaaaaaaaatttacttcttacaattctggaggccaggaagaccatgatcaggtgccagcatctgggaagggccttcttgctgtcctcccatggcagaagatggaagggcaagggagagctaacatgctcccgcaaaccctttttataatggcatcaatcaaatatgaggccagagtccttgtgacctaatcatctcccagaaggctccgcctcccaaccctgttgcattgggattaagtttccaacacatgaattgtggagacaacacattcaaaacatagcattccacaccttgggctccccagattcatgtcctcacatgcaaaataaattcattccatcccaatagcccctaaaaagtcttaacttgttccagcatcaactttaaagtcaaagtccaaagtctcatctaaatcagatatgagtgagactcaaggcatgattcatcatgagacaaaggatgtacatttgcaatgtttgtcatgtcagacaaaacaaaaatatgtaaatatccatcaatagggaactgctgaaaaatttttttgtataatcataaaatgaaacatgcagatgtttaaaccaatgagctagatctcaacgtgctgatatggaaagtgcttcagaatgtattaaggacataaattaagtgtacaataatgtgtgtgtgtgtatatatgtatatgcttacgtgtgtatggaaagtatctcagcagatacaataaaaacttaattgtgatta

SEQ ID NO: 321194 - DNA, 4277 bp, Homo sapiens
tagagacagggtttcaccaatttggccaggctggtcttgaactcctaacctcaggtgatctacctgccttggcctcccaaagtgctgggattacaggcgtgagccaccgcgcccagtctaggatgtcgtttttctgatacaacaaaggataaggttttagaataatagtatgttacaatatctttaaaaacagcaggtgcggtggctcacacctgtaagcccagcattttgggggttcaaggcaggaagatcagttgaggccgggagttcaagaccagcctggactgcatagcaagatcctatttgtacaaaaaaatgtaaaacttaaaattgcacaaaatttgtcacctgtaccagcttttagaactgtttatcttatcctcctcagtgatacatcatgaagttgtgtgctttgcctaaaatgcccagttacctgaaattgtataaattcttgccaaaagtgtttgaacttaatacaaacttcccatctcttaaaaaatagcactgtgctcatcttgaggggacatagtcccaattttgtattttatataatactgttaatgaatatgtgtagacttcatatggttgtgggtaagagaatactgcattcagatagaaaagatgctatatagctaagttgatccaggatccttgggctacctgctaggcagcttgtggtgaacaatcataatctctaaaaaataccttgtctggaccgggcgcggtggctcacacctgtaatcccagcacctcggcctcccaaagtgctgggattgcaggcatgagccactgtacccggcccctaataagttttaaataaccaatattttaaaatattttaatagttacatagcactttagtttgctgatttaatttatcccaagggacaaggatgttaatgagaaaactgactagatttcagatcacagattttaagagaacaaggatctcaaaaccaaataccctctgcttaaagtgttttttgtgtttttcactactgaaaatgtttagagattgacttacctattgctgatactcaaaacatctgatatcttaatatttttaaataactcactaaaagcatatgttgaaaatggcaatgtatagtctgagactggtgattagactggactaaaagcatatgttggaaatggcaaatatatgatctgagactggtgattaatttacagtattggcacctaaagagatactgagatgaataacttattaatttccttcttaaaatcataattttggatctgtaaaggactatacaaaaaaaaattttagtattatacctgcattttataattgtggaaatggaggccagaaagaataagaggcaagttaggggcagatcttgggtttggatcagctcttctgatgcctggttctgtgacattacaaagcctgaaattcagctccaacatctattaaacatttgcagagtatcagctgggtgcggtggctctcataaggccaggagttcaagaccagcctggccaagatggtgaagccccatctctactaaaaatacaaaaattagccgggcatggtggcaagacacctgtaatcccagctactctggaggctgagtcagagaattgcttgaacctgggaggcggaggttgcagtgatcccagatcgcgccactgcgctctagcatgggcgacaaagcgagaccccatctcaaaaagaaaaacaaaatttttttgcagagtatctactgtgtgtcaagtacattacccaagactacaaagagaaatacaatttagctaatgtcctcaagaagctaacagtatactaaaagagatatgtaggcatcaattatagtaatgacataacatattctaatagaggtaagtacataacacagtgggcatgtctagttgtctttgtttctgctgttaaaacagaatatcacagactgggtgatgggttgattgattgactgattgaggcaactctgtcacccaggctggggttcagtggcatgatcacagttcactgcagcctcaacctccctggatcaagcaatcctcctgcctcagcctcctgaacagctggaactacaggtgtgagccaccatgccccactaatttttatttatttattttttttttctgagacggagtctcagtttgtcgcccaggctgaagtgcagtggcacaatctcagctcactgcaacctccacctcccgggttcagttttcctgcctcaatctactaggatctagctaggattacaggtgtgcgccaccatgcccagctaatttttgtatttttagtagagacggggtttcaccatgttggtcaggctggtctcaaactcctgacctcatgatctgcccacctcggcctcccaaagtgctgggattacaggcgtaagccaccgcgcccagctaatttttaaaaatattttatagagacaggtctcactatgttgcccaggctcgtcttgaacccctgggcccaggcgctcctcccaccttgacctcccaaagttctggaattacacatgtgagccaacacaccaggcccagactgggtaatttataaagaaatttacttctgcccacaccgccccgcctccccgcgcgagtggctgaggcgtagcgctgccatccccgcacccctgggaacatggcgctgcgagtggtgcggagcgtgcgggccgtgctctgcagcctgcacgtggtcctggcacctgccgcgccctgcctatcgaggccctggcagcttgggatgggcgccgtctggttactgtaatctgcctgaagttgggacaaaattgaacaaacaagatgagtttggtgctttggagagtgtgaaagctgctagtgaactctattctcctttatcaggagaagtaaccgaaattaatgaagctcttgcagaaaatccaggacttgtaaacaaatctcgttatgaagatggttggctgatcaagatgacactgagtaacccttcataactagatgaacttatgagtgaagaagcatatgagaaatacataaaatctattgaggagtgaaaatggaaccactaaataagctagtatgaaataacgcaacccagcagagttgtcctaaattagtggtggatagaagacttagaatagcaacttttagcattacccatgggaaaaaaaaactactgttaacactgctaatgaaagaagatgccttttaactttctaatgattgtagataaacataatatgtgtctttttcacaacatcctatgatttttagactaggctctagtattcatgaaattatccatgaaattatccatggtaaaaattagttacaaaaattacataattcaaagataatgttgttattcttaagccttatataatattgtaacttgtgtatgtccatacctggatttgggatgaaatacttaatgatctttccattggaaataactgggagtgaagaagtttttgttgcttgtacagtgtcagatgaagaacaacactatcttaattttgcaatacactgcatttgctggtgctgtttttatatagtgaagcaacagctgtacagcaaaataataaaatactcacttcttcgttaaaaaaaaaaaaaatttacttcttacaattctggaggccaggaagaccatgatcaggtgccagcatctgggaagggccttcttgctgtcctcccatggcagaagatggaagggcaagggagagctaacatgctcccgcaaaccctttttataatggcatcaatcaaatatgaggccagagtccttgtgacctaatcatctcccagaaggctccgcctcccaaccctgttgcattgggattaagtttccaacacatgaattgtggagacaacacattcaaaacatagcattccacaccttgggctccccagattcatgtcctcacatgcaaaataaattcattccatcccaatagccctctcatctaaatcagatatgagtgagactcaaggcatgattcatcatgagacaaaggatgtacatttgcaatgtttgtcatgtcagacaaaacaaaaatatgtaaatatccatcaatagggaactgctgaaaaatttttttgtataatcataaaatgaaacatgcagatgtttaaaccaatgagctagatctcaacgtgctgatatggaaagtgcttcagaatgtattaaggacataaattaagtgtacaataatgtgtgtgtgtgtatatatgtatatgcttacgtgtgtatggaaagtatctcagcagatacaataaaaacttaattgtgatta

SEQ ID NO: 321195 - DNA, 3222 bp, Homo sapiens
tagagacagggtttcaccaatttggccaggctggtcttgaactcctaacctcaggtgatctacctgccttggcctcccaaagtgctgggattacaggcgtgagccaccgcgcccagtctaggatgtcgtttttctgatacaacaaaggataaggttttagaataatagtatgttacaatatctttaaaaacagcaggtgcggtggctcacacctgtaagcccagcattttgggggttcaaggcaggaagatcagttgaggccgggagttcaagaccagcctggactgcatagcaagatcctatttgtacaaaaaaatgtaaaacttaaaattgcacaaaatttgtcacctgtaccagcttttagaactgtttatcttatcctcctcagtgatacatcatgaagttgtgtgctttgcctaaaatgcccagttacctgaaattgtataaattcttgccaaaagtgtttgaacttaatacaaacttcccatctcttaaaaaatagcactgtgctcatcttgaggggacatagtcccaattttgtattttatataatactgttaatgaatatgtgtagacttcatatggttgtgggtaagagaatactgcattcagatagaaaagatgctatatagctaagttgatccaggatccttgggctacctgctaggcagcttgtggtgaacaatcataatctctaaaaaataccttgtctggaccgggcgcggtggctcacacctgtaatcccagcacctcggcctcccaaagtgctgggattgcaggcatgagccactgtacccggcccctaataagttttaaataaccaatattttaaaatattttaatagttacatagcactttagtttgctgatttaatttatcccaagggacaaggatgttaatgagaaaactgactagatttcagatcacagattttaagagaacaaggatctcaaaaccaaataccctctgcttaaagtgttttttgtgtttttcactactgaaaatgtttagagattgacttacctattgctgatactcaaaacatctgatatcttaatatttttaaataactcactaaaagcatatgttgaaaatggcaatgtatagtctgagactggtgattagactggactaaaagcatatgttggaaatggcaaatatatgatctgagactggtgattaatttacagtattggcacctaaagagatactgagatgaataacttattaatttccttcttaaaatcataattttggatctgtaaaggactatacaaaaaaaaattttagtattatacctgcattttataattgtggaaatggaggccagaaagaataagaggcaagttaggggcagatcttgggtttggatcagctcttctgatgcctggttctgtgacattacaaagcctgaaattcagctccaacatctattaaacatttgcagagtatcagctgggtgcggtggctctcataaggccaggagttcaagaccagcctggccaagatggtgaagccccatctctactaaaaatacaaaaattagccgggcatggtggcaagacacctgtaatcccagctactctggaggctgagtcagagaattgcttgaacctgggaggcggaggttgcagtgatcccagatcgcgccactgcgctctagcatgggcgacaaagcgagaccccatctcaaaaagaaaaacaaaatttttttgcagagtatctactgtgtgtcaagtacattacccaagactacaaagagaaatacaatttagctaatgtcctcaagaagctaacagtatactaaaagagatatgtaggcatcaattatagtaatgacataacatattctaatagaggtaagtacataacacagtgggcatgtctagttgtctttgtttctgctgttaaaacagaatatcacagactgggtgatgggttgattgattgactgattgaggcaactctgtcacccaggctggggttcagtggcatgatcacagttcactgcagcctcaacctccctggatcaagcaatcctcctgcctcagcctcctgaacagctggaactacaggtgtgagccaccatgccccactaatttttatttatttattttttttttctgagacggagtctcagtttgtcgcccaggctgaagtgcagtggcacaatctcagctcactgcaacctccacctcccgggttcagttttcctgcctcaatctactaggatctagctaggattacaggtgtgcgccaccatgcccagctaatttttgtatttttagtagagacggggtttcaccatgttggtcaggctggtctcaaactcctgacctcatgatctgcccacctcggcctcccaaagtgctgggattacaggcgtaagccactgtacccggcccctaataagttttaaataaccaatattttaaaatattttaatagttacatagcactttagtttgctgatttaatttatcccaagggacaaggatgttaatgagaaaactgactagatttcagatcacagattttaagagaacaaggatctcaaaaccaaataccctctgcttaaagtgttttttgtgtttttcactactgaaaatgtttagagattgacttacctattgctgatactcaaaacatctgatatcttaatatttttaaataactcactaaaagcatatgttgaaaatggcaatgtatagtctgagactggtgattagactggactaaaagcatatgttggaaatggcaaatatatgatctgagactggtgattaatttacagtattggcacctaaagagatactgagatgaataacttattaatttccttcttaaaatcataattttggatctgtaaaggactatacaaaaaaacaaacacaacaaaaaaacaatttttggggccgcctggaccctcgaaaagttttaaacacctcgcttggcgccgggcaccaaagttatgacatggcccaagccgccgccagagaaaccgggccggacttgtggctggttttccacataataagccggcgcagcgacgtttcgacaaatcgagtggtctgaggctatcgggtctgacgggagcaaggacgcttatcccgcgcccggcgcaggggccagacaaagaacgacggaaatgtgacgcaatacgacagagaagcgtcgacgcacacaacacacacacccacactacagatcagcagaacgac

SEQ ID NO: 321196 - DNA, 1982 bp, Homo sapiens
tagagacagggtttcaccaatttggccaggctggtcttgaactcctaacctcaggtgatctacctgccttggcctcccaaagtgctgggattacaggcgtgagccaccgcgcccagtctaggatgtcgtttttctgatacaacaaaggataaggttttagaataatagtatgttacaatatctttaaaaacagcaggtgcggtggctcacacctgtaagcccagcattttgggggttcaaggcaggaagatcagttgaggccgggagttcaagaccagcctggactgcatagcaagatcctatttgtacaaaaaaatgtaaaacttaaaattgcacaaaatttgtcacctgtaccagcttttagaactgtttatcttatcctcctcagtgatacatcatgaagttgtgtgctttgcctaaaatgcccagttacctgaaattgtataaattcttgccaaaagtgtttgaacttaatacaaacttcccatctcttaaaaaatagcactgtgctcatcttgaggggacatagtcccaattttgtattttatataatactgttaatgaatatgtgtagacttcatatggttgtgggtaagagaatactgcattcagatagaaaagatgctatatagctaagttgatccaggatccttgggctacctgctaggcagcttgtggtgaacaatcataatctctaaaaaataccttgtctggaccgggcgcggtggctcacacctgtaatcccagcactttggcaggctgaggcgggcggatcattgaggtcaggagtttgagaccagcctggccaacgtggtgaaaccctgtctctactaaaaatacaaaaattagccaggcatggtggcacatggctgtaatcccagctactggggaggctgaagcaggaaaatcgcttgaactgagagtcaaggcggaggtcgcggtaagccgagatcacaccattgcactgcagcctgggtgaagaaacaagcctccctctcaaaaaataaataaataaataaataatacctcctctgggataagtagtgctccgtctgtctcatgggcacatattagtgtcgtaatgccaaatactaaggttattgtaagcataaacattgaagataattgctagagaaaaatagactgaaaaagatgtaagaaaaatacacgtagatgagagtaacctgtctggtggaatcatgacattctaagcagtgaaggaatcaccaatgagaaaatctacaaaggctcaagatcaagtctatttaggtgaataaggcaatctagaaagaccttggaataataataccatttcctgaggaccttctaaataagtgccattaaagctttaaatacattaagactattcttcacaaaatctctgctaatagtaggtattaattgagactcaagaaatatcaaataacttatttatggctacacagctagatactaatggcaggagtgtttaattagaagtacttttactatcccaggttgcctcaaatgaaaacattttggacagcaatgtaaggtgaatagctgagcatgatggcacaagctatagccccagctacttgggaggctgaggcacaaggattgcttgagcaaatgagttgagtccagcatggacaactgtattcctgcagcctgcttgtattcctctcctcaaagtgctttttccttctctgccacatgactagtctgtgaattttccaaacttctacgctctgcttcccttttaaatatgttccaactttaagttatttcttgcttccatatctgattgtaggctgctagcatcagccaggccacatcttgaatgctttgctgcttagaaatttcttctgccagataccctgataccctaagtcatcactcttaagttcaaacttccacagattcctagggcctggacacaatgcacccaagctatttgctaaagcatgacatagatgtacctttattcctgttcccaataa

SEQ ID NO: 321197 - DNA, 194 bp, Homo sapiens
tccgctttcttcctgcagcgtgaagacacagcgcatctccccgctgtaggcttcctcccacagaacccctgggccccccaccttggtgactcgccccaccacccccagccctgtccctgccacccctcctagtggggactagtgaatgacttgacctgtgacctcaatacaataaatgtgatcccccacccaaa

SEQ ID NO: 321198 - DNA, 653 bp, Homo sapiens
  misc_feature (601)..(601): n is a, c, g, or t
ggttgagaccagcctgaccaacatggtgtaaaaccccatctctactaggaatacagaaaaattagctgggtgtggtggtaggtgcctgtggttccagctgctcaggaggctgaagcacaggaatcgcttgaacccaggaggtggaggttggagtgagccgagatcatgctactgcactctccagcctgggctacagagtgagactctcaaaaaaaaaataataataataataagagaaaatagacaaggtctccaggctggtcaactcctggcctcaaatgatcctcccacctcagcctcccaagcagccgggactacaggcaaacatcaccatgtccagctgtccccagctttctaatctggtctttctcttgccccagaacctcaagaaggcatgaagccagcccctgcagtgccgtccacccgcccctctgggcctgcctgtggctctgttgccctcctctgtggcggcaggacctttgtggggcttcgtgccctgctctggggcccaggcggggctggtccacattcccaggccccaacagccttcaaagatgggtaaaggagcttgccctcccctggggcccagagcatggggagncgcccacaaggcaggctgtccatgcagggtactaatggggatagtgaatgaa

SEQ ID NO: 321199 - DNA, 2087 bp, Homo sapiens
  misc_feature (22)..(22): n is a, c, g, or t
aaaaaaaaaaaaaaaaaaaaancaggaaccgcggctgctggacaagaggggtgcggtggatactgacctttgctccggcctcgtcgtgaagacacagcgcatctccccgctgtaggcttcctcccacagaacccgtttcgggcctcagagcgtctggtgagatgctgttgccgctgctgctgctgctacccatgtgctgggccgtggaggtcaagaggccccggggcgtctccctcaccaatcatcacttctacgatgagtccaagcctttcacctgcctggacggttcggccaccatcccatttgatcaggtcaacgatgactattgcgactgcaaagatggctctgacgagccaggcacggctgcctgtcctaatggcagcttccactgcaccaacactggctataagcccctgtatatcccctccaaccgggtcaacgatggtgtttgtgactgctgcgatggaacagacgagtacaacagcggcgtcatctgtgagaacacctgcaaagagaagggccgtaaggagagagagtccctgcagcagatggccgaggtcacccgcgaagggttccgtctgaagaagatccttattgaggactggaagaaggcacgggaggagaagcagaaaaagctcattgagctacaggctgggaagaagtctctggaagaccaggtggagatgctgcggacagtgaaggaggaagctgagaagccagagagagaggccaaagagcagcaccagaagctgtgggaagagcagctggctgctgccaaggcccaacaggagcaggagctggcggctgatgccttcaaggagctggatgatgacatggacgggacggtctcggtgactgagctgcagactcacccggagctggacacagatggggatggggcgttgtcagaagcggaagctcaggccctcctcagtggggacacacagacagacgccacctctttctacgaccgcgtctgggccgccatcagggacaagtaccggtccgaggcactgcccaccgaccttccagcaccttctgcccctgacttgacggagcccaaggaggagcagccgccagtgccctcgtcgcccacagaggaggaggaggaggaggaggaggaggaggaagaagaggctgaagaagaggaggaggaggaggattccgaggaggccccaccgccactgtcacccccgcagccggccagccctgctgaggaagacaaaatgccgccctacgacgagcagacgcaggccttcatcgatgctgcccaggaggcccgcaacaagttcgaggaggccgagcggtcgctgaaggacatggaggagtccatcaggaacctggagcaagagatttcttttgactttggccccaacggggagtttgcttacctgtacagccagtgctacgagctcaccaccaacgaatacgtctaccgcctctgccccttcaagcttgtctcgcagaaacccaaactcgggggctctcccaccagccttggcacctggggctcatggattggccccgaccacgacaagttcagtgccatgaagtatgagcaaggcacgggctgctggcagggccccaaccgctccaccaccgtgcgcctcctgtgcgggaaagagaccatggtgaccagcaccacagagcccagtcgctgcgagtacctcatggagctgatgacgccagccgcctgcccggagccaccgcctgaagcacccaccgaagacgaccatgacgagctctagctggatgggcgcagagaacctcaagaaggcatgaagccagcccctgcagtgccgtccacccgcccctctgggcctgcctgtggctctgttgccctcctctgtggcggcaggacctttgtggggcttcgtgccctgctctggggcccaggcggggctggtccacattcccaggccccaacagccttcaaagatgggtaaaggagcttgccctccctgggccccccaccttggtgactcgccccaccacccccagccctgtccctgccacccctcctagtggggactagtgaatgacttgacctgtgacctcaatacaataaatgtgatcccccacccaaa

SEQ ID NO: 321200 - DNA, 2449 bp, Homo sapiens
cggggtagagccgcgccgcaggacggagggtctggacactttggggtcacgtgctcattccgtttccctacctcccccaaccttatcccgcccctgggggttcgcgggcatttttcaggaactttctttccggcttgagaagccgccactcccaagatggaggtacgctgcgccgccattaagagctagccctcagaactatcctctctaaggtttcacagtcctgcccaagatggccgtctcggctctggcaccgcccccactcctgcctctcccaacatggcgaccctgagtctccgttcccggtgcggaacgtacgaccggaagtgacggggtccagaaatttccgctttctttctgcagcaggaaccgcggctgctggacaagaggggtgcggtggatactgacctttgctccggcctcgtcgtgaagacacagcgcatctccccgctgtaggcttcctcccacagaacccgtttcgggcctcagagcgtctggtgagatgctgttgccgctgctgctgctgctacccatgtgctgggccgtggaggtcaagaggccccggggcgtctccctcaccaatcatcacttctacgatgagtccaagcctttcacctgcctggacggttcggccaccatcccatttgatcaggtcaacgatgactattgcgactgcaaagatggctctgacgagccaggcacggctgcctgtcctaatggcagcttccactgcaccaacactggctataagcccctgtatatcccctccaaccgggtcaacgatggtgtttgtgactgctgcgatggaacagacgagtacaacagcggcgtcatctgtgagaacacctgcaaagagaagggccgtaaggagagagagtccctgcagcagatggccgaggtcacccgcgaagggttccgtctgaagaagatccttattgaggactggaagaaggcacgggaggagaagcagaaaaagctcattgagctacaggctgggaagaagtctctggaagaccaggtggagatgctgcggacagtgaaggaggaagctgagaagccagagagagaggccaaagagcagcaccagaagctgtgggaagagcagctggctgctgccaaggcccaacaggagcaggagctggcggctgatgccttcaaggagctggatgatgacatggacgggacggtctcggtgactgagctgcagactcacccggagctggacacagatggggatggggcgttgtcagaagcggaagctcaggccctcctcagtggggacacacagacagacgccacctctttctacgaccgcgtctgggccgccatcagggacaagtaccggtccgaggcactgcccaccgaccttccagcaccttctgcccctgacttgacggagcccaaggaggagcagccgccagtgccctcgtcgcccacagaggaggaggaggaggaggaggaggaggaggaagaagaggctgaagaagaggaggaggaggaggattccgaggtgcagggggagcagcccaaggaggccccaccgccactgtcacccccgcagccggccagccctgctgaggaagacaaaatgccgccctacgacgagcagacgcaggccttcatcgatgctgcccaggaggcccgcaacaagttcgaggaggccgagcggtcgctgaaggacatggaggagtccatcaggaacctggagcaagagatttcttttgactttggccccaacggggagtttgcttacctgtacagccagtgctacgagctcaccaccaacgaatacgtctaccgcctctgccccttcaagcttgtctcgcagaaacccaaactcgggggctctcccaccagccttggcacctggggctcatggattggccccgaccacgacaagttcagtgccatgaagtatgagcaaggcacgggctgctggcagggccccaaccgctccaccaccgtgcgcctcctgtgcgggaaagagaccatggtgaccagcaccacagagcccagtcgctgcgagtacctcatggagctgatgacgccagccgcctgcccggagccaccgcctgaagcacccaccgaagacgaccatgacgagctctagctggatgggcgcagagaacctcaagaaggcatgaagccagcccctgcagtgccgtccacccgcccctctgggcctgcctgtggctctgttgccctcctctgtggcggcaggacctttgtggggcttcgtgccctgctctggggcccaggcggggctggtccacattcccaggccccaacagccttcaaagatgggtaaaggagcttgccctccctgggccccccaccttggtgactcgccccaccacccccagccctgtccctgccacccctcctagtggggactagtgaatgacttgacctgtgacctcaatacaataaatgtgatcccccacccaaa

SEQ ID NO: 321201 - DNA, 2419 bp, Homo sapiens
cggggtagagccgcgccgcaggacggagggtctggacactttggggtcacgtgctcattccgtttccctacctcccccaaccttatcccgcccctgggggttcgcgggcatttttcaggaactttctttccggcttgagaagccgccactcccaagatggaggtacgctgcgccgccattaagagctagccctcagaactatcctctctaaggtttcacagtcctgcccaagatggccgtctcggctctggcaccgcccccactcctgcctctcccaacatggcgaccctgagtctccgttcccggtgcggaacgtacgaccggaagtgacggggtccagaaatttccgctttctttctgcagcaggaaccgcggctgctggacaagaggggtgcggtggatactgacctttgctccggcctcgtcgtgaagacacagcgcatctccccgctgtaggcttcctcccacagaacccgtttcgggcctcagagcgtctggtgagatgctgttgccgctgctgctgctgctacccatgtgctgggccgtggaggtcaagaggccccggggcgtctccctcaccaatcatcacttctacgatgagtccaagcctttcacctgcctggacggttcggccaccatcccatttgatcaggtcaacgatgactattgcgactgcaaagatggctctgacgagccaggcacggctgcctgtcctaatggcagcttccactgcaccaacactggctataagcccctgtatatcccctccaaccgggtcaacgatggtgtttgtgactgctgcgatggaacagacgagtacaacagcggcgtcatctgtgagaacacctgcaaagagaagggccgtaaggagagagagtccctgcagcagatggccgaggtcacccgcgaagggttccgtctgaagaagatccttattgaggactggaagaaggcacgggaggagaagcagaaaaagctcattgagctacaggctgggaagaagtctctggaagaccaggtggagatgctgcggacagtgaaggaggaagctgagaagccagagagagaggccaaagagcagcaccagaagctgtgggaagagcagctggctgctgccaaggcccaacaggagcaggagctggcggctgatgccttcaaggagctggatgatgacatggacgggacggtctcggtgactgagctgcagactcacccggagctggacacagatggggatggggcgttgtcagaagcggaagctcaggccctcctcagtggggacacacagacagacgccacctctttctacgaccgcgtctgggccgccatcagggacaagtaccggtccgaggcactgcccaccgaccttccagcaccttctgcccctgacttgacggagcccaaggaggagcagccgccagtgccctcgtcgcccacagaggaggaggaggaggaggaggaggaggaggaagaagaggctgaagaagaggaggaggaggaggattccgaggtgcagggggagcagcccaagccggccagccctgctgaggaagacaaaatgccgccctacgacgagcagacgcaggccttcatcgatgctgcccaggaggcccgcaacaagttcgaggaggccgagcggtcgctgaaggacatggaggagtccatcaggaacctggagcaagagatttcttttgactttggccccaacggggagtttgcttacctgtacagccagtgctacgagctcaccaccaacgaatacgtctaccgcctctgccccttcaagcttgtctcgcagaaacccaaactcgggggctctcccaccagccttggcacctggggctcatggattggccccgaccacgacaagttcagtgccatgaagtatgagcaaggcacgggctgctggcagggccccaaccgctccaccaccgtgcgcctcctgtgcgggaaagagaccatggtgaccagcaccacagagcccagtcgctgcgagtacctcatggagctgatgacgccagccgcctgcccggagccaccgcctgaagcacccaccgaagacgaccatgacgagctctagctggatgggcgcagagaacctcaagaaggcatgaagccagcccctgcagtgccgtccacccgcccctctgggcctgcctgtggctctgttgccctcctctgtggcggcaggacctttgtggggcttcgtgccctgctctggggcccaggcggggctggtccacattcccaggccccaacagccttcaaagatgggtaaaggagcttgccctccctgggccccccaccttggtgactcgccccaccacccccagccctgtccctgccacccctcctagtggggactagtgaatgacttgacctgtgacctcaatacaataaatgtgatcccccacccaaa

SEQ ID NO: 321202 - DNA, 2352 bp, Homo sapiens
cggggtagagccgcgccgcaggacggagggtctggacactttggggtcacgtgctcattccgtttccctacctcccccaaccttatcccgcccctgggggttcgcgggcatttttcaggaactttctttccggcttgagaagccgccactcccaagatggaggtacgctgcgccgccattaagagctagccctcagaactatcctctctaaggtttcacagtcctgcccaagatggccgtctcggctctggcaccgcccccactcctgcctctcccaacatggcgaccctgagtctccgttcccggtgcggaacgtacgaccggaagtgacggggtccagaaatttccgctttctttctgcagcaggaaccgcggctgctggacaagaggggtgcggtggatactgacctttgctccggcctcgtcgtgaagacacagcgcatctccccgctgtaggcttcctcccacagaacccgtttcgggcctcagagcgtctggtgagatgctgttgccgctgctgctgctgctacccatgtgctgggccgtggaggtcaagaggccccggggcgtctccctcaccaatcatcacttctacgatgagtccaagcctttcacctgcctggacggttcggccaccatcccatttgatcaggtcaacgatgactattgcgactgcaaagatggctctgacgagccaggcacggctgcctgtcctaatggcagcttccactgcaccaacactggctataagcccctgtatatcccctccaaccgggtcaacgatggtgtttgtgactgctgcgatggaacagacgagtacaacagcggcgtcatctgtgagaacacctgcaaagagaagggccgtaaggagagagagtccctgcagcagatggccgaggtcacccgcgaagggttccgtctgaagaagatccttattgaggactggaagaaggcacgggaggagaagcagaaaaagctcattgagctacaggctgggaagaagtctctggaagaccaggtggagatgctgcggacagtgaaggaggaagctgagaagccagagagagaggccaaagagcagcaccagaagctgtgggaagagcagctggctgctgccaaggcccaacaggagcaggagctggcggctgatgccttcaaggagctggatgatgacatggacgggacggtctcggtgactgagctgcagactcacccggagctggacacagatggggatggggcgttgtcagaagcggaagctcaggccctcctcagtggggacacacagacagacgccacctctttctacgaccgcgtctgggccgccatcagggacaagtaccggtccgaggcactgcccaccgaccttccagcaccttctgcccctgacttgacggagcccaaggaggagcagccgccagtgccctcgtcgcccacagaggaggaggaggaggaggaggaggaggaggaagaagaggctgaagaagaggaggaggaggaggattccgaggtgcagggggagcagcccaagctgcccaggaggcccgcaacaagttcgaggaggccgagcggtcgctgaaggacatggaggagtccatcaggaacctggagcaagagatttcttttgactttggccccaacggggagtttgcttacctgtacagccagtgctacgagctcaccaccaacgaatacgtctaccgcctctgccccttcaagcttgtctcgcagaaacccaaactcgggggctctcccaccagccttggcacctggggctcatggattggccccgaccacgacaagttcagtgccatgaagtatgagcaaggcacgggctgctggcagggccccaaccgctccaccaccgtgcgcctcctgtgcgggaaagagaccatggtgaccagcaccacagagcccagtcgctgcgagtacctcatggagctgatgacgccagccgcctgcccggagccaccgcctgaagcacccaccgaagacgaccatgacgagctctagctggatgggcgcagagaacctcaagaaggcatgaagccagcccctgcagtgccgtccacccgcccctctgggcctgcctgtggctctgttgccctcctctgtggcggcaggacctttgtggggcttcgtgccctgctctggggcccaggcggggctggtccacattcccaggccccaacagccttcaaagatgggtaaaggagcttgccctccctgggccccccaccttggtgactcgccccaccacccccagccctgtccctgccacccctcctagtggggactagtgaatgacttgacctgtgacctcaatacaataaatgtgatcccccacccaaa

SEQ ID NO: 321203 - DNA, 2341 bp, Homo sapiens
cggggtagagccgcgccgcaggacggagggtctggacactttggggtcacgtgctcattccgtttccctacctcccccaaccttatcccgcccctgggggttcgcgggcatttttcaggaactttctttccggcttgagaagccgccactcccaagatggaggtacgctgcgccgccattaagagctagccctcagaactatcctctctaaggtttcacagtcctgcccaagatggccgtctcggctctggcaccgcccccactcctgcctctcccaacatggcgaccctgagtctccgttcccggtgcggaacgtacgaccggaagtgacggggtccagaaatttccgctttctttctgcagcaggaaccgcggctgctggacaagaggggtgcggtggatactgacctttgctccggcctcgtcgtgaagacacagcgcatctccccgctgtaggcttcctcccacagaacccgtttcgggcctcagagcgtctggtgagatgctgttgccgctgctgctgctgctacccatgtgctgggccgtggaggtcaagaggccccggggcgtctccctcaccaatcatcacttctacgatgagtccaagcctttcacctgcctggacggttcggccaccatcccatttgatcaggtcaacgatgactattgcgactgcaaagatggctctgacgagccaggcacggctgcctgtcctaatggcagcttccactgcaccaacactggctataagcccctgtatatcccctccaaccgggtcaacgatggtgtttgtgactgctgcgatggaacagacgagtacaacagcggcgtcatctgtgagaacacctgcaaagagaagggccgtaaggagagagagtccctgcagcagatggccgaggtcacccgcgaagggttccgtctgaagaagatccttattgaggactggaagaaggcacgggaggagaagcagaaaaagctcattgagctacaggctgggaagaagtctctggaagaccaggtggagatgctgcggacagtgaaggaggaagctgagaagccagagagagaggccaaagagcagcaccagaagctgtgggaagagcagctggctgctgccaaggcccaacaggagcaggagctggcggctgatgccttcaaggagctggatgatgacatggacgggacggtctcggtgactgagctgcagactcacccggagctggacacagatggggatggggcgttgtcagaagcggaagctcaggcactgcccaccgaccttccagcaccttctgcccctgacttgacggagcccaaggaggagcagccgccagtgccctcgtcgcccacagaggaggaggaggaggaggaggaggaggaggaagaagaggctgaagaagaggaggaggaggaggattccgaggaggccccaccgccactgtcacccccgcagccggccagccctgctgaggaagacaaaatgccgccctacgacgagcagacgcaggccttcatcgatgctgcccaggaggcccgcaacaagttcgaggaggccgagcggtcgctgaaggacatggaggagtccatcaggaacctggagcaagagatttcttttgactttggccccaacggggagtttgcttacctgtacagccagtgctacgagctcaccaccaacgaatacgtctaccgcctctgccccttcaagcttgtctcgcagaaacccaaactcgggggctctcccaccagccttggcacctggggctcatggattggccccgaccacgacaagttcagtgccatgaagtatgagcaaggcacgggctgctggcagggccccaaccgctccaccaccgtgcgcctcctgtgcgggaaagagaccatggtgaccagcaccacagagcccagtcgctgcgagtacctcatggagctgatgacgccagccgcctgcccggagccaccgcctgaagcacccaccgaagacgaccatgacgagctctagctggatgggcgcagagaacctcaagaaggcatgaagccagcccctgcagtgccgtccacccgcccctctgggcctgcctgtggctctgttgccctcctctgtggcggcaggacctttgtggggcttcgtgccctgctctggggcccaggcggggctggtccacattcccaggccccaacagccttcaaagatgggtaaaggagcttgccctccctgggccccccaccttggtgactcgccccaccacccccagccctgtccctgccacccctcctagtggggactagtgaatgacttgacctgtgacctcaatacaataaatgtgatcccccacccaaa

SEQ ID NO: 321204 - DNA, 2515 bp, Homo sapiens
cggggtagagccgcgccgcaggacggagggtctggacactttggggtcacgtgctcattccgtttccctacctcccccaaccttatcccgcccctgggggttcgcgggcatttttcaggaactttctttccggcttgagaagccgccactcccaagatggaggtacgctgcgccgccattaagagctagccctcagaactatcctctctaaggtttcacagtcctgcccaagatggccgtctcggctctggcaccgcccccactcctgcctctcccaacatggcgaccctgagtctccgttcccggtgcggaacgtacgaccggaagtgacggggtccagaaatttccgctttctttctgcagcaggaaccgcggctgctggacaagaggggtgcggtggatactgacctttgctccggcctcgtcgtgaagacacagcgcatctccccgctgtaggcttcctcccacagaacccgtttcgggcctcagagcgtctggtgagatgctgttgccgctgctgctgctgctacccatgtgctgggccgtggaggtcaagaggccccggggcgtctccctcaccaatcatcacttctacgatgagtccaagcctttcacctgcctggacggttcggccaccatcccatttgatcaggtcaacgatgactattgcgactgcaaagatggctctgacgagccaggcacggctgcctgtcctaatggcagcttccactgcaccaacactggctataagcccctgtatatcccctccaaccgggtcaacgatggtgtttgtgactgctgcgatggaacagacgagtacaacagcggcgtcatctgtgagaacacctgcaaagagaagggccgtaaggagagagagtccctgcagcagatggccgaggtcacccgcgaagggttccgtctgaagaagatccttattgaggactggaagaaggcacgggaggagaagcagaaaaagctcattgagctacaggctgggaagaagtctctggaagaccaggtggagatgctgcggacagtgaaggaggaagctgagaagccagagagagaggccaaagagcagcaccagaagctgtgggaagagcagctggctgctgccaaggcccaacaggagcaggagctggcggctgatgccttcaaggagctggatgatgacatggacgggacggtctcggtgactgagctgcagactcacccggagctggacacagatggggatggggcgttgtcagaagcggaagctcaggccctcctcagtggggacacacagacagacgccacctctttctacgaccgcgtctgggccgccatcagggacaagtaccggtccgaggcactgcccaccgaccttccagcaccttctgcccctgacttgacggagcccaaggaggagcagccgccagtgccctcgtcgcccacagaggaggaggaggaggaggaggaggaggaggaagaagaggctgaagaagaggaggaggaggaggattccgaggaggccccaccgccactgtcacccccgcagccggccagccctgctgaggaagacaaaatgccgccctacgacgagcagacgcaggccttcatcgatgctgcccaggaggcccgcaacaagttcgaggaggccgagcggtcgctgaaggacatggaggagtccatcaggaacctggagcaagagatttcttttgactttggccccaacggggagtttgcttacctgtacagccagtgctacgagctcaccaccaacgaatacgtctaccgcctctgccccttcaagcttgtctcgcagaaacccaaactcgggggctctcccaccagccttgggtgagtggcttgggctggccccttccctctgcctcctcctggtgccccgacaccggcccagccctcagcaccctgtgtctctcacagcacctggggctcatggattggccccgaccacgacaagttcagtgccatgaagtatgagcaaggcacgggctgctggcagggccccaaccgctccaccaccgtgcgcctcctgtgcgggaaagagaccatggtgaccagcaccacagagcccagtcgctgcgagtacctcatggagctgatgacgccagccgcctgcccggagccaccgcctgaagcacccaccgaagacgaccatgacgagctctagctggatgggcgcagagaacctcaagaaggcatgaagccagcccctgcagtgccgtccacccgcccctctgggcctgcctgtggctctgttgccctcctctgtggcggcaggacctttgtggggcttcgtgccctgctctggggcccaggcggggctggtccacattcccaggccccaacagccttcaaagatgggtaaaggagcttgccctccctgggccccccaccttggtgactcgccccaccacccccagccctgtccctgccacccctcctagtggggactagtgaatgacttgacctgtgacctcaatacaataaatgtgatcccccacccaaa

SEQ ID NO: 321205 - DNA, 2060 bp, Homo sapiens
agaatacgcaagacaggcgcgtgttatcggacgagctgacctttgctccggcctcgtcgtgaagacacagcgcatctccccgctgtaggcttcctcccacagaacccgtttcgggcctcagagcgtctggtgagatgctgttgccgctgctgctgctgctacccatgtgctgggccgtggaggtcaagaggccccggggcgtctccctcaccaatcatcacttctacgatgagtccaagcctttcacctgcctggacggttcggccaccatcccatttgatcaggtcaacgatgactattgcgactgcaaagatggctctgacgagccaggcacggctgcctgtcctaatggcagcttccactgcaccaacactggctataagcccctgtatatcccctccaaccgggtcaacgatggtgtttgtgactgctgcgatggaacagacgagtacaacagcggcgtcatctgtgagaacacctgcaaagagaagggccgtaaggagagagagtccctgcagcagatggccgaggtcacccgcgaagggttccgtctgaagaagatccttattgaggactggaagaaggcacgggaggagaagcagaaaaagctcattgagctacaggctgggaagaagtctctggaagaccaggtggagatgctgcggacagtgaaggaggaagctgagaagccagagagagaggccaaagagcagcaccagaagctgtgggaagagcagctggctgctgccaaggcccaacaggagcaggagctggcggctgatgccttcaaggagctggatgatgacatggacgggacggtctcggtgactgagctgcagactcacccggagctggacacagatggggatggggcgttgtcagaagcggaagctcaggccctcctcagtggggacacacagacagacgccacctctttctacgaccgcgtctgggccgccatcagggacaagtaccggtccgaggcactgcccaccgaccttccagcaccttctgcccctgacttgacggagcccaaggaggagcagccgccagtgccctcgtcgcccacagaggaggaggaggaggaggaggaggaggaggaagaagaggctgaagaagaggaggaggaggaggattccgaggaggccccaccgccactgtcacccccgcagccggccagccctgctgaggaagacaaaatgccgccctacgacgagcagacgcaggccttcatcgatgctgcccaggaggcccgcaacaagttcgaggaggccgagcggtcgctgaaggacatggaggagtccatcaggaacctggagcaagagatttcttttgactttggccccaacggggagtttgcttacctgtacagccagtgctacgagctcaccaccaacgaatacgtctaccgcctctgccccttcaagcttgtctcgcagaaacccaaactcgggggctctcccaccagccttggcacctggggctcatggattggccccgaccacgacaagttcagtgccatgaagtatgagcaaggcacgggctgctggcagggccccaaccgctccaccaccgtgcgcctcctgtgcgggaaagagaccatggtgaccagcaccacagagcccagtcgctgcgagtacctcatggagctgatgacgccagccgcctgcccggagccaccgcctgaagcacccaccgaagacgaccatgacgagctctagctggatgggcgcagagaacctcaagaaggcatgaagccagcccctgcagtgccgtccacccgcccctctgggcctgcctgtggctctgttgccctcctctgtggcggcaggacctttgtggggcttcgtgccctgctctggggcccaggcggggctggtccacattcccaggccccaacagccttcaaagatgggtaaaggagcttgccctccctgggccccccaccttggtgactcgccccaccacccccagccctgtccctgccacccctcctagtggggactagtgaatgacttgacctgtgacctcaatacaataaatgtgatcccccacccaaa

SEQ ID NO: 321206 - DNA, 3100 bp, Homo sapiens
cggggtagagccgcgccgcaggacggagggtctggacactttggggtcacgtgctcattccgtttccctacctcccccaaccttatcccgcccctgggggttcgcgggcatttttcaggaactttctttccggcttgagaagccgccactcccaagatggaggtacgctgcgccgccattaagagctagccctcagaactatcctctctaaggtttcacagtcctgcccaagatggccgtctcggctctggcaccgcccccactcctgcctctcccaacatggcgaccctgagtctccgttcccggtgcggaacgtacgaccggaagtgacggggtccagaaatttccgctttctttctgcagcaggaaccgcggctgctggacaagaggggtgcggtggatactgacctttgctccggcctcgtcgtgaagacacagcgcatctccccgctgtaggcttcctcccacagaacccgtttcgggcctcagagcgtctggtgagatgctgttgccgctgctgctgctgctacccatgtgctgggccgtggaggtcaagaggccccggggcgtctccctcaccaatcatcacttctacgatgagtccaagcctttcacctgcctggacggttcggccaccatcccatttgatcaggtcaacgatgactattgcgactgcaaagatggctctgacgagccaggcacggctgcctgtcctaatggcagcttccactgcaccaacactggctataagcccctgtatatcccctccaaccgggtcaacgatggtgtttgtgactgctgcgatggaacagacgagtacaacagcggcgtcatctgtgagaacacctgcaaagagaagggccgtaaggagagagagtccctgcagcagatggccgaggtcacccgcgaagggttccgtctgaagaagatccttattgaggactggaagaaggcacgggaggagaagcagaaaaagctcattgagctacaggctgggaagaagtctctggaagaccaggtggagatgctgcggacagtgaaggaggaagctgagaagccagagagagaggccaaagagcagcaccagaagctgtgggaagagcagctggctgctgccaaggcccaacaggagcaggagctggcggctgatgccttcaaggagctggatgatgacatggacgggacggtctcggtgactgagctgcagactcacccggagctggacacagatggggatggggcgttgtcagaagcggaagctcaggccctcctcagtggggacacacagacagacgccacctctttctacgaccgcgtctgggccgccatcagggacaagtaccggtccgaggcactgcccaccgaccttccagcaccttctgcccctgacttgacggagcccaaggaggagcagccgccagtgccctcgtcgcccacagaggaggaggaggaggaggaggaggaggaggaagaagaggctgaagaagaggaggaggaggaggattccgaggaggccccaccgccactgtcacccccgcagccggccagccctgctgaggaagacaaaatgccgccctacgacgagcagacgcaggccttcatcgatgctgcccaggaggcccgcaacaagttcgaggaggccgagcggtcgctgaaggacatggaggagtccatcaggaacctggagcaagagatttcttttgactttggccccaacggggagtttgcttacctgtacagccagtgctacgagctcaccaccaacgaatacgtctaccgcctctgccccttcaagcttgtctcgcagaaacccaaactcgggggctctcccaccagccttggcacctggggctcatggattggccccgaccacgacaagttcagtgccatgaagtatgagcaaggcacgggctgctggcagggccccaaccgctccaccaccgtgcgcctcctgtgcgggaaagagaccatggtgaccagcaccacagagcccagtcgctgcgagtacctcatggagctgatgacgccagccgcctgcccggagccaccgcctgaagcacccaccgaagacgaccatgacgagctctagctggatgggcgcagaggtgggcggggaggtggagtctcgtcggcctgccccagcaaggggaggcggcgggccctgaggaagatggacccacatggccactctatcaacctgtgtccccatgttccctgcttttttgttttgtttttttgaggtggagtctcactctttggcccaggctggagtgcagtgatgcgacctcagctgactgcaacctctacctcccgggttcaaacaattgtcttgtctcagcctcccaagtagctgggattacaggtgtgcaccaccatgcctggctaatttttagtagagatggggtttcaccatgttggcctggatggtctcgaactcctgacctcagatgatccacctgccttggcctcccaaagtgctgggattacaggcatgagccaccacacccggccatctcctgcctttttttttttggatggagtttcactcttgttgccgagatcatgctactgcactctccagcctgggctacagagtgagactctcaaaaaaaaaataataataataataagagaaaatagacaaggtctccaggctggtcaactcctggcctcaaatgatcctcccacctcagcctcccaagcagccgggactacaggcaaacatcaccatgtccagctgtccccagctttctaatctggtctttctcttgccccagaacctcaagaaggcatgaagccagcccctgcagtgccgtccacccgcccctctgggcctgcctgtggctctgttgccctcctctgtggcggcaggacctttgtggggcttcgtgccctgctctggggcccaggcggggctggtccacattcccaggccccaacagccttcaaagatgggtaaaggagcttgccctccctgggccccccaccttggtgactcgccccaccacccccagccctgtccctgccacccctcctagtggggactagtgaatgacttgacctgtgacctcaatacaataaatgtgatcccccacccaaa

SEQ ID NO: 321207 - DNA, 2448 bp, Homo sapiens
cggggtagagccgcgccgcaggacggagggtctggacactttggggtcacgtgctcattccgtttccctacctcccccaaccttatcccgcccctgggggttcgcgggcatttttcaggaactttctttccggcttgagaagccgccactcccaagatggaggtacgctgcgccgccattaagagctagccctcagaactatcctctctaaggtttcacagtcctgcccaagatggccgtctcggctctggcaccgcccccactcctgcctctcccaacatggcgaccctgagtctccgttcccggtgcggaacgtacgaccggaagtgacggggtccagaaatttccgctttctttctgcagcaggaaccgcggctgctggacaagaggggtgcggtggatactgacctttgctccggcctcgtcgtgaagacacagcgcatctccccgctgtaggcttcctcccacagaacccgtttcgggcctcagagcgtctggtgagatgctgttgccgctgctgctgctgctacccatgtgctgggccgtggaggtcaagaggccccggggcgtctccctcaccaatcatcacttctacgatgagtccaagcctttcacctgcctggacggttcggccaccatcccatttgatcaggtcaacgatgactattgcgactgcaaagatggctctgacgagccaggcacggctgcctgtcctaatggcagcttccactgcaccaacactggctataagcccctgtatatcccctccaaccgggtcaacgatggtgtttgtgactgctgcgatggaacagacgagtacaacagcggcgtcatctgtgagaacacctgcaaagagaagggccgtaaggagagagagtccctgcagcagatggccgaggtcacccgcgaagggttccgtctgaagaagatccttattgaggactggaagaaggcacgggaggagaagcagaaaaagctcattgagctacaggctgggaagaagtctctggaagaccaggtggagatgctgcggacagtgaaggaggaagctgagaagccagagagagaggccaaagagcagcaccagaagctgtgggaagagcagctggctgctgccaaggcccaacaggagcaggagctggcggctgatgccttcaaggagctggatgatgacatggacgggacggtctcggtgactgagctgcagactcacccggagctggacacagatggggatggggcgttgtcagaagcggaagctcaggccctcctcagtggggacacacagacagacgccacctctttctacgaccgcgtctgggccgccatcagggacaagtaccggtccgaggcactgcccaccgaccttccagcaccttctgcccctgacttgacggagcccaaggaggagcagccgccagtgccctcgtcgcccacagaggaggaggaggaggaggaggaggaggaggaagaagaggctgaagaagaggaggaggaggaggattccgaggaggccccaccgccactgtcacccccgcagccggccagccctgctgaggaagacaaaatgccgccctacgacgagcagacgcaggccttcatcgatgctgcccaggaggcccgcaacaagttcgaggaggccgagcggtcgctgaaggacatggaggagtccatcaggaacctggagcaagagatttcttttgactttggccccaacggggagtttgcttacctgtacagccagtgctacgagctcaccaccaacgaatacgtctaccgcctctgccccttcaagcttgtctcgcagaaacccaaactcgggggctctcccaccagccttggcacctggggctcatggattggccccgaccacgacaagttcagtgccatgaagtatgagcaaggcacgggctgctggcagggccccaaccgctccaccaccgtgcgcctcctgtgcgggaaagagaccatggtgaccagcaccacagagcccagtcgctgcgagtacctcatggagctgatgacgccagccgcctgcccggagccaccgcctgaagcacccaccgaagacgaccatgacgagctctagctggatgggcgcagagaacctcaagaaggcatgaagccagcccctgcagtgccgtccacccgcccctctgggcctgcctgtggctctgttgccctcctctgtggcggcaggacctttgtggggcttcgtgccctgctctggggcccaggcggggctggtccacattcccaggccccaacagccttcaaagatgggtaaaggagcttgccctccctgggccgagctggtggtagccaaaaggtcagcggtcatagcagctggctagtgggctatgatgattgactgtgactcatacaataatgtgatcgcaccaagaaagataaaaaaaaggcggcgcaaagttctgagggcagtgtacg

SEQ ID NO: 321208 - DNA, 2428 bp, Homo sapiens
  misc_feature (2)..(2): n is a, c, g, or t
  misc_feature (500)..(500): n is a, c, g, or t
  misc_feature (502)..(503): n is a, c, g, or t
  misc_feature (506)..(506): n is a, c, g, or t
  misc_feature (510)..(511): n is a, c, g, or t
  misc_feature (514)..(514): n is a, c, g, or t
  misc_feature (517)..(517): n is a, c, g, or t
  misc_feature (524)..(524): n is a, c, g, or t
anctataggactctcagaggcaccaaggaggaggaggaggaggaggaggaagaagaggctgaagaagaggaggaggaggaggattccgaggaggccccaccgccactgtcacccccgcagccggccagccctgctgaggaagacaaaatgccgccctacgacgagcagacgcaggccttcatcgatgctgcccaggaggcccgcaacaagttcgaggaggccgagcggtcgctgaaggacatggaggagtccatcaggaacctggagcaagagatttcttttgactttggccccaacggggagtttgcttacctgtacagccagtgctacgagctcaccaccaacgaatacgtctaccgcctctgccccttcaagcttgtctcgcagaaacccaaactcgggggctctcccaccagccttggcacctggggctcatggattggccccgaccacgacaagttcagtgccatgaagtatgagcaaggcacgggctgctggcngnnccncaanngcnccnccaccgngcgctcctgtgcgggaaagagaccatggtgaccagcaccacagagcccagtcgctacatcatcacttctacgatgagtccaagcctttcacctgcctggacggttcggccaccatcccatttgatcaggtcaacgatgactattgcgactgcaaagatggctctgacgagccaggcacggctgcctgtcctaatggcagcttccactgcaccaacactggctataagcccctgtatatcccctccaaccgggtcaacgatggtgtttgtgactgctgcgatggaacagacgagtacaacagcggcgtcatctgtgagaacacctgcaaagagaagggccgtaaggagagagagtccctgcagcagatggccgaggtcacccgcgaagggttccgtctgaagaagatccttattgaggactggaagaaggcacgggaggagaagcagaaaaagctcattgagctacaggctgggaagaagtctctggaagaccaggtggagatgctgcggacagtgaaggaggaagctgagaagccagagagagaggccaaagagcagcaccagaagctgtgggaagagcagctggctgctgccaaggcccaacaggagcaggagctggcggctgatgccttcaaggagctggatgatgacatggacgggacggtctcggtgactgagctgcagactcacccggagctggacacagatggggatggggcgttgtcagaagcggaagctcaggccctcctcagtggggacacacagacagacgccacctctttctacgaccgcgtctgggccgccatcagggacaagtaccggtccgaggcactgcccaccgaccttccagcaccttctgcccctgacttgacggagcccaaggaggagcagccgccagtgccctcgtcgcccacagaggaggaggaggaggaggaggaggaggaggaagaagaggctgaagaagaggaggaggaggaggattccgaggaggccccaccgccactgtcacccccgcagccggccagccctgctgaggaagacaaaatgccgccctacgacgagcagacgcaggccttcatcgatgctgcccaggaggcccgcaacaagttcgaggaggccgagcggtcgctgaaggacatggaggagtccatcaggaacctggagcaagagatttcttttgactttggccccaacggggagtttgcttacctgtacagccagtgctacgagctcaccaccaacgaatacgtctaccgcctctgccccttcaagcttgtctcgcagaaacccaaactcgggggctctcccaccagccttggcacctggggctcatggattggccccgaccacgacaagttcagtgccatgaagtatgagcaaggcacgggctgctggcagggccccaaccgctccaccaccgtgcgcctcctgtgcgggaaagagaccatggtgaccagcaccacagagcccagtcgctgcgagtacctcatggagctgatgacgccagccgcctgcccggagccaccgcctgaagcacccaccgaagacgaccatgacgagctctagctggatgggcgcagagaacctcaagaaggcatgaagccagcccctgcagtgccgtccacccgcccctctgggcctgcctgtggctctgttgccctcctctgtggcggcaggacctttgtggggcttcgtgccctgctctggggcccaggcggggctggtccacattcccaggccccaacagccttcaaagatgggtaaaggagcttgccctccctgggccccccaccttggtgactcgccccaccacccccagccctgtccctgccacccctcctagtggggactagtgaatgacttgacctgtgacctcaatacaataaatgtgatcccccacccaaa

SEQ ID NO: 321209 - DNA, 2005 bp, Homo sapiens
gtcttctgtggtttttttatttgttttaattatgtgtaaagacagggtctttatatgttgcccaggctggttgcgaactcctgggctcaagtgatcctcctgccttggcctttcaaactgctgggattacaggcatgaaccactgcacccagctgatctcctgtctcttgagagttgatatctagctccacctcctggcactccctagtcccttccctgaccccaggggcttacagaacccactgttcctctttcaaggacaggaatgaaggatgctgatgttgagagaacctgggaggaaggcttgctctcatctttcccagcatggcttggtggggggccacagctggattgagctattttggaagaggcagacctggtggatcctaagtgccccactggtggtgcctgtgtgtctccgcaccgcagagagaagggccgtaaggagagagagtccctgcagcagatggccgaggtcacccgcgaagggttccgtctgaagaagatccttattgaggactggaagaaggcacgggaggagaagcagaaaaagctcattgagctacaggctgggaagaagtctctggaagaccaggtggagatgctgcggacagtgaaggaggaagctgagaagccagagagagaggccaaagagcagcaccagaagctgtgggaagagcagctggctgctgccaaggcccaacaggagcaggagctggcggctgatgccttcaaggagctggatgatgacatggacgggacggtctcggtgactgagctgcagactcacccggagctggacacagatggggatggggcgttgtcagaagcggaagctcaggccctcctcagtggggacacacagacagacgccacctctttctacgaccgcgtctgggccgccatcagggacaagtaccggtccgaggcactgcccaccgaccttccagcaccttctgcccctgacttgacggagcccaaggaggagcagccgccagtgccctcgtcgcccacagaggaggaggaggaggaggaggaggaggaggaagaagaggctgaagaagaggaggaggaggaggattccgaggaggccccaccgccactgtcacccccgcagccggccagccctgctgaggaagacaaaatgccgccctacgacgagcagacgcaggccttcatcgatgctgcccaggaggcccgcaacaagttcgaggaggccgagcggtcgctgaaggacatggaggagtccatcaggaacctggagcaagagatttcttttgactttggccccaacggggagtttgcttacctgtacagccagtgctacgagctcaccaccaacgaatacgtctaccgcctctgccccttcaagcttgtctcgcagaaacccaaactcgggggctctcccaccagccttggcacctggggctcatggattggccccgaccacgacaagttcagtgccatgaagtatgagcaaggcacgggctgctggcagggccccaaccgctccaccaccgtgcgcctcctgtgcgggaaagagaccatggtgaccagcaccacagagcccagtcgctgcgagtacctcatggagctgatgacgccagccgcctgcccggagccaccgcctgaagcacccaccgaagacgaccatgacgagctctagctggatgggcgcagagaacctcaagaaggcatgaagccagcccctgcagtgccgtccacccgcccctctgggcctgcctgtggctctgttgccctcctctgtggcggcaggacctttgtggggcttcgtgccctgctctggggcccaggcggggctggtccacattcccaggccccaacagccttcaaagatgggtaaaggagcttgccctccctgggccccccaccttggtgactcgccccaccacccccagccctgtccctgccacccctcctagtggggactagtgaatgacttgacctgtgacctcaatacaataaatgtgatcccccacccaaa

SEQ ID NO: 321210 - DNA, 1447 bp, Homo sapiens
tactttgggtacgtgtgactgtgtgggtcagtggtgactgttgggtgcggtgactgtgaaggaggaagctgagaagccagagagagaggccaaagagcagcaccagaagctgtgggaagagcagctggctgctgccaaggcccaacaggagcaggagctggcggctgatgccttcaaggagctggatgatgacatggacgggacggtctcggtgactgagctgcagactcacccggagctggacacagatggggatggggcgttgtcagaagcggaagctcaggccctcctcagtggggacacacagacagacgccacctctttctacgaccgcgtctgggccgccatcagggacaagtaccggtccgaggcactgcccaccgaccttccagcaccttctgcccctgacttgacggagcccaaggaggagcagccgccagtgccctcgtcgcccacagaggaggaggaggaggaggaggaggaggaggaagaagaggctgaagaagaggaggaggaggaggattccgaggaggccccaccgccactgtcacccccgcagccggccagccctgctgaggaagacaaaatgccgccctacgacgagcagacgcaggccttcatcgatgctgcccaggaggcccgcaacaagttcgaggaggccgagcggtcgctgaaggacatggaggagtccatcaggaacctggagcaagagatttcttttgactttggccccaacggggagtttgcttacctgtacagccagtgctacgagctcaccaccaacgaatacgtctaccgcctctgccccttcaagcttgtctcgcagaaacccaaactcgggggctctcccaccagccttggcacctggggctcatggattggccccgaccacgacaagttcagtgccatgaagtatgagcaaggcacgggctgctggcagggccccaaccgctccaccaccgtgcgcctcctgtgcgggaaagagaccatggtgaccagcaccacagagcccagtcgctgcgagtacctcatggagctgatgacgccagccgcctgcccggagccaccgcctgaagcacccaccgaagacgaccatgacgagctctagctggatgggcgcagagaacctcaagaaggcatgaagccagcccctgcagtgccgtccacccgcccctctgggcctgcctgtggctctgttgccctcctctgtggcggcaggacctttgtggggcttcgtgccctgctctggggcccaggcggggctggtccacattcccaggccccaacagccttcaaagatgggtaaaggagcttgccctccctgggccccccaccttggtgactcgccccaccacccccagccctgtccctgccacccctcctagtggggactagtgaatgacttgacctgtgacctcaatacaataaatgtgatcccccacccaaa

SEQ ID NO: 321211 - DNA, 1879 bp, Homo sapiens
  misc_feature (2)..(2): n is a, c, g, or t
  misc_feature (500)..(500): n is a, c, g, or t
  misc_feature (502)..(503): n is a, c, g, or t
  misc_feature (506)..(506): n is a, c, g, or t
  misc_feature (510)..(511): n is a, c, g, or t
  misc_feature (514)..(514): n is a, c, g, or t
  misc_feature (517)..(517): n is a, c, g, or t
  misc_feature (524)..(524): n is a, c, g, or t
anctataggactctcagaggcaccaaggaggaggaggaggaggaggaggaagaagaggctgaagaagaggaggaggaggaggattccgaggaggccccaccgccactgtcacccccgcagccggccagccctgctgaggaagacaaaatgccgccctacgacgagcagacgcaggccttcatcgatgctgcccaggaggcccgcaacaagttcgaggaggccgagcggtcgctgaaggacatggaggagtccatcaggaacctggagcaagagatttcttttgactttggccccaacggggagtttgcttacctgtacagccagtgctacgagctcaccaccaacgaatacgtctaccgcctctgccccttcaagcttgtctcgcagaaacccaaactcgggggctctcccaccagccttggcacctggggctcatggattggccccgaccacgacaagttcagtgccatgaagtatgagcaaggcacgggctgctggcngnnccncaanngcnccnccaccgngcgctcctgtgcgggaaagagaccatggtgaccagcaccacagagcccagtcgctacgagtacctcatggagctgatgcccgtaaggagctggatgatgacatggacgggacggtctcggtgactgagctgcagactcacccggagctggacacagatggggatggggcgttgtcagaagcggaagctcaggccctcctcagtggggacacacagacagacgccacctctttctacgaccgcgtctgggccgccatcagggacaagtaccggtccgaggcactgcccaccgaccttccagcaccttctgcccctgacttgacggagcccaaggaggagcagccgccagtgccctcgtcgcccacagaggaggaggaggaggaggaggaggaggaggaagaagaggctgaagaagaggaggaggaggaggattccgaggaggccccaccgccactgtcacccccgcagccggccagccctgctgaggaagacaaaatgccgccctacgacgagcagacgcaggccttcatcgatgctgcccaggaggcccgcaacaagttcgaggaggccgagcggtcgctgaaggacatggaggagtccatcaggaacctggagcaagagatttcttttgactttggccccaacggggagtttgcttacctgtacagccagtgctacgagctcaccaccaacgaatacgtctaccgcctctgccccttcaagcttgtctcgcagaaacccaaactcgggggctctcccaccagccttggcacctggggctcatggattggccccgaccacgacaagttcagtgccatgaagtatgagcaaggcacgggctgctggcagggccccaaccgctccaccaccgtgcgcctcctgtgcgggaaagagaccatggtgaccagcaccacagagcccagtcgctgcgagtacctcatggagctgatgacgccagccgcctgcccggagccaccgcctgaagcacccaccgaagacgaccatgacgagctctagctggatgggcgcagagaacctcaagaaggcatgaagccagcccctgcagtgccgtccacccgcccctctgggcctgcctgtggctctgttgccctcctctgtggcggcaggacctttgtggggcttcgtgccctgctctggggcccaggcggggctggtccacattcccaggccccaacagccttcaaagatgggtaaaggagcttgccctccctgggccccccaccttggtgactcgccccaccacccccagccctgtccctgccacccctcctagtggggactagtgaatgacttgacctgtgacctcaatacaataaatgtgatcccccacccaaa

SEQ ID NO: 321212 - DNA, 1597 bp, Homo sapiens
cggggtagagccgcgccgcaggacggagggtctggacactttggggtcacgtgctcattccgtttccctacctcccccaaccttatcccgcccctgggggttcgcgggcatttttcaggaactttctttccggcttgagaagccgccactcccaagatggaggtacgctgcgccgccattaagagctagccctcagaactatcctctctaaggtttcacagtcctgcccaagatggccgtctcggctctggcaccgcccccactcctgcctctcccaacatggcgaccctgagtctccgttcccggtgcggaacgtacgaccggaagtgacggggtccagaaatttccgctttctttctgcagcaggaaccgcggctgctggacaagaggggtgcggtggatactgacctttgctccggcctcgtcgtgaagacacagcgcatctccccgctgtaggcttcctcccacagaacccgtttcgggcctcagagcgtctggtgagatgctgttgccgctgctgctgctgctacccatgtgctgggccgtggaggtcaagaggccccggggcgtctccctcaccaatcatcacttctacgatgagtccaagcctttcacctgcctggacggttcggccaccatcccatttgatcaggtcaacgatgactattgcgactgcaaagatggctctgacgagccaggcacggctgcctgtcctaatggcagcttccactgcaccaacactggctataagcccctgtatatcccctccaaccgggtcaacgatggtgtttgtgactgctgcgatggaacagacgagtacaacagcggcgtcatctgtgagaacacctgcaaagagaagggccgtaaggagagagagtccctgcagcagatggccgaggtcacccgcgaagggttccgtctgaagaagatccttattgaggactggaagaaggcacgggaggagaagcagaaaaagctcattgagctacaggctgggaagaagtctctggaagaccaggtggagatgctgcggacagtgaaggaggaagctgagaagccagagagagaggccaaagagcagcaccagaagctgtgggaagagcagctggctgctgccaaggcccaacaggagcaggagctggcggctgatgccttcaaggagctggatgatgacatggacgggacggtctcggtgactgagctgcagactcacccggagctggacacagatggggatggggcgttgtcagaagcggaagctcaggccctcctcagtggggacacacagacagacgccacctctttctacgaccgcgtctgggccgccatcagggacaagtaccggtccgaggcactgcccaccgaccttccagcaccttctgcccctgacttgacggagcccaaggaggagcagccgccagtgccctcgtcgcccacagaggaggaggaggaggaggaggaggaggaggaagaagaggctgaagaagaggaggaggaggaggattccgagaggcccacgacatgtcaccccgagcggcagcctgtgagagacaatgcgccctagagagaagcgctcatccgagttgccgagagccga

SEQ ID NO: 321213 - DNA, 1869 bp, Homo sapiens
cggggtagagccgcgccgcaggacggagggtctggacactttggggtcacgtgctcattccgtttccctacctcccccaaccttatcccgcccctgggggttcgcgggcatttttcaggaactttctttccggcttgagaagccgccactcccaagatggaggtacgctgcgccgccattaagagctagccctcagaactatcctctctaaggtttcacagtcctgcccaagatggccgtctcggctctggcaccgcccccactcctgcctctcccaacatggcgaccctgagtctccgttcccggtgcggaacgtacgaccggaagtgacggggtccagaaatttccgctttctttctgcagcaggaaccgcggctgctggacaagaggggtgcggtggatactgacctttgctccggcctcgtcgtgaagacacagcgcatctccccgctgtaggcttcctcccacagaacccgtttcgggcctcagagcgtctggtgagatgctgttgccgctgctgctgctgctacccatgtgctgggccgtggaggtcaagaggccccggggcgtctccctcaccaatcatcacttctacgatgagtccaagcctttcacctgcctggacggttcggccaccatcccatttgatcaggtcaacgatgactattgcgactgcaaagatggctctgacgagccaggcacggctgcctgtcctaatggcagcttccactgcaccaacactggctataagcccctgtatatcccctccaaccgggtcaacgatggtgtttgtgactgctgcgatggaacagacgagtacaacagcggcgtcatctgtgagaacacctgcaaagagaagggccgtaaggagagagagtccctgcagcagatggccgaggtcacccgcgaagggttccgtctgaagaagaggaggaggaggaggattccgaggaggccccaccgccactgtcacccccgcagccggccagccctgctgaggaagacaaaatgccgccctacgacgagcagacgcaggccttcatcgatgctgcccaggaggcccgcaacaagttcgaggaggccgagcggtcgctgaaggacatggaggagtccatcaggaacctggagcaagagatttcttttgactttggccccaacggggagtttgcttacctgtacagccagtgctacgagctcaccaccaacgaatacgtctaccgcctctgccccttcaagcttgtctcgcagaaacccaaactcgggggctctcccaccagccttggcacctggggctcatggattggccccgaccacgacaagttcagtgccatgaagtatgagcaaggcacgggctgctggcagggccccaaccgctccaccaccgtgcgcctcctgtgcgggaaagagaccatggtgaccagcaccacagagcccagtcgctgcgagtacctcatggagctgatgacgccagccgcctgcccggagccaccgcctgaagcacccaccgaagacgaccatgacgagctctagctggatgggcgcagagaacctcaagaaggcatgaagccagcccctgcagtgccgtccacccgcccctctgggcctgcctgtggctctgttgccctcctctgtggcggcaggacctttgtggggcttcgtgccctgctctggggcccaggcggggctggtccacattcccaggccccaacagccttcaaagatgggtaaaggagcttgccctccctgggccccccaccttggtgactcgccccaccacccccagccctgtccctgccacccctcctagtggggactagtgaatgacttgacctgtgacctcaatacaataaatgtgatcccccacccaaa

SEQ ID NO: 321214 - DNA, 1523 bp, Homo sapiens
cggggtagagccgcgccgcaggacggagggtctggacactttggggtcacgtgctcattccgtttccctacctcccccaaccttatcccgcccctgggggttcgcgggcatttttcaggaactttctttccggcttgagaagccgccactcccaagatggaggtacgctgcgccgccattaagagctagccctcagaactatcctctctaaggtttcacagtcctgcccaagatggccgtctcggctctggcaccgcccccactcctgcctctcccaacatggcgaccctgagtctccgttcccggtgcggaacgtacgaccggaagtgacggggtccagaaatttccgctttctttctgcagcaggaaccgcggctgctggacaagaggggtgcggtggatactgacctttgctccggcctcgtcgtgaagacacagcgcatctccccgctgtaggcttcctcccacagaacccgtttcgggcctcagagcgtctggtgagatgctgttgccgctgctgctgctgctacccatgtgctgggccgtggaggtcaagaggccccggggcgtctccctcaccaatcatcacttctacgatgagtccaagcctttcacctgcctggacggttcggccaccatcccatttgatcaggtcaacgatgactattgcgactgcaaagatggctctgacgagccaggcacggctgcctgtcctaatggcagcttccactgcaccaacactggctataagcccctgtatatcccctccaaccgggtcaacgatggtgtttgtgactgctgcgatggaacagacgagtacaacagcggcgtcatctgtgagaacacctgcaaagagaagggccgtaaggagagagagtccctgcagcagatggccgaggtcacccgcgaagggttccgtctgaagaagatccttattgaggactggaagaaggcacgggaggagaagcagaaaaagctcattgagctacaggctgggaagaagtctctggaagaccaggtggagatgctgcggacagtgaaggaggaagctgagaagccagagagagaggccaaagagcagcaccagaagctgtgggaagagcagctggctgctgccaaggcccaacaggagcaggagctggcggctgatgccttcaaggagctggatgatgacatggacgggacggtctcggtgactgagctgcagactcacccggagctggacacagatggggatggggcgttgtcagaagcggaagctcaggccctcctcagtggggacacacagacagacgccacctctttctacgaccgcgtctgggccgccatcagggacaagtaccggtccgaggcactgcccaccgaccttccagcaccttctgcccctgacttgacggagcccaaggaggagcagccgccagtgccctcgtcccccagccctgtccctgccacccctcctagtggggactagtgaatgacttgacctgtgacctcaatacaataaatgtgatcccccacccaaa

SEQ ID NO: 321215 - DNA, 1399 bp, Homo sapiens
cggggtagagccgcgccgcaggacggagggtctggacactttggggtcacgtgctcattccgtttccctacctcccccaaccttatcccgcccctgggggttcgcgggcatttttcaggaactttctttccggcttgagaagccgccactcccaagatggaggtacgctgcgccgccattaagagctagccctcagaactatcctctctaaggtttcacagtcctgcccaagatggccgtctcggctctggcaccgcccccactcctgcctctcccaacatggcgaccctgagtctccgttcccggtgcggaacgtacgaccggaagtgacggggtccagaaatttccgctttctttctgcagcaggaaccgcggctgctggacaagaggggtgcggtggatactgacctttgctccggcctcgtcgtgaagacacagcgcatctccccgctgtaggcttcctcccacagaacccgtttcgggcctcagagcgtctggtgagatgctgttgccgctgctgctgctgctacccatgtgctgggccgtggaggtcaagaggccccggggcgtctccctcaccaatcatcacttctacgatgagtccaagcctttcacctgcctggacggttcggccaccatcccatttgatcaggtcaacgatgactattgcgactgcaaagatggctctgacgagccaggcacggctgcctgtcctaatggcagcttccactgcaccaacactggctataagcccctgtatatcccctccaaccgggtcaacgatggtgtttgtgactgctgcgatggaacagacgagtacaacagcggcgtcatctgtgagaacacctgcaaagagaagggccgtaaggagagagagtccctgcagcagatggccgaggtcacccgcgaagggttccgtctgaagaagatccttattgaggactggaagaaggcacgggaggagaagcagaaaaagctcattgagctacaggctgggaagaagtctctggaagaccaggtggagatgctgcggacagtgaaggaggaagctgagaagccagagagagaggccaaagagcagcaccagaagctgtgggaagagcagctggctgctgccaaggcccaacaggagcaggagctggcggctgatgccttcaaggagctggatgatgacatggacgggacggtctcggtgactgagctgcagactcacccggagctggacacagatggggatggggcgttgtcagaagcggaagctcaggccctcctcagtggggacacacagacagacgccacctctttctacgaccgcgtctgggccgccatcagggacaagtaccggtccgagcactgcccaccgaccttccagcatctccgctttggaaagggtaccgag

SEQ ID NO: 321216 - DNA, 1553 bp, Homo sapiens
cggggtagagccgcgccgcaggacggagggtctggacactttggggtcacgtgctcattccgtttccctacctcccccaaccttatcccgcccctgggggttcgcgggcatttttcaggaactttctttccggcttgagaagccgccactcccaagatggaggtacgctgcgccgccattaagagctagccctcagaactatcctctctaaggtttcacagtcctgcccaagatggccgtctcggctctggcaccgcccccactcctgcctctcccaacatggcgaccctgagtctccgttcccggtgcggaacgtacgaccggaagtgacggggtccagaaatttccgctttctttctgcagcaggaaccgcggctgctggacaagaggggtgcggtggatactgacctttgctccggcctcgtcgtgaagacacagcgcatctccccgctgtaggcttcctcccacagaacccgtttcgggcctcagagcgtctggtgagatgctgttgccgctgctgctgctgctacccatgtgctgggccgtggaggtcaagaggccccggggcgtctccctcaccaatcatcacttctacgatgagtccaagcctttcacctgcctggacggttcggccaccatcccatttgatcaggtcaacgatgactattgcgactgcaaagatggctctgacgagccaggcacggctgcctgtcctaatggcagcttccactgcaccaacactggctataagcccctgtatatcccctccaaccgggtcaacgatggtgtttgtgactgctgcgatggaacagacgagtacaacagcggcgtcatctgtgagaacacctgcaaagagaagggccgtaaggagagagagtccctgcagcagatggccgaggtcacccgcgaagggttccgtctgaagaagatccttattgaggactggaagaaggcacgggaggagaagcagaaaaagctcattgagctacaggctgggaagaagtctctggaagaccaggtggagatgctgcggacagtgaaggaggaagctgagaagccagagagagaggccaaagagcagcaccagaagctgtgggaagagcagctggctgctgccaaggcccaacaggagcaggagctggcggctgatgccttcaaggagctggatgatgacatggacgggacggtctcggtgactgagctgcagactcacccggagctggacacagatggggatggggcgttgtcagaagcggaagctcaggccctcctcagtggggacacacagacagacgccacctctttctacgaccgcgtctgggccgccatcagggacaagtaccggtccgagcactgcccaccgaccttccagacctcctaggcctgattgtcctgccagggtgggcagacagacagatggaccggcccacactcccagagttgctaacatggagctctgagatcaccccacttccatcatttccttctcccccaacccaacgcttttttggatcagctcagacatatttcagtataaaacagttggaaccaca

SEQ ID NO: 321217 - DNA, 1335 bp, Homo sapiens
cggggtagagccgcgccgcaggacggagggtctggacactttggggtcacgtgctcattccgtttccctacctcccccaaccttatcccgcccctgggggttcgcgggcatttttcaggaactttctttccggcttgagaagccgccactcccaagatggaggtacgctgcgccgccattaagagctagccctcagaactatcctctctaaggtttcacagtcctgcccaagatggccgtctcggctctggcaccgcccccactcctgcctctcccaacatggcgaccctgagtctccgttcccggtgcggaacgtacgaccggaagtgacggggtccagaaatttccgctttctttctgcagcaggaaccgcggctgctggacaagaggggtgcggtggatactgacctttgctccggcctcgtcgtgaagacacagcgcatctccccgctgtaggcttcctcccacagaacccgtttcgggcctcagagcgtctggtgagatgctgttgccgctgctgctgctgctacccatgtgctgggccgtggaggtcaagaggccccggggcgtctccctcaccaatcatcacttctacgatgagtccaagcctttcacctgcctggacggttcggccaccatcccatttgatcaggtcaacgatgactattgcgactgcaaagatggctctgacgagccaggcacggctgcctgtcctaatggcagcttccactgcaccaacactggctataagcccctgtatatcccctccaaccgggtcaacgatggtgtttgtgactgctgcgatggaacagacgagtacaacagcggcgtcatctgtgagaacacctgcaaagagaagggccgtaaggagagagagtccctgcagcagatggccgaggtcacccgcgaagggttccgtctgaagaagatccttattgaggactggaagaaggcacgggaggagaagcagaaaaagctcattgagctacaggctgggaagaagtctctggaagaccaggtggagatgctgcggacagtgaaggaggaagctgagaagccagagagagaggccaaagagcagcaccagaagctgtgggaagagcagctggctgctgccaaggcccaacaggagcaggagctggcggctgatgccttcaaggagctggatgatgacatggacgggacggtctcggtgactgagctgcagactcacccggagctggacacagatggggatggggcgttgtcagaagcggaagctcagccctcctagtggggactagtgaatgacttgacctgtgacctcaatacaataaatgtgatcccccacccaaa

SEQ ID NO: 321218 - DNA, 894 bp, Homo sapiens
cgacccacgcgtcgcggacgcgtgggtcgacccacgcgtccaggaaccgcggctgctggacaagaggggtgcggtggatactgacctttgctccggcctcgtcgtgaagacacagcgcatctccccgctgtaggcttcctcccacagaacccgtttcgggcctcagagcgtctggtgagatgctgttgccgctgttacctgtacagccagtgctacgagctcaccaccaacgaatacgtctaccgcctctgccccttcaagcttgtctcgcagaaacccaaactcgggggctctcccaccagccttggcacctggggctcatggattggccccgaccacgacaagttcagtgccatgaagtatgagcaaggcacgggctgctggcagggccccaaccgctccaccaccgtgcgcctcctgtgcgggaaagagaccatggtgaccagcaccacagagcccagtcgctgcgagtacctcatggagctgatgacgccagccgcctgcccggagccaccgcctgaagcacccaccgaagacgaccatgacgagctctagctggatgggcgcagagaacctcaagaaggcatgaagccagcccctgcagtgccgtccacccgcccctctgggcctgcctgtggctctgttgccctcctctgtggcggcaggacctttgtggggcttcgtgccctgctctggggcccaggcggggctggtccacattcccaggccccaacagccttcaaagatgggtaaaggagcttgccctccctgggccccccaccttggtgactcgccccaccacccccagccctgtccctgccacccctcctagtggggactagtgaatgacttgacctgtgacctcaatacaataaatgtgatcccccacccaaa

SEQ ID NO: 321219 - DNA, 933 bp, Homo sapiens
  misc_feature (2)..(2): n is a, c, g, or t
anctataggactctcagaggcaccaaggaggaggaggaggaggaggaggaagaagaggctgaagaagaggaggaggaggaggattccgaggaggccccaccgccactgtcacccccgcagccggccagccctgctgaggaagacaaaatgccgccctacgacgagcagacgcaggccttcatcgatgctgcccaggaggcccgcaacaagttcgaggaggccgagcggtcgctgaaggacatggaggagtccatcaggaacctggagcaagagatttcttttgactttggccccaacggggagtttgcttacctgtacagccagtgctacgagctcaccaccaacgacacctggggctcatggattggccccgaccacgacaagttcagtgccatgaagtatgagcaaggcacgggctgctggcagggccccaaccgctccaccaccgtgcgcctcctgtgcgggaaagagaccatggtgaccagcaccacagagcccagtcgctgcgagtacctcatggagctgatgacgccagccgcctgcccggagccaccgcctgaagcacccaccgaagacgaccatgacgagctctagctggatgggcgcagagaacctcaagaaggcatgaagccagcccctgcagtgccgtccacccgcccctctgggcctgcctgtggctctgttgccctcctctgtggcggcaggacctttgtggggcttcgtgccctgctctggggcccaggcggggctggtccacattcccaggccccaacagccttcaaagatgggtaaaggagcttgccctccctgggccccccaccttggtgactcgccccaccacccccagccctgtccctgccacccctcctagtggggactagtgaatgacttgacctgtgacctcaatacaataaatgtgatcccccacccaaa

SEQ ID NO: 321220 - DNA, 869 bp, Homo sapiens
gcccaggctggagtgcagtggcatgatcttggctcactgcagtctccacctcccgggttcaagcgattctcctgcctcagcctcctgagtagctgggattacaggcacatgccaccacatccggctaatttttcgtatttttagtagagatggagtttcatcgtgttggccaggctggtctcaaactcatcacctcaggtgacccacccgcctcggcctcctgagtagctgggcttcatggcactgaacttgtcgtggtcgggggctctcccaccagccttggcacctggggctcatggattggccccgaccacgacaagttcagtgccatgaagtatgagcaaggcacgggctgctggcagggccccaaccgctccaccaccgtgcgcctcctgtgcgggaaagagaccatggtgaccagcaccacagagcccagtcgctgcgagtacctcatggagctgatgacgccagccgcctgcccggagccaccgcctgaagcacccaccgaagacgaccatgacgagctctagctggatgggcgcagagaacctcaagaaggcatgaagccagcccctgcagtgccgtccacccgcccctctgggcctgcctgtggctctgttgccctcctctgtggcggcaggacctttgtggggcttcgtgccctgctctggggcccaggcggggctggtccacattcccaggccccaacagccttcaaagatgggtaaaggagcttgccctccctgggccccccaccttggtgactcgccccaccacccccagccctgtccctgccacccctcctagtggggactagtgaatgacttgacctgtgacctcaatacaataaatgtgatcccccacccaaa

SEQ ID NO: 321221 - DNA, 1553 bp, Homo sapiens
  misc_feature (2)..(2): n is a, c, g, or t
  misc_feature (500)..(500): n is a, c, g, or t
  misc_feature (502)..(503): n is a, c, g, or t
  misc_feature (506)..(506): n is a, c, g, or t
  misc_feature (510)..(511): n is a, c, g, or t
  misc_feature (514)..(514): n is a, c, g, or t
  misc_feature (517)..(517): n is a, c, g, or t
  misc_feature (524)..(524): n is a, c, g, or t
anctataggactctcagaggcaccaaggaggaggaggaggaggaggaggaagaagaggctgaagaagaggaggaggaggaggattccgaggaggccccaccgccactgtcacccccgcagccggccagccctgctgaggaagacaaaatgccgccctacgacgagcagacgcaggccttcatcgatgctgcccaggaggcccgcaacaagttcgaggaggccgagcggtcgctgaaggacatggaggagtccatcaggaacctggagcaagagatttcttttgactttggccccaacggggagtttgcttacctgtacagccagtgctacgagctcaccaccaacgaatacgtctaccgcctctgccccttcaagcttgtctcgcagaaacccaaactcgggggctctcccaccagccttggcacctggggctcatggattggccccgaccacgacaagttcagtgccatgaagtatgagcaaggcacgggctgctggcngnnccncaanngcnccnccaccgngcgctcctgtgcgggaaagagaccatggtgaccagcaccacagagcccagtcgctacatcatcacttctacgatgagtccaagcctttcacctgcctggacggttcggccaccatcccatttgatcaggtcaacgatgactattgcgactgcaaagatggctctgacgagccaggcacggctgcctgtcctaatggcagcttccactgcaccaacactggctataagcccctgtatatcccctccaaccgggtcaacgatggtgtttgtgactgctgcgatggaacagacgagtacaacagcggcgtcatctgtgagaacacctgcaaagagaagggccgtaaggagagagagtccctgcagcagatggccgaggtcacccgcgaagggttccgtctgaagaagatccttattgaggactggaagaaggcacgggaggagaagcagaaaaagctcattgagctacaggctgggaagaagtctctggaagaccaggtggagatgctgcggacagtgaaggaggaagctgagaagccagagagagaggccaaagagcagcaccagaagctgtgggaagagcagctggctgctgccaaggcccaacaggagcaggagctggcggctgatgccttcaaggagctggatgatgacatggacgggacggtctcggtgactgagctgcagactcacccggagctggacacagatggggatggggcgttgtcagaagcggaagctcaggccctcctcagtggggacacacagacagacgccacctctttctacgaccgcgtctgggccgccatcagggacaagtaccggtccgagcactgcccaccgaccttccagacctcctaggcctgattgtcctgccagggtgggcagacagacagatggaccggcccacactcccagagttgctaacatggagctctgagatcaccccacttccatcatttccttctcccccaacccaacgcttttttggatcagctcagacatatttcagtataaaacagttggaaccaca

SEQ ID NO: 321222 - DNA, 308 bp, Homo sapiens
cgacccacgcgtcgcggacgcgtgggtcgacccacgcgtccaggaaccgcggctgctggacaagaggggtgcggtggatactgacctttgctccggcctcgtcgtgaagacacagcgcatctccccgctgtaggcttcctcccacagaacccgtttcgggcctcagagcgtctggtgagatgctgttgccgctgctgctgctgctacccatgtgctgggccgtggaggtcaagaggccccggggcgtctccctcaccaatcatcacttctacgatgagtcagccttactgcctgacgtcgccagagtg

SEQ ID NO: 321223 - DNA, 2428 bp, Homo sapiens
cggggtagagccgcgccgcaggacggagggtctggacactttggggtcacgtgctcattccgtttccctacctcccccaaccttatcccgcccctgggggttcgcgggcatttttcaggaactttctttccggcttgagaagccgccactcccaagatggaggtacgctgcgccgccattaagagctagccctcagaactatcctctctaaggtttcacagtcctgcccaagatggccgtctcggctctggcaccgcccccactcctgcctctcccaacatggcgaccctgagtctccgttcccggtgcggaacgtacgaccggaagtgacggggtccagaaatttccgctttctttctgcagcaggaaccgcggctgctggacaagaggggtgcggtggatactgacctttgctccggcctcgtcgtgaagacacagcgcatctccccgctgtaggcttcctcccacagaacccgtttcgggcctcagagcgtctggtgagatgctgttgccgctgctgctgctgctacccatgtgctgggccgtggaggtcaagaggccccggggcgtctccctcaccaatcatcacttctacgatgagtccaagcctttcacctgcctggacggttcggccaccatcccatttgatcaggtcaacgatgactattgcgactgcaaagatggctctgacgagccaggcacggctgcctgtcctaatggcagcttccactgcaccaacactggctataagcccctgtatatcccctccaaccgggtcaacgatggtgtttgtgactgctgcgatggaacagacgagtacaacagcggcgtcatctgtgagaacacctgcaaagagaagggccgtaaggagagagagtccctgcagcagatggccgaggtcacccgcgaagggttccgtctgaagaagatccttattgaggactggaagaaggcacgggaggagaagcagaaaaagctcattgagctacaggctgggaagaagtctctggaagaccaggtggagatgctgcggacagtgaaggaggaagctgagaagccagagagagaggccaaagagcagcaccagaagctgtgggaagagcagctggctgctgccaaggcccaacaggagcaggagctggcggctgatgccttcaaggagctggatgatgacatggacgggacggtctcggtgactgagctgcagactcacccggagctggacacagatggggatggggcgttgtcagaagcggaagctcaggccctcctcagtggggacacacagacagacgccacctctttctacgaccgcgtctgggccgccatcagggacaagtaccggtccgaggcactgcccaccgaccttccagcaccttctgcccctgacttgacggagcccaaggaggagcagccgccagtgccctcgtcgcccacagaggaggaggaggaggaggaggaggaggaggaagaagaggctgaagaagaggaggaggaggaggattccgaggaggccccaccgccactgtcacccccgcagccggccagccctgctgaggaagacaaaatgccgccctacgacgagcagacgcaggccttcatcgatgctgcccaggaggcccgcaacaagttcgaggaggccgagcggtcgctgaaggacatggaggagtccatcaggaacctggagcaagagatttcttttgactttggccccaacggggagtttgcttacctgtacagccagtgctacgagctcaccaccaacgaatacgtctaccgcctctgccccttcaagcttgtctcgcagaaacccaaactcgggggctctcccaccagccttggcacctggggctcatggattggccccgaccacgacaagttcagtgccatgaagtatgagcaaggcacgggctgctggcagggccccaaccgctccaccaccgtgcgcctcctgtgcgggaaagagaccatggtgaccagcaccacagagcccagtcgctgcgagtacctcatggagctgatgacgccagccgcctgcccggagccaccgcctgaagcacccaccgaagacgaccatgacgagctctagctggatgggcgcagagaacctcaagaaggcatgaagccagcccctgcagtgccgtccacccgcccctctgggcctgcctgtggctctgttgccctcctctgtggcggcaggacctttgtggggcttcgtgccctgctctggggcccaggcggggctggtccacattcccaggccccaacagccttcaaagatgggtaaaggagcttgccctccctgggccccccaccttggtgactcgccccaccacccccagccctgtccctgccacccctcctagtggggactagtgaatgacttgacctgtgacctcaatacaataaatgtgatcccccacccaaa

SEQ ID NO: 321224 - DNA, 2105 bp, Homo sapiens
cgacccacgcgtcgcggacgcgtgggtcgacccacgcgtccaggaaccgcggctgctggacaagaggggtgcggtggatactgacctttgctccggcctcgtcgtgaagacacagcgcatctccccgctgtaggcttcctcccacagaacccgtttcgggcctcagagcgtctggtgagatgctgttgccgctgctgctgctgctacccatgtgctgggccgtggaggtcaagaggccccggggcgtctccctcaccaatcatcacttctacgatgagtccaagcctttcacctgcctggacggttcggccaccatcccatttgatcaggtcaacgatgactattgcgactgcaaagatggctctgacgagccaggcacggctgcctgtcctaatggcagcttccactgcaccaacactggctataagcccctgtatatcccctccaaccgggtcaacgatggtgtttgtgactgctgcgatggaacagacgagtacaacagcggcgtcatctgtgagaacacctgcaaagagaagggccgtaaggagagagagtccctgcagcagatggccgaggtcacccgcgaagggttccgtctgaagaagatccttattgaggactggaagaaggcacgggaggagaagcagaaaaagctcattgagctacaggctgggaagaagtctctggaagaccaggtggagatgctgcggacagtgaaggaggaagctgagaagccagagagagaggccaaagagcagcaccagaagctgtgggaagagcagctggctgctgccaaggcccaacaggagcaggagctggcggctgatgccttcaaggagctggatgatgacatggacgggacggtctcggtgactgagctgcagactcacccggagctggacacagatggggatggggcgttgtcagaagcggaagctcaggccctcctcagtggggacacacagacagacgccacctctttctacgaccgcgtctgggccgccatcagggacaagtaccggtccgaggcactgcccaccgaccttccagcaccttctgcccctgacttgacggagcccaaggaggagcagccgccagtgccctcgtcgcccacagaggaggaggaggaggaggaggaggaggaggaagaagaggctgaagaagaggaggaggaggaggattccgaggaggccccaccgccactgtcacccccgcagccggccagccctgctgaggaagacaaaatgccgccctacgacgagcagacgcaggccttcatcgatgctgcccaggaggcccgcaacaagttcgaggaggccgagcggtcgctgaaggacatggaggagtccatcaggaacctggagcaagagatttcttttgactttggccccaacggggagtttgcttacctgtacagccagtgctacgagctcaccaccaacgaatacgtctaccgcctctgccccttcaagcttgtctcgcagaaacccaaactcgggggctctcccaccagccttggcacctggggctcatggattggccccgaccacgacaagttcagtgccatgaagtatgagcaaggcacgggctgctggcagggccccaaccgctccaccaccgtgcgcctcctgtgcgggaaagagaccatggtgaccagcaccacagagcccagtcgctgcgagtacctcatggagctgatgacgccagccgcctgcccggagccaccgcctgaagcacccaccgaagacgaccatgacgagctctagctggatgggcgcagagaacctcaagaaggcatgaagccagcccctgcagtgccgtccacccgcccctctgggcctgcctgtggctctgttgccctcctctgtggcggcaggacctttgtggggcttcgtgccctgctctggggcccaggcggggctggtccacattcccaggccccaacagccttcaaagatgggtaaaggagcttgccctccctgggccccccaccttggtgactcgccccaccacccccagccctgtccctgccacccctcctagtggggactagtgaatgacttgacctgtgacctcaatacaataaatgtgatcccccacccaaa

SEQ ID NO: 321225 - DNA, 2227 bp, Homo sapiens
cggggtagagccgcgccgcaggacggagggtctggacactttggggtcacgtgctcattccgtttccctacctcccccaaccttatcccgcccctgggggttcgcgggcatttttcaggaactttctttccggcttgagaagccgccactcccaagatggagcaggaaccgcggctgctggacaagaggggtgcggtggatactgacctttgctccggcctcgtcgtgaagacacagcgcatctccccgctgtaggcttcctcccacagaacccgtttcgggcctcagagcgtctggtgagatgctgttgccgctgctgctgctgctacccatgtgctgggccgtggaggtcaagaggccccggggcgtctccctcaccaatcatcacttctacgatgagtccaagcctttcacctgcctggacggttcggccaccatcccatttgatcaggtcaacgatgactattgcgactgcaaagatggctctgacgagccaggcacggctgcctgtcctaatggcagcttccactgcaccaacactggctataagcccctgtatatcccctccaaccgggtcaacgatggtgtttgtgactgctgcgatggaacagacgagtacaacagcggcgtcatctgtgagaacacctgcaaagagaagggccgtaaggagagagagtccctgcagcagatggccgaggtcacccgcgaagggttccgtctgaagaagatccttattgaggactggaagaaggcacgggaggagaagcagaaaaagctcattgagctacaggctgggaagaagtctctggaagaccaggtggagatgctgcggacagtgaaggaggaagctgagaagccagagagagaggccaaagagcagcaccagaagctgtgggaagagcagctggctgctgccaaggcccaacaggagcaggagctggcggctgatgccttcaaggagctggatgatgacatggacgggacggtctcggtgactgagctgcagactcacccggagctggacacagatggggatggggcgttgtcagaagcggaagctcaggccctcctcagtggggacacacagacagacgccacctctttctacgaccgcgtctgggccgccatcagggacaagtaccggtccgaggcactgcccaccgaccttccagcaccttctgcccctgacttgacggagcccaaggaggagcagccgccagtgccctcgtcgcccacagaggaggaggaggaggaggaggaggaggaggaagaagaggctgaagaagaggaggaggaggaggattccgaggaggccccaccgccactgtcacccccgcagccggccagccctgctgaggaagacaaaatgccgccctacgacgagcagacgcaggccttcatcgatgctgcccaggaggcccgcaacaagttcgaggaggccgagcggtcgctgaaggacatggaggagtccatcaggaacctggagcaagagatttcttttgactttggccccaacggggagtttgcttacctgtacagccagtgctacgagctcaccaccaacgaatacgtctaccgcctctgccccttcaagcttgtctcgcagaaacccaaactcgggggctctcccaccagccttggcacctggggctcatggattggccccgaccacgacaagttcagtgccatgaagtatgagcaaggcacgggctgctggcagggccccaaccgctccaccaccgtgcgcctcctgtgcgggaaagagaccatggtgaccagcaccacagagcccagtcgctgcgagtacctcatggagctgatgacgccagccgcctgcccggagccaccgcctgaagcacccaccgaagacgaccatgacgagctctagctggatgggcgcagagaacctcaagaaggcatgaagccagcccctgcagtgccgtccacccgcccctctgggcctgcctgtggctctgttgccctcctctgtggcggcaggacctttgtggggcttcgtgccctgctctggggcccaggcggggctggtccacattcccaggccccaacagccttcaaagatgggtaaaggagcttgccctccctgggccccccaccttggtgactcgccccaccacccccagccctgtccctgccacccctcctagtggggactagtgaatgacttgacctgtgacctcaatacaataaatgtgatcccccacccaaa

SEQ ID NO: 321226 - DNA, 2353 bp, Homo sapiens
cggggtagagccgcgccgcaggacggagggtctggacactttggggtcacgtgctcattccgtttccctacctcccccaaccttatcccgcccctgggggttcgcgggcatttttcaggaactttctttccggcttgagaagccgccactcccaagatggaggtacgctgcgccgccattaagagctagccctcagaactatcctctctaaggtttcacagtcctgcccaagatggccgtctcggctctggcaccgcccccactcctgcctctcccaacatggcgaccctgagtctccgttcccggtgcggaacgtacgaccggaagtgacggggtccagaaatttccgctttctttctgcagcaggaaccgcggctgctggacaagaggggtgcggtggatactgacctttgctccggcctcgtcgtgaagacacagcgcatctccccgctgtaggcttcctcccacagaacccgtttcgggcctcagagcgtctggtgagatgctgttgccgctgctgctgctgctacccatgtgctgggccgtggaggtcaagaggccccggggcgtctccctcaccaatcatcacttctacgatgagtccaagcctttcacctgcctggacggttcggccaccatcccatttgatcaggtcaacgatgactattgcgactgcaaagatggctctgacgagccaggcacggctgcctgtcctaatggcagcttccactgcaccaacactggctataagcccctgtatatcccctccaaccgggtcaacgatggtgtttgtgactgctgcgatggaacagacgagtacaacagcggcgtcatctgtgagaacacctgcaaagagaagggccgtaaggagagagagtccctgcagcagatggccgaggtcacccgcgaagggttccgtctgaagaagatccttattgaggactggaagaaggcacgggaggagaagcagaaaaagctcattgagctacaggctgggaagaagtctctggaagaccaggtggagatgctgcggacagtgaaggaggaagctgagaagccagagagagaggccaaagagcagcaccagaagctgtgggaagagcagctggctgctgccaaggcccaacaggagcaggagctggcggctgatgccttcaaggagctggatgatgacatggacgggacggtctcggtgactgagctgcagactcacccggagctggacacagatggggatggggcgttgtcagaagcggaagctcaggccctcctcagtggggacacacagacagacgccacctctttctacgaccgcgtctgggccgccatcagggacaagtaccggtccgaggcactgcccaccgaccttccagcaccttctgcccctgacttgacggagcccaaggaggagcagccgccagtgccctcgtcgcccacagaggaggaggaggaggaggaggaggaggaggaagaagaggctgaagaagaggaggaggaggaggattccgaggaggccccaccgccactgtcacccccgcagccggccagccctgctgaggaagacaaaatgccgccctacgacgagcagacgcaggccttcatcgatgctgcccaggaggcccgcaacaagttcgaggaggccgagcggtcgctgaaggacatggaggagtccatcaggaacctggagcaagagatttcttttgactttggccccaacggggagtttgcttacctgtacagccagtgctacgagctcaccaccaacgacacctggggctcatggattggccccgaccacgacaagttcagtgccatgaagtatgagcaaggcacgggctgctggcagggccccaaccgctccaccaccgtgcgcctcctgtgcgggaaagagaccatggtgaccagcaccacagagcccagtcgctgcgagtacctcatggagctgatgacgccagccgcctgcccggagccaccgcctgaagcacccaccgaagacgaccatgacgagctctagctggatgggcgcagagaacctcaagaaggcatgaagccagcccctgcagtgccgtccacccgcccctctgggcctgcctgtggctctgttgccctcctctgtggcggcaggacctttgtggggcttcgtgccctgctctggggcccaggcggggctggtccacattcccaggccccaacagccttcaaagatgggtaaaggagcttgccctccctgggccccccaccttggtgactcgccccaccacccccagccctgtccctgccacccctcctagtggggactagtgaatgacttgacctgtgacctcaatacaataaatgtgatcccccacccaaa

SEQ ID NO: 321227 - DNA, 2685 bp, Homo sapiens
cggggtagagccgcgccgcaggacggagggtctggacactttggggtcacgtgctcattccgtttccctacctcccccaaccttatcccgcccctgggggttcgcgggcatttttcaggaactttctttccggcttgagaagccgccactcccaagatggaggtacgctgcgccgccattaagagctagccctcagaactatcctctctaaggtttcacagtcctgcccaagatggccgtctcggctctggcaccgcccccactcctgcctctcccaacatggcgaccctgagtctccgttcccggtgcggaacgtacgaccggaagtgacggggtccagaaatttccgctttctttctgcagcaggaaccgcggctgctggacaagaggggtgcggtggatactgacctttgctccggcctcgtcgtgaagacacagcgcatctccccgctgtaggcttcctcccacagaacccgtttcgggcctcagagcgtctggtgagatgctgttgccgctgctgctgctgctacccatgtgctgggccgtggaggtcaagaggccccggggcgtctccctcaccaatcatcacttctacgatgagtccaagcctttcacctgcctggacggttcggccaccatcccatttgatcaggtcaacgatgactattgcgactgcaaagatggctctgacgagccaggcacggctgcctgtcctaatggcagcttccactgcaccaacactggctataagcccctgtatatcccctccaaccgggtcaacgatggtgtttgtgactgctgcgatggaacagacgagtacaacagcggcgtcatctgtgagaacacctgcaaagagaagggccgtaaggagagagagtccctgcagcagatggccgaggtcacccgcgaagggttccgtctgaagaagatccttattgaggactggaagaaggcacgggaggagaagcagaaaaagctcattgagctacaggctgggaagaagtctctggaagaccaggtggagatgctgcggacagtgaaggaggaagctgagaagccagagagagaggccaaagagcagcaccagaagctgtgggaagagcagctggctgctgccaaggcccaacaggagcaggagctggcggctgatgccttcaaggagctggatgatgacatggacgggacggtctcggtgactgagctgcagactcacccggagctggacacagatggggatggggcgttgtcagaagcggaagctcaggccctcctcagtggggacacacagacagacgccacctctttctacgaccgcgtctgggccgccatcagggacaagtaccggtccgaggcactgcccaccgaccttccagcaccttctgcccctgacttgacggagcccaaggaggagcagccgccagtgccctcgtcgcccacagaggaggaggaggaggaggaggaggaggaggaagaagaggctgaagaagaggaggaggaggaggattccgaggaggccccaccgccactgtcacccccgcagccggccagccctgctgaggaagacaaaatgccgccctacgacgagcagacgcaggccttcatcgatgctgcccaggaggcccgcaacaagttcgaggaggccgagcggtcgctgaaggacatggaggagtccatcaggaacctggagcaagagatttcttttgactttggccccaacggggagtttgcttacctgtacagccagtgctacgagctcaccaccaacgaatacgtctaccgcctctgccccttcaagcttgtctcgcagaaacccaaactcgggggctctcccaccagccttggcacctggggctcatggattggccccgaccacgacaagttcagtgccatgaagtatgagcaaggcacgggctgctggcagggccccaaccgctccaccaccgtgcgcctcctgtgcgggaaagagaccatggtgaccagcaccacagagcccagtcgctgcgagtacctcatggagctgatgacgccagccgcctgcccggagccaccgcctgaagcacccaccgaagacgaccatgacgagctctagctggatgggcgcagaggtgggcggggaggtggagtctcgtcggcctgccccagcaaggggaggcggcgggccctgaggaagatggacccacatggccactctatcaacctgtgtccccatgttccctgcttttttgttttgtttttttgaggtggagtctcactctttggcccaggctggagtgcagtgatgcgacctcagctgactgcaacctctacctcccgggttcaaacaattgtcttgtctcagcctcccaagtagctgggattacagaacctcaagaaggcatgaagccagcccctgcagtgccgtccacccgcccctctgggcctgcctgtggctctgttgccctcctctgtggcggcaggacctttgtggggcttcgtgccctgctctggggcccaggcggggctggtccacattcccaggccccaacagccttcaaagatgggtaaaggagcttgccctccctgggccccccaccttggtgactcgccccaccacccccagccctgtccctgccacccctcctagtggggactagtgaatgacttgacctgtgacctcaatacaataaatgtgatcccccacccaaa

SEQ ID NO: 321228 - DNA, 2206 bp, Homo sapiens
cgacccacgcgtcgcggacgcgtgggtcgacccacgcgtccaggaaccgcggctgctggacaagaggggtgcggtggatactgacctttgctccggcctcgtcgtgaagacacagcgcatctccccgctgtaggcttcctcccacagaacccgtttcgggcctcagagcgtctggtgagatgctgttgccgctgctgctgctgctacccatgtgctgggccgtggaggtcaagaggccccggggcgtctccctcaccatttcccggtagtgctccgctggtggggatgggaggacagaggtggtatttggtggagaaggcgcttacctgccctgggctgagcttcctgtaccccgcagaatcatcacttctacgatgagtccaagcctttcacctgcctggacggttcggccaccatcccatttgatcaggtcaacgatgactattgcgactgcaaagatggctctgacgagccaggcacggctgcctgtcctaatggcagcttccactgcaccaacactggctataagcccctgtatatcccctccaaccgggtcaacgatggtgtttgtgactgctgcgatggaacagacgagtacaacagcggcgtcatctgtgagaacacctgcaaagagaagggccgtaaggagagagagtccctgcagcagatggccgaggtcacccgcgaagggttccgtctgaagaagatccttattgaggactggaagaaggcacgggaggagaagcagaaaaagctcattgagctacaggctgggaagaagtctctggaagaccaggtggagatgctgcggacagtgaaggaggaagctgagaagccagagagagaggccaaagagcagcaccagaagctgtgggaagagcagctggctgctgccaaggcccaacaggagcaggagctggcggctgatgccttcaaggagctggatgatgacatggacgggacggtctcggtgactgagctgcagactcacccggagctggacacagatggggatggggcgttgtcagaagcggaagctcaggccctcctcagtggggacacacagacagacgccacctctttctacgaccgcgtctgggccgccatcagggacaagtaccggtccgaggcactgcccaccgaccttccagcaccttctgcccctgacttgacggagcccaaggaggagcagccgccagtgccctcgtcgcccacagaggaggaggaggaggaggaggaggaggaggaagaagaggctgaagaagaggaggaggaggaggattccgaggaggccccaccgccactgtcacccccgcagccggccagccctgctgaggaagacaaaatgccgccctacgacgagcagacgcaggccttcatcgatgctgcccaggaggcccgcaacaagttcgaggaggccgagcggtcgctgaaggacatggaggagtccatcaggaacctggagcaagagatttcttttgactttggccccaacggggagtttgcttacctgtacagccagtgctacgagctcaccaccaacgaatacgtctaccgcctctgccccttcaagcttgtctcgcagaaacccaaactcgggggctctcccaccagccttggcacctggggctcatggattggccccgaccacgacaagttcagtgccatgaagtatgagcaaggcacgggctgctggcagggccccaaccgctccaccaccgtgcgcctcctgtgcgggaaagagaccatggtgaccagcaccacagagcccagtcgctgcgagtacctcatggagctgatgacgccagccgcctgcccggagccaccgcctgaagcacccaccgaagacgaccatgacgagctctagctggatgggcgcagagaacctcaagaaggcatgaagccagcccctgcagtgccgtccacccgcccctctgggcctgcctgtggctctgttgccctcctctgtggcggcaggacctttgtggggcttcgtgccctgctctggggcccaggcggggctggtccacattcccaggccccaacagccttcaaagatgggtaaaggagcttgccctccctgggccccccaccttggtgactcgccccaccacccccagccctgtccctgccacccctcctagtggggactagtgaatgacttgacctgtgacctcaatacaataaatgtgatcccccacccaaa

SEQ ID NO: 321229 - DNA, 3121 bp, Homo sapiens
cggggtagagccgcgccgcaggacggagggtctggacactttggggtcacgtgctcattccgtttccctacctcccccaaccttatcccgcccctgggggttcgcgggcatttttcaggaactttctttccggcttgagaagccgccactcccaagatggaggtacgctgcgccgccattaagagctagccctcagaactatcctctctaaggtttcacagtcctgcccaagatggccgtctcggctctggcaccgcccccactcctgcctctcccaacatggcgaccctgagtctccgttcccggtgcggaacgtacgaccggaagtgacggggtccagaaatttccgctttctttctgcagcaggaaccgcggctgctggacaagaggggtgcggtggatactgacctttgctccggcctcgtcgtgaagacacagcgcatctccccgctgtaggcttcctcccacagaacccgtttcgggcctcagagcgtctggtgagatgctgttgccgctgctgctgctgctacccatgtgctgggccgtggaggtcaagaggccccggggcgtctccctcaccaatcatcacttctacgatgagtccaagcctttcacctgcctggacggttcggccaccatcccatttgatcaggtcaacgatgactattgcgactgcaaagatggctctgacgagccaggcacggctgcctgtcctaatggcagcttccactgcaccaacactggctataagcccctgtatatcccctccaaccgggtcaacgatggtgtttgtgactgctgcgatggaacagacgagtacaacagcggcgtcatctgtgagaacacctgcaaagagaagggccgtaaggagagagagtccctgcagcagatggccgaggtcacccgcgaagggttccgtctgaagaagatccttattgaggactggaagaaggcacgggaggagaagcagaaaaagctcattgagctacaggctgggaagaagtctctggaagaccaggtggagatgctgcggacagtgaaggaggaagctgagaagccagagagagaggccaaagagcagcaccagaagctgtgggaagagcagctggctgctgccaaggcccaacaggagcaggagctggcggctgatgccttcaaggagctggatgatgacatggacgggacggtctcggtgactgagctgcagactcacccggagctggacacagatggggatggggcgttgtcagaagcggaagctcaggccctcctcagtggggacacacagacagacgccacctctttctacgaccgcgtctgggccgccatcagggacaagtaccggtccgaggcactgcccaccgaccttccagcaccttctgcccctgacttgacggagcccaaggaggagcagccgccagtgccctcgtcgcccacagaggaggaggaggaggaggaggaggaggaggaagaagaggctgaagaagaggaggaggaggaggattccgaggtgcagggggagcagcccaaggaggccccaccgccactgtcacccccgcagccggccagccctgctgaggaagacaaaatgccgccctacgacgagcagacgcaggccttcatcgatgctgcccaggaggcccgcaacaagttcgaggaggccgagcggtcgctgaaggacatggaggagtccatcaggaacctggagcaagagatttcttttgactttggccccaacggggagtttgcttacctgtacagccagtgctacgagctcaccaccaacgaatacgtctaccgcctctgccccttcaagcttgtctcgcagaaacccaaactcgggggctctcccaccagccttggcacctggggctcatggattggccccgaccacgacaagttcagtgccatgaagtatgagcaaggcacgggctgctggcagggccccaaccgctccaccaccgtgcgcctcctgtgcgggaaagagaccatggtgaccagcaccacagagcccagtcgctgcgagtacctcatggagctgatgacgccagccgcctgcccggagccaccgcctgaagcacccaccgaagacgaccatgacgagctctagctggatgggcgcagaggtgggcggggaggtggagtctcgtcggcctgccccagcaaggggaggcggcgggccctgaggaagatggacccacatggccactctatcaacctgtgtccccatgttccctgcttttttgttttgtttttttgaggtggagtctcactctttggcccaggctggagtgcagtgatgcgacctcagctgactgcaacctctacctcccgggttcaaacaattgtcttgtctcagcctcccaagtagctgggattacaggtgtgcaccaccatgcctggctaatttttagtagagatggggtttcaccatgttggcctggatggtctcgaactcctgacctcagatgatccacctgccttggcctcccaaagtgctgggattacaggcatgagccaccacacccggccatctcctgcctttttttttttggatggagtttcactcttgttgccgagatcatgctactgcactctccagcctgggctacagagtgagactctcaaaaaaaaaataataataataataagagaaaatagacaaggtctccaggctggtcaactcctggcctcaaatgatcctcccacctcagcctcccaagcagccgggactacaggcaaacatcaccatgtccagctgtccccagctttctaatctggtctttctcttgccccagaacctcaagaaggcatgaagccagcccctgcagtgccgtccacccgcccctctgggcctgcctgtggctctgttgccctcctctgtggcggcaggacctttgtggggcttcgtgccctgctctggggcccaggcggggctggtccacattcccaggccccaacagccttcaaagatgggtaaaggagcttgccctccctgggccccccaccttggtgactcgccccaccacccccagccctgtccctgccacccctcctagtggggactagtgaatgacttgacctgtgacctcaatacaataaatgtgatcccccacccaaa

SEQ ID NO: 321230 - DNA, 2539 bp, Homo sapiens
cggggtagagccgcgccgcaggacggagggtctggacactttggggtcacgtgctcattccgtttccctacctcccccaaccttatcccgcccctgggggttcgcgggcatttttcaggaactttctttccggcttgagaagccgccactcccaagatggaggtacgctgcgccgccattaagagctagccctcagaactatcctctctaaggtttcacagtcctgcccaagatggccgtctcggctctggcaccgcccccactcctgcctctcccaacatggcgaccctgagtctccgttcccggtgcggaacgtacgaccggaagtgacggggtccagaaatttccgctttctttctgcagcaggaaccgcggctgctggacaagaggggtgcggtggatactgacctttgctccggcctcgtcgtgaagacacagcgcatctccccgctgtaggcttcctcccacagaacccgtttcgggcctcagagcgtctggtgagatgctgttgccgctgctgctgctgctacccatgtgctgggccgtggaggtcaagaggccccggggcgtctccctcaccaatcatcacttctacgatgagtccaagcctttcacctgcctggacggttcggccaccatcccatttgatcaggtcaacgatgactattgcgactgcaaagatggctctgacgagccaggcacggctgcctgtcctaatggcagcttccactgcaccaacactggctataagcccctgtatatcccctccaaccgggtcaacgatggtgtttgtgactgctgcgatggaacagacgagtacaacagcggcgtcatctgtgagaacacctgcaaagagaagggccgtaaggagagagagtccctgcagcagatggccgaggtcacccgcgaagggttccgtctgaagaagatccttattgaggactggaagaaggcacgggaggagaagcagaaaaagctcattgagctacaggctgggaagaagtctctggaagaccaggtggagatgctgcggacagtgaaggaggaagctgagaagccagagagagaggccaaagagcagcaccagaagctgtgggaagagcagctggctgctgccaaggcccaacaggagcaggagctggcggctgatgccttcaaggagctggatgatgacatggacgggacggtctcggtgactgagctgcagactcacccggagctggacacagatggggatggggcgttgtcagaagcggaagctcaggccctcctcagtggggacacacagacagacgccacctctttctacgaccgcgtctgggccgccatcagggacaagtaccggtccgaggcactgcccaccgaccttccagcaccttctgcccctgacttgacggagcccaaggaggagcagccgccagtgccctcgtcgcccacagaggaggaggaggaggaggaggaggaggaggaagaagaggctgaagaagaggaggaggaggaggattccgaggaggccccaccgccactgtcacccccgcagccggccagccctgctgaggaagacaaaatgccgccctacgacgagcagacgcaggccttcatcgatgctgcccaggaggcccgcaacaagttcgaggaggccgagcggtcgctgaaggacatggaggagtccatcaggaacctggagcaagagatttcttttgactttggccccaacggggagtttgcttacctgtacagccagtgctacgagctcaccaccaacgaatacgtctaccgcctctgccccttcaagcttgtctcgcagaaacccaaactcgggggctctcccaccagccttggcacctggggctcatggattggccccgaccacgacaagttcagtgccatgaagtatgagcaaggcacgggctgctggcagggccccaaccgctccaccaccgtgcgcctcctgtgcgggaaagagaccatggtgaccagcaccacagagcccagtcgctgcgagtacctcatggagctgatgacgccagccgcctgcccggagccaccgcctgaagcacccaccgaagacgaccatgacgagctacctaagaacagctaaaaagagcacacccgtctatgtagcaaaatagtgggaagatttataggtagaggcgaaaaccctacgagcctggtgatagctggtggtccagatagaaatcttagttcaactttaaatttgcccaagaaccctctaaattccccttgtaaatttaactgttagtcaaagaggaaacagtcttgtgaacactagaaaaaactttgtagagagagtaacaatttacacccatagtaggctaaagcagcaccattaagacaggtcaagtcaaaacatacgttaaaatccaaattatgattctaaccatgccattttacctatagagatagtgtagtaatgaaaattctctatctaccgatatcggttcttaaaaaataaaaaaacaaaatggggggcgaattacctgggggcggtagagattagcgcagggtcaaaacggga

SEQ ID NO: 321231 - DNA, 2085 bp, Homo sapiens
cggggtagagccgcgccgcaggacggagggtctggacactttggggtcacgtgctcattccgtttccctacctcccccaaccttatcccgcccctgggggttcgcgggcatttttcaggaactttctttccggcttgagaagccgccactcccaagatggaggtacgctgcgccgccattaagagctagccctcagaactatcctctctaaggtttcacagtcctgcccaagatggccgtctcggctctggcaccgcccccactcctgcctctcccaacatggcgaccctgagtctccgttcccggtgcggaacgtacgaccggaagtgacggggtccagaaatttccgctttctttctgcagcaggaaccgcggctgctggacaagaggggtgcggtggatactgacctttgctccggcctcgtcgtgaagacacagcgcatctccccgctgtaggcttcctcccacagaacccgtttcgggcctcagagcgtctggtgagatgctgttgccgctgctgctgctgctacccatgtgctgggccgtggaggtcaagaggccccggggcgtctccctcaccaatcatcacttctacgatgagtccaagcctttcacctgcctggacggttcggccaccatcccatttgatcaggtcaacgatgactattgcgactgcaaagatggctctgacgagccaggcacggctgcctgtcctaatggcagcttccactgcaccaacactggctataagcccctgtatatcccctccaaccgggtcaacgatggtgtttgtgactgctgcgatggaacagacgagtacaacagcggcgtcatctgtgagaacacctgcaaagagaagggccgtaaggagagagagtccctgcagcagatggccgaggtcacccgcgaagggttccgtctgaagaagatccttattgaggactggaagaaggcacgggaggagaagcagaaaaagctcattgagctacaggctgggaagaagtctctggaagaccaggtggagatgctgcggacagtgaaggaggaagctgagaagccagagagagaggccaaagagcagcaccagaagctgtgggaagagcagctggctgctgccaaggcccaacaggagcaggagctggcggctgatgccttcaaggagctggatgatgacatggacgggacggtctcggtgactgagctgcagactcacccggagctggacacagatggggatggggcgttgtcagaagcggaagctcaggccctcctcagtggggacacacagacagacgccacctctttctacgaccgcgtctgggccgccatcagggacaagtaccggtccgaggcactgcccaccgaccttccagcaccttctgcccctgacttgacggagcccaaggaggagcagccgccagtgccctcgtcgcccacagaggaggaggaggaggaggaggaggaggaggaagaagaggctgaagaagaggaggaggaggaggattccgaggaggccccaccgccactgtcacccccgcagccggccagccctgctgaggaagacaaaatgccgccctacgacgagcagacgcaggccttcatcgatgctgcccaggaggcccgcaacaagttcgaggaggccgagcggtcgctgaaggacatggaggagtccatcaggaacctggagcaagagatttcttttgactttggccccaacggggagtttgcttacctgtacagccagtgctacgagctcaccaccaacgaatacgtctaccgcctctgccccttcaagcttgtctcgcagaaacccaaactcgggggctctcccaccagccttggcacctggggctcatggattggccccgaccacgacaagttcagtgccatgaagtatgagcaaggcacgggctgctggcagggccccaaccgctccaccaccgtgcgcctcctgtgcgggaaagagaccatggtgaccagcaccacagagcccagtcgctgcgagtacctcatggagctgatgacgccagccgcgtagtcagatcgccctaacacagtttctcagttcccagccgcgtagtcaat

SEQ ID NO: 321232 - DNA, 1535 bp, Homo sapiens
aactcaggggcgagctgcggtggtggcggcggctgctgctgctgctgctgctgctgctgctgctggaagcccgatggggtcatacgatcccgaggaggtgaaatcggttcggacttgatgctgatgttttggttggtattaatggataaattggaaccctgagataactgccctccagcaacaagagagctgagggctgcttgtcctagcagctggctgctgccaaggcccaacaggagcaggagctggcggctgatgccttcaaggagctggatgatgacatggacgggacggtctcggtgactgagctgcagactcacccggagctggacacagatggggatggggcgttgtcagaagcggaagctcaggccctcctcagtggggacacacagacagacgccacctctttctacgaccgcgtctgggccgccatcagggacaagtaccggtccgaggcactgcccaccgaccttccagcaccttctgcccctgacttgacggagcccaaggaggagcagccgccagtgccctcgtcgcccacagaggaggaggaggaggaggaggaggaggaggaagaagaggctgaagaagaggaggaggaggaggattccgaggaggccccaccgccactgtcacccccgcagccggccagccctgctgaggaagacaaaatgccgccctacgacgagcagacgcaggccttcatcgatgctgcccaggaggcccgcaacaagttcgaggaggccgagcggtcgctgaaggacatggaggagtccatcaggaacctggagcaagagatttcttttgactttggccccaacggggagtttgcttacctgtacagccagtgctacgagctcaccaccaacgaatacgtctaccgcctctgccccttcaagcttgtctcgcagaaacccaaactcgggggctctcccaccagccttggcacctggggctcatggattggccccgaccacgacaagttcagtgccatgaagtatgagcaaggcacgggctgctggcagggccccaaccgctccaccaccgtgcgcctcctgtgcgggaaagagaccatggtgaccagcaccacagagcccagtcgctgcgagtacctcatggagctgatgacgccagccgcctgcccggagccaccgcctgaagcacccaccgaagacgaccatgacgagctctagctggatgggcgcagagaacctcaagaaggcatgaagccagcccctgcagtgccgtccacccgcccctctgggcctgcctgtggctctgttgccctcctctgtggcggcaggacctttgtggggcttcgtgccctgctctggggcccaggcggggctggtccacattcccaggccccaacagccttcaaagatgggtaaaggagcttgccctccctgggccccccaccttggtgactcgccccaccacccccagccctgtccctgccacccctcctagtggggactagtgaatgacttgacctgtgacctcaatacaataaatgtgatcccccacccaaa

SEQ ID NO: 321233 - DNA, 1151 bp, Homo sapiens
ggcatagcgattctagaggatacccgttcgacgggtgtctaggggcgccagtcaggtacacgtaccgggtgcgagcactgcccaccgaccttccagcaccttctgcccctgacttgacggagcccaaggaggagcagccgccagtgccctcgtcgcccacagaggaggaggaggaggaggaggaggaggaggaagaagaggctgaagaagaggaggaggaggaggattccgaggaggccccaccgccactgtcacccccgcagccggccagccctgctgaggaagacaaaatgccgccctacgacgagcagacgcaggccttcatcgatgctgcccaggaggcccgcaacaagttcgaggaggccgagcggtcgctgaaggacatggaggagtccatcaggaacctggagcaagagatttcttttgactttggccccaacggggagtttgcttacctgtacagccagtgctacgagctcaccaccaacgaatacgtctaccgcctctgccccttcaagcttgtctcgcagaaacccaaactcgggggctctcccaccagccttggcacctggggctcatggattggccccgaccacgacaagttcagtgccatgaagtatgagcaaggcacgggctgctggcagggccccaaccgctccaccaccgtgcgcctcctgtgcgggaaagagaccatggtgaccagcaccacagagcccagtcgctgcgagtacctcatggagctgatgacgccagccgcctgcccggagccaccgcctgaagcacccaccgaagacgaccatgacgagctctagctggatgggcgcagagaacctcaagaaggcatgaagccagcccctgcagtgccgtccacccgcccctctgggcctgcctgtggctctgttgccctcctctgtggcggcaggacctttgtggggcttcgtgccctgctctggggcccaggcggggctggtccacattcccaggccccaacagccttcaaagatgggtaaaggagcttgccctccctgggccccccaccttggtgactcgccccaccacccccagccctgtccctgccacccctcctagtggggactagtgaatgacttgacctgtgacctcaatacaataaatgtgatcccccacccaaa

SEQ ID NO: 321234 - DNA, 1032 bp, Homo sapiens
cgacccacgcgtcgcggacgcgtgggtcgacccacgcgtcgcccacgcgtccgggacgcgtgggaggaggaggaagaagaggctgaagaagaggaggaggaggaggattccgaggaggccccaccgccactgtcacccccgcagccggccagccctgctgaggaagacaaaatgccgccctacgacgagcagacgcaggccttcatcgatgctgcccaggaggcccgcaacaagttcgaggaggccgagcggtcgctgaaggacatggaggagtccatcaggaacctggagcaagagatttcttttgactttggccccaacggggagtttgcttacctgtacagccagtgctacgagctcaccaccaacgaatacgtctaccgcctctgccccttcaagcttgtctcgcagaaacccaaactcgggggctctcccaccagccttggcacctggggctcatggattggccccgaccacgacaagttcagtgccatgaagtatgagcaaggcacgggctgctggcagggccccaaccgctccaccaccgtgcgcctcctgtgcgggaaagagaccatggtgaccagcaccacagagcccagtcgctgcgagtacctcatggagctgatgacgccagccgcctgcccggagccaccgcctgaagcacccaccgaagacgaccatgacgagctctagctggatgggcgcagagaacctcaagaaggcatgaagccagcccctgcagtgccgtccacccgcccctctgggcctgcctgtggctctgttgccctcctctgtggcggcaggacctttgtggggcttcgtgccctgctctggggcccaggcggggctggtccacattcccaggccccaacagccttcaaagatgggtaaaggagcttgccctccctgggccccccaccttggtgactcgccccaccacccccagccctgtccctgccacccctcctagtggggactagtgaatgacttgacctgtgacctcaatacaataaatgtgatcccccacccaaa

SEQ ID NO: 321235 - DNA, 1697 bp, Homo sapiens
cggggtagagccgcgccgcaggacggagggtctggacactttggggtcacgtgctcattccgtttccctacctcccccaaccttatcccgcccctgggggttcgcgggcatttttcaggaactttctttccggcttgagaagccgccactcccaagatggaggtacgctgcgccgccattaagagctagccctcagaactatcctctctaaggtttcacagtcctgcccaagatggccgtctcggctctggcaccgcccccactcctgcctctcccaacatggcgaccctgagtctccgttcccggtgcggaacgtacgaccggaagtgacggggtccagaaatttccgctttctttctgcagcaggaaccgcggctgctggacaagaggggtgcggtggatactgacctttgctccggcctcgtcgtgaagacacagcgcatctccccgctgtaggcttcctcccacagaacccgtttcgggcctcagagcgtctggtgagatgctgttgccgctgctgctgctgctacccatgtgctgggccgtggaggtcaagaggccccggggcgtctccctcaccaatcatcacttctacgatgagtccaagcctttcacctgcctggacggttcggccaccatcccatttgatcaggtcaacgatgactattgcgactgcaaagatggctctgacgagccaggcacggctgcctgtcctaatggcagcttccactgcaccaacactggctataagcccctgtatatcccctccaaccgggtcaacgatggtgtttgtgactgctgcgatggaacagacgagtacaacagcggcgtcatctgtgagaacacctgcaaagagaagggccgtaaggagagagagtccctgcagcagatggccgaggtcacccgcgaagggttccgtctgaagaagatccttattgaggactggaagaaggcacgggaggagaagcagaaaaagctcattgagctacaggctgggaagaagtctctggaagaccaggtggagatgctgcggacagtgaaggaggaagctgagaagccagagagagaggccaaagagcagcaccagaagctgtgggaagagcagctggctgctgccaaggcccaacaggagcaggagctggcggctgatgccttcaaggagctggatgatgacatggacgggacggtctcggtgactgagctgcagactcacccggagctggacacagatggggatggggcgttgtcagaagcggaagctcaggccctcctcagtggggacacacagacagacgccacccgcctgcccggagccaccgcctgaagcacccaccgaagacgaccatgacgagctctagctggatgggcgcagagaacctcaagaaggcatgaagccagcccctgcagtgccgtccacccgcccctctgggcctgcctgtggctctgttgccctcctctgtggcggcaggacctttgtggggcttcgtgccctgctctggggcccaggcggggctggtccacattcccaggccccaacagccttcaaagatgggtaaaggagcttgccctccctgggccccccaccttggtgactcgccccaccacccccagccctgtccctgccacccctcctagtggggactagtgaatgacttgacctgtgacctcaatacaataaatgtgatcccccacccaaa

SEQ ID NO: 321236 - DNA, 1520 bp, Homo sapiens
cggggtagagccgcgccgcaggacggagggtctggacactttggggtcacgtgctcattccgtttccctacctcccccaaccttatcccgcccctgggggttcgcgggcatttttcaggaactttctttccggcttgagaagccgccactcccaagatggaggtacgctgcgccgccattaagagctagccctcagaactatcctctctaaggtttcacagtcctgcccaagatggccgtctcggctctggcaccgcccccactcctgcctctcccaacatggcgaccctgagtctccgttcccggtgcggaacgtacgaccggaagtgacggggtccagaaatttccgctttctttctgcagcaggaaccgcggctgctggacaagaggggtgcggtggatactgacctttgctccggcctcgtcgtgaagacacagcgcatctccccgctgtaggcttcctcccacagaacccgtttcgggcctcagagcgtctggtgagatgctgttgccgctgctgctgctgctacccatgtgctgggccgtggaggtcaagaggccccggggcgtctccctcaccaatcatcacttctacgatgagtccaagcctttcacctgcctggacggttcggccaccatcccatttgatcaggtcaacgatgactattgcgactgcaaagatggctctgacgagccaggcacggctgcctgtcctaatggcagcttccactgcaccaacactggctataagcccctgtatatcccctccaaccgggtcaacgatggtgtttgtgactgctgcgatggaacagacgagtacaacagcggcgtcatctgtgagaacacctgcaaagagaagggccgtaaggagagagagtccctgcagcagatggccgaggtcacccgcgaagggttccgtctgaagaagatccttattgaggactggaagaaggcacgggaggagaagcagaaaaagctcattgagctacaggctgggaagaagtctctggaagaccaggtggagatgctgcggacagtgaaggaggaagctgagaagccagagagagaggccaaagagcagcaccagaagctgtgggaagagcagctggctgctgccaaggcccaacaggagcaggagctggcggctgatgccttcaaggagctggatgatgacatggacgggacggtctcggtgactgagctgcagactcacccggagctggacacagatggggatggggcgttgtcagaagcggaagctcaggccctcctcagtggggacacacagacagacgccacctctttctacgaccgcgttctggggcccaggcggggctggtccacattcccaggccccaacagccttcaaagatgggtaaaggagcttgccctccctgggccccccaccttggtgactcgccccaccacccccagccctgtccctgccacccctcctagtggggactagtgaatgacttgacctgtgacctcaatacaataaatgtgatcccccacccaaa

SEQ ID NO: 321237 - DNA, 1398 bp, Homo sapiens
cggggtagagccgcgccgcaggacggagggtctggacactttggggtcacgtgctcattccgtttccctacctcccccaaccttatcccgcccctgggggttcgcgggcatttttcaggaactttctttccggcttgagaagccgccactcccaagatggaggtacgctgcgccgccattaagagctagccctcagaactatcctctctaaggtttcacagtcctgcccaagatggccgtctcggctctggcaccgcccccactcctgcctctcccaacatggcgaccctgagtctccgttcccggtgcggaacgtacgaccggaagtgacggggtccagaaatttccgctttctttctgcagcaggaaccgcggctgctggacaagaggggtgcggtggatactgacctttgctccggcctcgtcgtgaagacacagcgcatctccccgctgtaggcttcctcccacagaacccgtttcgggcctcagagcgtctggtgagatgctgttgccgctgctgctgctgctacccatgtgctgggccgtggaggtcaagaggccccggggcgtctccctcaccaatcatcacttctacgatgagtccaagcctttcacctgcctggacggttcggccaccatcccatttgatcaggtcaacgatgactattgcgactgcaaagatggctctgacgagccaggcacggctgcctgtcctaatggcagcttccactgcaccaacactggctataagcccctgtatatcccctccaaccgggtcaacgatggtgtttgtgactgctgcgatggaacagacgagtacaacagcggcgtcatctgtgagaacacctgcaaagagaagggccgtaaggagagagagtccctgcagcagatggccgaggtcacccgcgaagggttccgtctgaagaagatccttattgaggactggaagaaggcacgggaggagaagcagaaaaagctcattgagctacaggctgggaagaagtctctggaagaccaggtggagatgctgcggacagtgaaggaggaagctgagaagccagagagagaggccaaagagcagcaccagaagctgtgggaagagcagctggctgctgccaaggcccaacaggagcaggagctggcggctgatgccttcaaggagctggatgatgacatggacgggacggtctcggtgactgagctgcagactcacccggagctggacacagatggggatggggcgttgtcagaagcggaagctcagccctcctcagtgggcgacgagggcacaggcggctgctcctccttgggctccgtcaagtcaggggcagaaggtgctggaaggtcggtgggcagtgcctcggaccggtacttgtccctgatggcggcccagacgcg

SEQ ID NO: 321238 - DNA, 1361 bp, Homo sapiens
cggggtagagccgcgccgcaggacggagggtctggacactttggggtcacgtgctcattccgtttccctacctcccccaaccttatcccgcccctgggggttcgcgggcatttttcaggaactttctttccggcttgagaagccgccactcccaagatggaggtacgctgcgccgccattaagagctagccctcagaactatcctctctaaggtttcacagtcctgcccaagatggccgtctcggctctggcaccgcccccactcctgcctctcccaacatggcgaccctgagtctccgttcccggtgcggaacgtacgaccggaagtgacggggtccagaaatttccgctttctttctgcagcaggaaccgcggctgctggacaagaggggtgcggtggatactgacctttgctccggcctcgtcgtgaagacacagcgcatctccccgctgtaggcttcctcccacagaacccgtttcgggcctcagagcgtctggtgagatgctgttgccgctgctgctgctgctacccatgtgctgggccgtggaggtcaagaggccccggggcgtctccctcaccaatcatcacttctacgatgagtccaagcctttcacctgcctggacggttcggccaccatcccatttgatcaggtcaacgatgactattgcgactgcaaagatggctctgacgagccaggcacggctgcctgtcctaatggcagcttccactgcaccaacactggctataagcccctgtatatcccctccaaccgggtcaacgatggtgtttgtgactgctgcgatggaacagacgagtacaacagcggcgtcatctgtgagaacacctgcaaagagaagggccgtaaggagagagagtccctgcagcagatggccgaggtcacccgcgaagggttccgtctgaagaagatccttattgaggactggaagaaggcacgggaggagaagcagaaaaagctcattgagctacaggctgggaagaagtctctggaagaccaggtggagatgctgcggacagtgaaggaggaagctgagaagccagagagagaggccaaagagcagcaccagaagctgtgggaagagcagctggctgctgccaaggcccaacaggagcaggagctggcggctgatgccttcaaggagctggatgatgacatggacgggacggtctcggtgactgagctgcagactcacccggagctggacacagatggggatggggcgttgtcagaagcggaagctcaggtgtgagtgagccaacttctcaggcctgatccttaaccctgtgtccactctgccttgtcttgtatttgatgtgactacatctttctcccctctttcc

SEQ ID NO: 321239 - DNA, 1178 bp, Homo sapiens
cggggtagagccgcgccgcaggacggagggtctggacactttggggtcacgtgctcattccgtttccctacctcccccaaccttatcccgcccctgggggttcgcgggcatttttcaggaactttctttccggcttgagaagccgccactcccaagatggaggtacgctgcgccgccattaagagctagccctcagaactatcctctctaaggtttcacagtcctgcccaagatggccgtctcggctctggcaccgcccccactcctgcctctcccaacatggcgaccctgagtctccgttcccggtgcggaacgtacgaccggaagtgacggggtccagaaatttccgctttctttctgcagcaggaaccgcggctgctggacaagaggggtgcggtggatactgacctttgctccggcctcgtcgtgaagacacagcgcatctccccgctgtaggcttcctcccacagaacccgtttcgggcctcagagcgtctggtgagatgctgttgccgctgctgctgctgctacccatgtgctgggccgtggaggtcaagaggccccggggcgtctccctcaccaatcatcacttctacgatgagtccaagcctttcacctgcctggacggttcggccaccatcccatttgatcaggtcaacgatgactattgcgactgcaaagatggctctgacgagccaggcacggctgcctgtcctaatggcagcttccactgcaccaacactggctataagcccctgtatatcccctccaaccgggtcaacgatggtgtttgtgactgctgcgatggaacagacgagtacaacagcggcgtcatctgtgagaacacctgcaaagagaagggccgtaaggagagagagtccctgcagcagatggccgaggtcacccgcgaagggttccgtctgaagaagatccttattgaggactggaagaaggcacgggaggagaagcagaaaaagctcattgagctacaggctgggaagaagtctctggaagaccaggtggagatgctgcggacagtgaaggaggaagctgagaagccagagagagaggccaaagagcagcaccagaagctgtgggaagagcagctggctgcttccaggcccacagagcgagctgcggctgatgccttcaggacgatcagagaaagggatctctaga

SEQ ID NO: 321240 - DNA, 780 bp, Homo sapiens
cgacccacgcgtcgcggacgcgtgggtcgacccacgcgtccaggaaccgcggctgctggacaagaggggtgcggtggatactgacctttgctccggcctcgtcgtgaagacacagcgcatctccccgctgtaggcttcctcccacagaacccgtttcgggcctcagagcgtctggtgagatgctgttgccgctgctgctgctgctacccatgtgctgggccgtggaggtcaagaggccccggggcgtctccctcaccaatcatcacttctacgatgagtccaagcctttcacctgcctggacggttcggccaccatcccatttgatcaggtcaacgatgactattgcgactgcaaagatggctctgacgagccaggtgagccttttctctgttcatccatcagatgtttattgaacactgctcagtgccaggccctgtctgtgtgaccaagatactacctctgctggctcccctttgagtgggcagaaacaagctcagaagtcagtggtcagtgttatggccccgggcagctggaggagcccagagtcgtcctcctcccaagcctcggggtcagagaaggctcctccaaggaggcacggctgcctgtcctaatggcagcttccactgcaccaacactggctataagcccctgtatatcccctccaaccgggtcaacgatggtgtttgtgactgctgcgatggaacagacgagtacaacagcggcgtcatctgtgagaacacctgcaagtacgtgggtgacagtacccctcccatcacccc

SEQ ID NO: 321241 - DNA, 282 bp, Homo sapiens
ggagatgctgcggacagtgaaggaggaagctgagaagccagagagagaggccaaagagcagcaccagaagctgtgggaaggtatggcagaaatggccaaggactcaccttcagtcctgggtgggagcaggtctgggcctaggagtctcccgctcattatctgttgtcagtttcagcaggtttttgatcatgctgcccatcgccttgtgtgctttgaggttcgcttggattgtggcatatgtcaggagcctcctttttaaaaattgtttaaataatttgtttt

SEQ ID NO: 321242 - DNA, 313 bp, Homo sapiens
aaagaggtagaaagcttatttaaaggcatactggtggatatgttctcaaatatggagagagatatggacatctaggtacatgaaacttaaagttctctaattacattcaaccccaaaagactttgccatgacacattataataaaactgtcagtaaatcaaagacacagcgaattttgaaagcagcaaaagaaaaaaacatatacatgggaacctcactgaagctatcagtatatttctcaacagaaaccttgcaggccagaaaataatagaattatatatttaagatgctgaaataaaaagcaaaaaaaaaa

SEQ ID NO: 321243 - DNA, 544 bp, Homo sapiens
ccccaacacaacttttccccttcacctctcagtacactatataatttgcttattgtttttattagggaattgcctccccctgccccctgcttttaagcatcagctccatgaggacaaaaatttttattttgtccacagctgtctccccagtgcctgaaactgtccctggcactttgctccataagccatttttggtgtaatgctcacaaacattttgttcaataagcaaaagtaaagaacagccccaaactgtgtgactatggggcattcctgttaaatccagccccctcctcccccataccccaagagggcaggcccttcttcccacagaggtggggctatcaaaagaaattgggaggctgggtgtgagctggagaagccacaaggggcctggaggcagagctgtgcagaaaataggtcgcagtcctagaactggcaggtcatgacagctggacatgggtgaaggggctttcggccttagccctccactccaaatttggaagcacggaggaagttgacgacatgtgactgggaaagaagcggc

SEQ ID NO: 321244 - DNA, 513 bp, Homo sapiens
cagaaaattggtaccggggaagttgggcattgctattagaggtactgagaggtacttagagaaagaagaaataaaaactaaaagagaaaacaagttttcctgtattaggctgtgtcatcccaaaaagcagtgacagacacagcccaggcccaggcaaggtcctgataacactatctaaaaagtcagaacccaaaaggaatgttctcttgagactctcccagcactccccaacataaggataagaaaaacaaaattcctcttttagccctttacccactccccataaatattttgcaagttttgtaagttccggtttctccttcaatgcagctgcaaggtcacaagctatgctggatattacgagacctgtcactatttaattaactgtccttgttctgcttctgtaagcttgcttatgaaaatcaagccctttctttgttctaggctcagctttttggatatgaatccactgagccattgtacactttaataaaaatcctcctgtaataccca

SEQ ID NO: 321245 - DNA, 559 bp, Homo sapiens
ttctcagcagttgttagaacaagtagctggaaagtctggatatggaagattcaaacaatactatcaatcaacttgatcaaattgatattacagaacactgcattcaacaacagcagggtgtacattctttttaagtgcacatggggtattcaccatgatagactatatgctgggttataaaagcttctcaacaaatttaaaaggattaaaattatatgaggtctgtttgttgaccaccatggaattgggtaagaagtcaaaagcattaagatatcaagaaaattcccaaatacttggaaattaaatatcacacttctaaataagccatagatcaaagaagaaatcaccaggaaattagaatttatttgaaccttattgataataaaaacacaatatatcccagtgtatgggatgaagctaaagcagtgcttagatggaaatgtgtaggttaaatgcttatgttagaaaagaagaaagttctaaaatcagtgatctagcttccacattaagaagctaacaacaacaacaaaaatactaaccttaagtacgtagaaaaaag

SEQ ID NO: 321246 - DNA, 426 bp, Homo sapiens
agatgcacaatagaattgtaacaaaaaacatttggggcccggaaaaggaaaaaaaaaaattttgggggggggggttttttaaaattttcaaaaatttaaaattttgtggggggtttgaaattttccccccccccccaaatttttttttggttttgggttaaaaaaaaacaaaaaaaatgtatatttatatattaatatgcaaagaaaaagctaaaagtatagacttcaaaggcataacagtggttgtgtggtaagataataggtgattttttaaatttttgttttatctgaatttctcattttttcaggacaaacgttttacttgtgttgcaaaaatatataatgaaaaaatcacacaattttgaagaaaactgtcaatcagcttataacgacaatgtggcacttaataaatacttgtcagaactt

SEQ ID NO: 321247 - DNA, 1168 bp, Homo sapiens
cactccccgccccctaccctgtcttgcgtctgtgtgcaggtctgctggtcacagcggggcacctcgaggagaggacgactaggagcacacggcccggaaaggtccagaataactgtgcttgaagaagaaaattcccaacatggacaaaccacgcaaagaaaatgaagaagagccgcagagcgcgcccaagaccgatgaggagaggcctccggtggagcactctcccgaaaagcagtcccccgaggagcagtcttcggaggagcagtcctcggaggaggagttctttcctgaggagctcttgcctgagctcctgcctgagatgctcctctcggaggagcgccctccgcaggagggtctttccaggaaggacctgtttgaggggcgccctcccatggagcagcctccttgtggagtaggaaaacataagcttgaagaaggaagctttaaagaaaggttggctcgttctcgcccgcaatttagaggggacatacatggcagaaatttaagcaatgaggagatgatacaggcagcagatgagctagaagagatgaaaagagtaagaaacaaactgatgataatgcactggaaggcaaaacggagccgtccttatcctatttaatgtgttcggcctttaattctgttttgcctgctaatagtattgccattgccacctggactttctgtttgcattttcttaatgccttttcccatattctgaattttaactttttgtgaggctttattttagatgtttagcatgtaactcgcttaaagttgaggtttccccctaaaatctacaagtttccctctttcagtcatgagccctacacatttgcatgaaagatgtacattatatattgtgaaacgaaaaaagcaattttcaaatggtatatattgtatcccatttttgtaaaaaaaatgtatatttatatattaatatgcaaagaaaaagctaaaagtatagacttcaaaggcataacagtggttgtgtggtaagataataggtgattttttaaatttttgttttatctgaatttctcattttttcaggacaaacgttttacttgtgttgcaaaaatatataatgaaaaaatcacacaattttgaagaaaactgtcaatcagcttataacgacaatgtggcacttaataaatacttgtcagaactt

SEQ ID NO: 321248 - DNA, 1515 bp, Homo sapiens
gtcttttttttgcctgtccaccatctccctattaccctttggtcgagagggaaagcagaagaagtctgctggtcacagcggggcacctcgaggagaggacgactaggagcacacggcccggaaaggtccaggtcagggaaggggtacgcagtgggccgggactggggcgcgagggtggacgccgaaaggcatggagtctgcaggccgcactgtcccgcccctgtcactgcgggcgaggcctgtagcaaagcctgctgggaaaatggtgggctttcgggaaggagggggcgaccgggaagcggcggagtcgggagagccggagagcctctgggaaagcgcaaggttgaggacctggcccccgaatcaggaaaaggcaggtattggaacccacggcctgggtgttagtccagccgcttagtattctgactctattctgcctttcttgtctcctaagaataactgtgcttgaagaagaaaattcccaacatggacaaaccacgcaaagaaaatgaagaagagccgcagagcgcgcccaagaccgatgaggagaggcctccggtggagcactctcccgaaaagcagtcccccgaggagcagtcttcggaggagcagtcctcggaggaggagttctttcctgaggagctcttgcctgagctcctgcctgagatgctcctctcggaggagcgccctccgcaggagggtctttccaggaaggacctgtttgaggggcgccctcccatggagcagcctccttgtggagtaggaaaacataagcttgaagaaggaagctttaaagaaaggttggctcgttctcgcccgcaatttagaggggacatacatggcagaaatttaagcaatgaggagatgatacaggcagcagatgagctagaagagatgaaaagagtaagaaacaaactgatgataatgcactggaaggcaaaacggagccgtccttatcctatttaatgtgttcggcctttaattctgttttgcctgctaatagtattgccattgccacctggactttctgtttgcattttcttaatgccttttcccatattctgaattttaactttttgtgaggctttattttagatgtttagcatgtaactcgcttaaagttgaggtttccccctaaaatctacaagtttccctctttcagtcatgagccctacacatttgcatgaaagatgtacattatatattgtgaaacgaaaaaagcaattttcaaatggtatatattgtatcccatttttgtaaaaaaaatgtatatttatatattaatatgcaaagaaaaagctaaaagtatagacttcaaaggcataacagtggttgtgtggtaagataataggtgattttttaaatttttgttttatctgaatttctcattttttcaggacaaacgttttacttgtgttgcaaaaatatataatgaaaaaatcacacaattttgaagaaaactgtcaatcagcttataacgacaatgtggcacttaataaatacttgtcagaactt

SEQ ID NO: 321249 - DNA, 1192 bp, Homo sapiens
gtcttttttttgcctgtccaccatctccctattaccctttggtcgagagggaaagcagaagaagtctgctggtcacagcggggcacctcgaggagaggacgactaggagcacacggcccggaaaggtccagaataactgtgcttgaagaagaaaattcccaacatggacaaaccacgcaaagaaaatgaagaagagccgcagagcgcgcccaagaccgatgaggagaggcctccggtggagcactctcccgaaaagcagtcccccgaggagcagtcttcggaggagcagtcctcggaggaggagttctttcctgaggagctcttgcctgagctcctgcctgagatgctcctctcggaggagcgccctccgcaggagggtctttccaggaaggacctgtttgaggggcgccctcccatggagcagcctccttgtggagtaggaaaacataagcttgaagaaggaagctttaaagaaaggttggctcgttctcgcccgcaatttagaggggacatacatggcagaaatttaagcaatgaggagatgatacaggcagcagatgagctagaagagatgaaaagagtaagaaacaaactgatgataatgcactggaaggcaaaacggagccgtccttatcctatttaatgtgttcggcctttaattctgttttgcctgctaatagtattgccattgccacctggactttctgtttgcattttcttaatgccttttcccatattctgaattttaactttttgtgaggctttattttagatgtttagcatgtaactcgcttaaagttgaggtttccccctaaaatctacaagtttccctctttcagtcatgagccctacacatttgcatgaaagatgtacattatatattgtgaaacgaaaaaagcaattttcaaatggtatatattgtatcccatttttgtaaaaaaaatgtatatttatatattaatatgcaaagaaaaagctaaaagtatagacttcaaaggcataacagtggttgtgtggtaagataataggtgattttttaaatttttgttttatctgaatttctcattttttcaggacaaacgttttacttgtgttgcaaaaatatataatgaaaaaatcacacaattttgaagaaaactgtcaatcagcttataacgacaatgtggcacttaataaatacttgtcagaactt

SEQ ID NO: 321250 - DNA, 1185 bp, Homo sapiens
ccgagactagatgcggaccgtctctggcaaccaggaaaaggcaaatacaaagagaggtctgctggtcacagcggggcacctcgaggagaggacgactaggagcacacggcccggaaaggtccagaataactgtgcttgaagaagaaaattcccaacatggacaaaccacgcaaagaaaatgaagaagagccgcagagcgcgcccaagaccgatgaggagaggcctccggtggagcactctcccgaaaagcagtcccccgaggagcagtcttcggaggagcagtcctcggaggaggagttctttcctgaggagctcttgcctgagctcctgcctgagatgctcctctcggaggagcgccctccgcaggagggtctttccaggaaggacctgtttgaggggcgccctcccatggagcagcctccttgtggagtaggaaaacataagcttgaagaaggaagctttaaagaaaggttggctcgttctcgcccgcaatttagaggggacatacatggcagaaatttaagcaatgaggagatgatacaggcagcagatgagctagaagagatgaaaagagtaagaaacaaactgatgataatgcactggaaggcaaaacggagccgtccttatcctatttaatgtgttcggcctttaattctgttttgcctgctaatagtattgccattgccacctggactttctgtttgcattttcttaatgccttttcccatattctgaattttaactttttgtgaggctttattttagatgtttagcatgtaactcgcttaaagttgaggtttccccctaaaatctacaagtttccctctttcagtcatgagccctacacatttgcatgaaagatgtacattatatattgtgaaacgaaaaaagcaattttcaaatggtatatattgtatcccatttttgtaaaaaaaatgtatatttatatattaatatgcaaagaaaaagctaaaagtatagacttcaaaggcataacagtggttgtgtggtaagataataggtgattttttaaatttttgttttatctgaatttctcattttttcaggacaaacgttttacttgtgttgcaaaaatatataatgaaaaaatcacacaattttgaagaaaactgtcaatcagcttataacgacaatgtggcacttaataaatacttgtcagaactt

SEQ ID NO: 321251 - DNA, 1427 bp, Homo sapiens
ccgagactagatgcggaccgtctctggcaaccaggaaaaggcaaatacaaagagaggtctgctggtcacagcggggcacctcgaggagaggacgactaggagcacacggcccggaaaggtccaggtcagggaaggggtacgcagtgggccgggactggggcgcgagggtggacgccgaaaggcatggagtctgcaggccgcactgtcccgcccctgtcactgcgggcgaggcctgtagcaaagcctgctgggaaaatggtgggctttcgggaaggagggggcgaccgggaagcggcggagtcgggagagccggagagcctctgggaaagcgcaaggttgaggacctggcccccgaatcaggaaaagaataactgtgcttgaagaagaaaattcccaacatggacaaaccacgcaaagaaaatgaagaagagccgcagagcgcgcccaagaccgatgaggagaggcctccggtggagcactctcccgaaaagcagtcccccgaggagcagtcttcggaggagcagtcctcggaggaggagttctttcctgaggagctcttgcctgagctcctgcctgagatgctcctctcggaggagcgccctccgcaggagggtctttccaggaaggacctgtttgaggggcgccctcccatggagcagcctccttgtggagtaggaaaacataagcttgaagaaggaagctttaaagaaaggttggctcgttctcgcccgcaatttagaggggacatacatggcagaaatttaagcaatgaggagatgatacaggcagcagatgagctagaagagatgaaaagagtaagaaacaaactgatgataatgcactggaaggcaaaacggagccgtccttatcctatttaatgtgttcggcctttaattctgttttgcctgctaatagtattgccattgccacctggactttctgtttgcattttcttaatgccttttcccatattctgaattttaactttttgtgaggctttattttagatgtttagcatgtaactcgcttaaagttgaggtttccccctaaaatctacaagtttccctctttcagtcatgagccctacacatttgcatgaaagatgtacattatatattgtgaaacgaaaaaagcaattttcaaatggtatatattgtatcccatttttgtaaaaaaaatgtatatttatatattaatatgcaaagaaaaagctaaaagtatagacttcaaaggcataacagtggttgtgtggtaagataataggtgattttttaaatttttgttttatctgaatttctcattttttcaggacaaacgttttacttgtgttgcaaaaatatataatgaaaaaatcacacaattttgaagaaaactgtcaatcagcttataacgacaatgtggcacttaataaatacttgtcagaactt

SEQ ID NO: 321252 - DNA, 851 bp, Homo sapiens
tctttaaggtaactctaaaattaatggaatgtttttgaatgcctaaacttactggagccaccttattgagtgatataggctttctcataaactttcttggacaattttataggagaccaaatgcctttcctccttctcccagctcggcccttcaaaaagaaaccaagccacaccaaaactttcaaaaaaatctaagaaggcaaagaaatttgtggatcaaataagtaccatttgtttactgctatgacatttaagtcatatttataataaggattcatttttatgtacccttatatagcatttatataaaatttataggacatttctgttttccagaacccaatgtataaattacattgattgaaaagcctgttgctgttggttttggtttggctttgagggtggtttacatatttgttatatctaccttttaaccaaaagtcaagaattcaaccagcaattaaataataattcctgtggtaaagcactttcccttctatattgattttctttatgacctgttttccaggtgtaaattttgataccaccattgccgccttcccctcaaaaaaggtgagaactgactaaactactggtacttagaccatgtggagaaggaactgaaaatggaaacagaaacacgtctgtacagagcagagtgtcagataatagctcattttagtagagggcaataaatgccacatgagatgatcacctcagcagaaaactgtaagtaactggggacttacaggagaattgaacagttgtttctgctgactcagtaaaaagtcttcattttataatttgtggcctgcatgcttgtaaattaaaatgcattgagttgtcaagta

SEQ ID NO: 321253 - DNA, 2167 bp, Homo sapiens
ggcggggttggctctaacgaatttgaatgaggagcctcagcgctttcggcgccattttcgagtgatgcctgatctcatcaatctagcgggagagacaggataacctgtccgagagtatagcgccactatgactccgccggaaaaattactttaaaaatcgccaaaaattacttggagcaaagggcagtcggcggagcttcgccaaggctggcgcagtcggccgttttctcgacccggtgatggccgtcatctcgtgacaagaaacttaaggtcgacagaaaattcaggacccggagtcatgggtccctccggtgggtcgtggcaacagtcccccccgccaccgcccggcacccatctatctatattgtcttttgacgctgaagcgtgaggtgccccaggaaagagtttcccaagccctggctgccctcccccggcgcgctgggtcccggtgaggtctctaggtaggttttgacctgtagcagagaaccaattctggagaacagcctcacttctttgattgaatacttacataatgcattggaacatgacatgagattaaggtttaataatgatagaatgaagaccacaataaaagagacctctacttagctcagcaattcttacctttcttacctatttgatgaagatgtcttttgaaaggtgtactgcaaggaacaaaatgtttgtaaattctccttttaccaagggtttcttttttaattgatgccaaagagttccaatattgaacatcttaagtctgttacttggattacggattgagtttggagcttactcagaggactacaggagagtatccaggaagtagcaagaaatgtggataattactgtaccttcctcatggaaaaagttttatttaaagtgttatttctcattgaatactatcaaaaaggaaaaaaaaatgacctaaacttttgagatagatttggctctagtaagtatttagttatatcacttgcatatctgggagaagaaataagagactatcatcagtacattcccatctactaaaaaaatttattttacacatgtcaagggattacttataacttccattttattactaatagcttgaacccttttaatgaagacctaactcctccaccagaaatttaagtttatgttcttactttgtttacttataaaatacatctcaggtatttcggatgtcttttttttttctaagcctatatgaaatgaaaaatatattggcaaaataaatgtttaaaccttttacgttaaaattactttgaaagatgaaaagttagtgctgtttttgtctacgttatactgaaattaaatgtttataatttatattttgggtttatgtataaatcatggaatttatgcaaaaatatgagtagtacagattctcctctaattctgtaggactttgaataatgtgatatttttcttataattggacccttgtgttttgaagaaatgccaactgcttgaagaatctccttgttatttgtattatttgctatagggttagatgttgagaaattctgctgacaaaaaattttaagccagttttacactaaatgttcctcagtctgattaatttgttattggatgtattctgtatctttcttttgtaatttgtaacttttatccacttagcacgaatgattctattaaagaaaatcattaggaagtggtagaaactttaaatcgccccagagtttgcctgtttccatattttattatcttataatcttcgggagtgcttacacttatggagctaacattttcagagatacagcttcttatagtaacactaaaactttcttcctctttggactgaatacctataattataactatatggtagtttaagtttccttgtgattagtcaaaaataccattttagtatgaagcaatgaagtctattatttgttgtcccataattgagaaagcttaaatacaccttttattaagagtttgtaaattctagcttagtctacacagatttttatatcaatttgtttatatttttattaatgtcatttctggaagtgtgaaaatgttaatgttcaacaagcaacattaaaaatagatttgaaacatttatatatagagaggtacacatttatttactgtttaggtactgaagattatcacttaataaaaaatatatatccca

SEQ ID NO: 321254 - DNA, 1173 bp, Homo sapiens
ggcggggttggctctaacgaatttgaatgaggagcctcagcgctttcggcgccattttcgagtgatgcctgatctcatcaatctagcgggagagacaggataacctgtccgagagtatagcgccactatgactccgccggaaaaattactttaaaaatcgccaaaaattacttggagcaaagggcagtcggcggagcttcgccaaggctggcgcagtcggttttgacctgtagcagagaaccaattctggagaacagcctcacttctttgattgaatacttacataatgcattggaacatgacatgagattaaggtttaataatgatagaatgaagaccacaataaaagagacctctacttagctcagcaattcttacctttcttacctatttgatgaagatgtcttttgaaaggtgtactgcaaggaacaaaatgtttgtaaattctccttttaccaagggtttcttttttaattgatgccaaagagttccaatattgaacatcttaagtctgttacttggattacggattgagtttggagcttactcagaggactacaggagagtatccaggaagtagcaagaaatgtggataattactgtaccttcctcatggaaaaagttttatttaaagtgttatttctcattgaatactatcaaaaaggaaaaaaaaatgacctaaacttttgagatagatttggctctagtaagtatttagttatatcacttgcatatctgggagaagaaataagagactatcatcagtacattcccatctactaaaaaaatttattttacacatgtcaagggattacttataacttccattttattagagaattgcttgaacctgggaggtggaggttgcagtgggctaagatggcaccactgcactccagcctgggtgagagagcaagaccctgcctcagaaaaaaaaaaaaaaaaaatctaagacctgtatatcaaattttgagtttgtttcttcttttgtacctcaatagttacatttatcaaaaagctgagctgttgtaaaattgtggaattcacattggatattcaaaaacatttcttactattaatgacaaccaatagttatggatatttcattttaaacatggttataaaatgtaaacatgacactaataagctcaataaatgtttggcctgtctagt

SEQ ID NO: 321255 - DNA, 865 bp, Homo sapiens
ggcggggttggctctaacgaatttgaatgaggagcctcagcgctttcggcgccattttcgagtgatgcctgatctcatcaatctagcgggagagacaggataacctgtccgagagtatagcgccactatgactccgccggaaaaattactttaaaaatcgccaaaaattacttggagcaaagggcagtcggcggagcttcgccaaggctggcgcagtcggttttgacctgtagcagagaaccaattctggagaacagcctcacttctttgattgaatacttacataatgcattggaacatgacatgagattaaggtttaataatgatagaatgaagaccacaataaaagagacctctacttagctcagcaattcttacctttcttacctatttgatgaagatgtcttttgaaaggtgtactgcaaggaacaaaatgtttgtaaattctccttttaccaaggtaaagatcaaattttataaatttacttgtttgtttatacaaggaaaaataacttcatatattgaatatattcaaaagtttaagcatttagttgtattgccctgttaagttggcatagcaaataaatgcttttcttttcctcattttattctttgtgtttcctaacctatagcactgtgctgggcacagaatggacttcagttaagtttttgatgtagaaatgttttattattctacttaaaatctccttaaaaataattatgcatattacatcaatgttataatgtttaaacatagatttttttacatgcattctttttttcctgaaagaaaatattttttatattctttaggcgcgaatgtgtgtttaaaaaaaataaaaccttggagtaaagaaaaaaaaca

SEQ ID NO: 321256 - DNA, 831 bp, Homo sapiens
aaaaatcgagccggggggttccctggtccccggcgatggggcggggagcgctgcgccgggggagggggcgggcgcggcggcgcgggccccgccgaggggggacacctggctgaggcacagctgccgccgtgcctttccgcgcgagcccagagctccgatccctgcgcgggctcgagagctcgccccgaacgggggtcttcctcctccgccgttgacaggttttgacctgtagcagagaaccaattctggagaacagcctcacttctttgattgaatacttacataatgcattggaacatgacatgagattaaggtttaataatgatagaatgaagaccacaataaaagagacctctacttagctcagcaattcttaccttggataacttactgtaccttcctcatgggaaaaaggtaaattacacagggtgtaataccctcatggaatccatactcaaaaggggcaaaaaaatgtgagctaaaacttgcgagcatagatttggactctagtgtaaattttgataccaccattgccgccttcccctcaaaaaaggtgagaactgactaaactactggtacttagaccatgtggagaaggaactgaaaatggaaacagaaacacgtctgtacagagcagagtgtcagataatagctcattttagtagagggcaataaatgccacatgagatgatcacctcagcagaaaactgtaagtaactggggacttacaggagaattgaacagttgtttctgctgactcagtaaaaagtcttcattttataatttgtggcctgcatgcttgtaaattaaaatgcattgagttgtcaagta

SEQ ID NO: 321257 - DNA, 448 bp, Homo sapiens
cggccgctccttgacaggaggactggacgcgcgcccctcccccatttccgaaccgggccgccttttctcgccgttttctcgacccggtgatggccgtcatctcgtgacaagaaacttaaggtcgacagaaaattcaggacccggagtcatgggtccctccggtgggtcgtggcaacagtcccccccgccaccgcccggcacccatctatctatattgtcttttgacgctgaagcgtgaggtgccccaggaaagagtttcccaagccctggctgccctcccccggcgcgctgggtcccggtgaggtctctaggtaggtaggactggccgcggctcgcgcttccaagatggggcaggggcaggcttttgaggttgtagcgggctcttaggaaagatgctggactttagcttctttctggggatttttgtcatttgctctcgcagcgttgt

SEQ ID NO: 321258 - DNA, 1698 bp, Homo sapiens
ggcggggttggctctaacgaatttgaatgaggagcctcagcgctttcggcgccattttcgagtgatgcctgatctcatcaatctagcgggagagacaggataacctgtccgagagtatagcgccactatgactccgccggaaaaattactttaaaaatcgccaaaaattacttggagcaaagggcagtcggcggagcttcgccaaggctggcgcagtcggtttaataatgatagaatgaagaccacaataaaagagacctctacttagctcagcaattcttacctttcttacctatttgatgaagatgtcttttgaaaggtgtactgcaaggaacaaaatgtttgtaaattctccttttaccaaggtggataattactgtaccttcctcatggaaaaagttttatttaaagtgttatttctcattgaatactatcaaaaaggaaaaaaaaatgacctaaacttttgagatagatttggctctagtaagtatttagttatatcacttgcatatctgggagaagaaataagagactatcatcagtacattcccatctactaaaaaaatttattttacacatgtcaagggattacttataacttccattttattactaatagcttgaacccttttaatgaagacctaactcctccaccagaaatttaagtttatgttcttactttgtttacttataaaatacatctcaggtatttcggatgtcttttttttttctaagcctatatgaaatgaaaaatatattggcaaaataaatgtttaaaccttttacgttaaaattactttgaaagatgaaaagttagtgctgtttttgtctacgttatactgaaattaaatgtttataatttatattttgggtttatgtataaatcatggaatttatgcaaaaatatgagtagtacagattctcctctaattctgtaggactttgaataatgtgatatttttcttataattggacccttgtgttttgaagaaatgccaactgcttgaagaatctccttgttatttgtattatttgctatagggttagatgttgagaaattctgctgacaaaaaattttaagccagttttacactaaatgttcctcagtctgattaatttgttattggatgtattctgtatctttcttttgtaatttgtaacttttatccacttagcacgaatgattctattaaagaaaatcattaggaagtggtagaaactttaaatcgccccagagtttgcctgtttccatattttattatcttataatcttcgggagtgcttacacttatggagctaacattttcagagatacagcttcttatagtaacactaaaactttcttcctctttggactgaatacctataattataactatatggtagtttaagtttccttgtgattagtcaaaaataccattttagtatgaagcaatgaagtctattatttgttgtcccataattgagaaagcttaaatacaccttttattaagagtttgtaaattctagcttagtctacacagatttttatatcaatttgtttatatttttattaatgtcatttctggaagtgtgaaaatgttaatgttcaacaagcaacattaaaaatagatttgaaacatttatatatagagaggtacacatttatttactgtttaggtactgaagattatcacttaataaaaaatatatatccca

SEQ ID NO: 321259 - DNA, 1444 bp, Homo sapiens
ggcggggttggctctaacgaatttgaatgaggagcctcagcgctttcggcgccattttcgagtgatgcctgatctcatcaatctagcgggagagacaggataacctgtccgagagtatagcgccactatgactccgccggaaaaattactttaaaaatcgccaaaaattacttggagcaaagggcagtcggcggagcttcgccaaggctggcgcagtcggttttgacctgtagcagagaaccaattctggagaacagcctcacttctttgattgaatacttacataatgcattggaacatgacatgagattaaggtttaataatgatagaatgaagaccacaataaaagagacctctacttagctcagcaattcttacctttcttacctatttgatgaagatgtcttttgaaaggtgtactgcaaggaacaaaatgtttgtaaattctccttttaccaaggtggataattactgtaccttcctcatggaaaaagttttatttaaagtgttatttctcattgaatactatcaaaaaggaaaaaaaaatgacctaaacttttgagatagatttggctctagtaagtatttagttatatcacttgcatatctgggagaagaaataagagactatcatcagtacattcccatctactaaaaaaatttattttacacatgtcaagggattacttataacttccattttattagagaattgcttgaacctgggaggtggaggttgcagtgggctaagatggcaccactgcactccagcctgggtgagagagcaagaccctgcctcagaaaaaaaaaaaaaaaaaatctaagacctgtatatcaaattttgagtttgtttcttcttttgtacctcaatagttacatttatcaaaaagctgagctgttgtaaaattgtggaattcacattggatattcaaaaacatttcttactattaatgacaaccaatagttatggatatttcattttaaacatggttataaaatgtaaacatgacactaataagctcaataaatgtttggcctgtctagtataataaatatgtttttgtcagaatttgacccatttatgatgtaagcaaaaatgatatgtcttaatccatttgtctcacacactaattttataatttaaaagagcaatagtagtttcattcagaaagacaggtttaaggccaggtgcagtggctcacacccataatcccagcattttggatcacctgaggtcaggagttcaagaccagcctggccaaggtggtgaaaccccgtctctactaaaaatacaaacgtggcaggcgcgtgtaatcccatctacttgggaggctgagacaggagaatcgcttgaacccggggggcggaggttgcagtgaatcgagatcccaccactgcactccagcctgcgcgacagagtgagactccgtttcaaaaaaaaaaa

SEQ ID NO: 321260 - DNA, 1822 bp, Homo sapiens
ggcggggttggctctaacgaatttgaatgaggagcctcagcgctttcggcgccattttcgagtgatgcctgatctcatcaatctagcgggagagacaggataacctgtccgagagtatagcgccactatgactccgccggaaaaattactttaaaaatcgccaaaaattacttggagcaaagggcagtcggcggagcttcgccaaggctggcgcagtcggttttgacctgtagcagagaaccaattctggagaacagcctcacttctttgattgaatacttacataatgcattggaacatgacatgagattaaggtttaataatgatagaatgaagaccacaataaaagagacctctacttagctcagcaattcttacctttcatttcatgtttttcccttgatgtgaagtcttacctatttgatgaagatgtcttttgaaaggtgtactgcaaggaacaaaatgtttgtaaattctccttttaccaaggtggataattactgtaccttcctcatggaaaaagttttatttaaagtgttatttctcattgaatactatcaaaaaggaaaaaaaaatgacctaaacttttgagatagatttggctctagtaagtatttagttatatcacttgcatatctgggagaagaaataagagactatcatcagtacattcccatctactaaaaaaatttattttacacatgtcaagggattacttataacttccattttattactaatagcttgaacccttttaatgaagacctaactcctccaccagaaatttaagtttatgttcttactttgtttacttataaaatacatctcaggtatttcggatgtcttttttttttctaagcctatatgaaatgaaaaatatattggcaaaataaatgtttaaaccttttacgttaaaattactttgaaagatgaaaagttagtgctgtttttgtctacgttatactgaaattaaatgtttataatttatattttgggtttatgtataaatcatggaatttatgcaaaaatatgagtagtacagattctcctctaattctgtaggactttgaataatgtgatatttttcttataattggacccttgtgttttgaagaaatgccaactgcttgaagaatctccttgttatttgtattatttgctatagggttagatgttgagaaattctgctgacaaaaaattttaagccagttttacactaaatgttcctcagtctgattaatttgttattggatgtattctgtatctttcttttgtaatttgtaacttttatccacttagcacgaatgattctattaaagaaaatcattaggaagtggtagaaactttaaatcgccccagagtttgcctgtttccatattttattatcttataatcttcgggagtgcttacacttatggagctaacattttcagagatacagcttcttatagtaacactaaaactttcttcctctttggactgaatacctataattataactatatggtagtttaagtttccttgtgattagtcaaaaataccattttagtatgaagcaatgaagtctattatttgttgtcccataattgagaaagcttaaatacaccttttattaagagtttgtaaattctagcttagtctacacagatttttatatcaatttgtttatatttttattaatgtcatttctggaagtgtgaaaatgttaatgttcaacaagcaacattaaaaatagatttgaaacatttatatatagagaggtacacatttatttactgtttaggtactgaagattatcacttaataaaaaatatatatccca

SEQ ID NO: 321261 - DNA, 1748 bp, Homo sapiens
ggcggggttggctctaacgaatttgaatgaggagcctcagcgctttcggcgccattttcgagtgatgcctgatctcatcaatctagcgggagagacaggataactttaaaaatcgccaaaaattacttggagcaaagggcagtcggcggagcttcgccaaggctggcgcagtcggttttgacctgtagcagagaaccaattctggagaacagcctcacttctttgattgaatacttacataatgcattggaacatgacatgagattaaggtttaataatgatagaatgaagaccacaataaaagagacctctacttagctcagcaattcttacctttcttacctatttgatgaagatgtcttttgaaaggtgtactgcaaggaacaaaatgtttgtaaattctccttttaccaaggtggataattactgtaccttcctcatggaaaaagttttatttaaagtgttatttctcattgaatactatcaaaaaggaaaaaaaaatgacctaaacttttgagatagatttggctctagtaagtatttagttatatcacttgcatatctgggagaagaaataagagactatcatcagtacattcccatctactaaaaaaatttattttacacatgtcaagggattacttataacttccattttattactaatagcttgaacccttttaatgaagacctaactcctccaccagaaatttaagtttatgttcttactttgtttacttataaaatacatctcaggtatttcggatgtcttttttttttctaagcctatatgaaatgaaaaatatattggcaaaataaatgtttaaaccttttacgttaaaattactttgaaagatgaaaagttagtgctgtttttgtctacgttatactgaaattaaatgtttataatttatattttgggtttatgtataaatcatggaatttatgcaaaaatatgagtagtacagattctcctctaattctgtaggactttgaataatgtgatatttttcttataattggacccttgtgttttgaagaaatgccaactgcttgaagaatctccttgttatttgtattatttgctatagggttagatgttgagaaattctgctgacaaaaaattttaagccagttttacactaaatgttcctcagtctgattaatttgttattggatgtattctgtatctttcttttgtaatttgtaacttttatccacttagcacgaatgattctattaaagaaaatcattaggaagtggtagaaactttaaatcgccccagagtttgcctgtttccatattttattatcttataatcttcgggagtgcttacacttatggagctaacattttcagagatacagcttcttatagtaacactaaaactttcttcctctttggactgaatacctataattataactatatggtagtttaagtttccttgtgattagtcaaaaataccattttagtatgaagcaatgaagtctattatttgttgtcccataattgagaaagcttaaatacaccttttattaagagtttgtaaattctagcttagtctacacagatttttatatcaatttgtttatatttttattaatgtcatttctggaagtgtgaaaatgttaatgttcaacaagcaacattaaaaatagatttgaaacatttatatatagagaggtacacatttatttactgtttaggtactgaagattatcacttaataaaaaatatatatccca

SEQ ID NO: 321262 - DNA, 1853 bp, Homo sapiens
ggcggggttggctctaacgaatttgaatgaggagcctcagcgctttcggcgccattttcgagtgatgcctgatctcatcaatctagcgggagagacaggataacctgtccgagagtatagcgccactatgactccgccggaaaaattactttaaaaatcgccaaaaattacttggagcaaagggcagtcggcggagcttcgccaaggctggcgcagtcggttttgacctgtagcagagaaccaattctggagaacagcctcacttctttgattgaatacttacataatgcattggaacatgacatgagattaagtgtataaagccaaatgtcccgtttaaagtttgacatttgcaatagcattctatttaaaaggtttaataatgatagaatgaagaccacaataaaagagacctctacttagctcagcaattcttacctttcttacctatttgatgaagatgtcttttgaaaggtgtactgcaaggaacaaaatgtttgtaaattctccttttaccaaggtggataattactgtaccttcctcatggaaaaagttttatttaaagtgttatttctcattgaatactatcaaaaaggaaaaaaaaatgacctaaacttttgagatagatttggctctagtaagtatttagttatatcacttgcatatctgggagaagaaataagagactatcatcagtacattcccatctactaaaaaaatttattttacacatgtcaagggattacttataacttccattttattactaatagcttgaacccttttaatgaagacctaactcctccaccagaaatttaagtttatgttcttactttgtttacttataaaatacatctcaggtatttcggatgtcttttttttttctaagcctatatgaaatgaaaaatatattggcaaaataaatgtttaaaccttttacgttaaaattactttgaaagatgaaaagttagtgctgtttttgtctacgttatactgaaattaaatgtttataatttatattttgggtttatgtataaatcatggaatttatgcaaaaatatgagtagtacagattctcctctaattctgtaggactttgaataatgtgatatttttcttataattggacccttgtgttttgaagaaatgccaactgcttgaagaatctccttgttatttgtattatttgctatagggttagatgttgagaaattctgctgacaaaaaattttaagccagttttacactaaatgttcctcagtctgattaatttgttattggatgtattctgtatctttcttttgtaatttgtaacttttatccacttagcacgaatgattctattaaagaaaatcattaggaagtggtagaaactttaaatcgccccagagtttgcctgtttccatattttattatcttataatcttcgggagtgcttacacttatggagctaacattttcagagatacagcttcttatagtaacactaaaactttcttcctctttggactgaatacctataattataactatatggtagtttaagtttccttgtgattagtcaaaaataccattttagtatgaagcaatgaagtctattatttgttgtcccataattgagaaagcttaaatacaccttttattaagagtttgtaaattctagcttagtctacacagatttttatatcaatttgtttatatttttattaatgtcatttctggaagtgtgaaaatgttaatgttcaacaagcaacattaaaaatagatttgaaacatttatatatagagaggtacacatttatttactgtttaggtactgaagattatcacttaataaaaaatatatatccca

SEQ ID NO: 321263 - DNA, 1889 bp, Homo sapiens
cggccgctccttgacaggaggactggacgcgcgcccctcccccatttccgaaccgggccgccttttctcgccgttttctcgacccggtgatggccgtcatctcgtgacaagaaacttaaggtcgacagaaaattcaggacccggagtcatgggtccctccggtgggtcgtggcaacagtcccccccgccaccgcccggcacccatctatctatattgtcttttgacgctgaagcgtgaggtgccccaggaaagagtttcccaagccctggctgccctcccccggcgcgctgggtcccggtgaggtctctaggtaggttttgacctgtagcagagaaccaattctggagaacagcctcacttctttgattgaatacttacataatgcattggaacatgacatgagattaaggtttaataatgatagaatgaagaccacaataaaagagacctctacttagctcagcaattcttacctttcttacctatttgatgaagatgtcttttgaaaggtgtactgcaaggaacaaaatgtttgtaaattctccttttaccaaggtggataattactgtaccttcctcatggaaaaagttttatttaaagtgttatttctcattgaatactatcaaaaaggaaaaaaaaatgacctaaacttttgagatagatttggctctagtaagtatttagttatatcacttgcatatctgggagaagaaataagagactatcatcagtacattcccatctactaaaaaaatttattttacacatgtcaagggattacttataacttccattttattactaatagcttgaacccttttaatgaagacctaactcctccaccagaaatttaagtttatgttcttactttgtttacttataaaatacatctcaggtatttcggatgtcttttttttttctaagcctatatgaaatgaaaaatatattggcaaaataaatgtttaaaccttttacgttaaaattactttgaaagatgaaaagttagtgctgtttttgtctacgttatactgaaattaaatgtttataatttatattttgggtttatgtataaatcatggaatttatgcaaaaatatgagtagtacagattctcctctaattctgtaggactttgaataatgtgatatttttcttataattggacccttgtgttttgaagaaatgccaactgcttgaagaatctccttgttatttgtattatttgctatagggttagatgttgagaaattctgctgacaaaaaattttaagccagttttacactaaatgttcctcagtctgattaatttgttattggatgtattctgtatctttcttttgtaatttgtaacttttatccacttagcacgaatgattctattaaagaaaatcattaggaagtggtagaaactttaaatcgccccagagtttgcctgtttccatattttattatcttataatcttcgggagtgcttacacttatggagctaacattttcagagatacagcttcttatagtaacactaaaactttcttcctctttggactgaatacctataattataactatatggtagtttaagtttccttgtgattagtcaaaaataccattttagtatgaagcaatgaagtctattatttgttgtcccataattgagaaagcttaaatacaccttttattaagagtttgtaaattctagcttagtctacacagatttttatatcaatttgtttatatttttattaatgtcatttctggaagtgtgaaaatgttaatgttcaacaagcaacattaaaaatagatttgaaacatttatatatagagaggtacacatttatttactgtttaggtactgaagattatcacttaataaaaaatatatatccca

SEQ ID NO: 321264 - DNA, 1115 bp, Homo sapiens
ggcggggttggctctaacgaatttgaatgaggagcctcagcgctttcggcgccattttcgagtgatgcctgatctcatcaatctagcgggagagacaggataacctgtccgagagtatagcgccactatgactccgccggaaaaattactttaaaaatcgccaaaaattacttggagcaaagggcagtcggcggagcttcgccaaggctggcgcagtcggttttgacctgtagcagagaaccaattctggagaacagcctcacttctttgattgaatacttacataatgcattggaacatgacatgagattaaggtttaataatgatagaatgaagaccacaataaaagagacctctacttagctcagcaattcttacctttcttacctatttgatgaagatgtcttttgaaaggtgtactgcaaggaacaaaatgtttgtaaattctccttttaccaaggtggataattactgtaccttcctcatggaaaaagttttatttaaagtgttatttctcattgaatactatcaaaaaggaaaaaaaaatgacctaaacttttgagatagatttggctctaggcctactctaggtgcggtacttcactatagtttataaaagatggtccctgtcagcaaagaactgtaacctgtatgagaatattatactaacatacaagaaacaagtagagaataatggaatgtaaactctggcttgctaacttaagtgtggtagaagcttgaaggaaatgtggacttaaacttatcagagaagacttataagaggatatgaaaggtgtaaattttgataccaccattgccgccttcccctcaaaaaaggtgagaactgactaaactactggtacttagaccatgtggagaaggaactgaaaatggaaacagaaacacgtctgtacagagcagagtgtcagataatagctcattttagtagagggcaataaatgccacatgagatgatcacctcagcagaaaactgtaagtaactggggacttacaggagaattgaacagttgtttctgctgactcagtaaaaagtcttcattttataatttgtggcctgcatgcttgtaaattaaaatgcattgagttgtcaagta

SEQ ID NO: 321265 - DNA, 838 bp, Homo sapiens
tcaagcttctaacgatgtacggggacatggaatttatgcaaaaatatgagtagtacagattctcctctaattctgtaggactttgaataatgtgatatttttcttataattggacccttgtgttttgaagaaatgccaactgcttgaagaatctccttgttatttgtattatttgctatagggttagatgttgagaaattctgctgacaaaaaattttaagccagttttacactaaatgttcctcagtctgattaatttgttattggatgtattctgtatctttcttttgtaatttgtaacttttatccacttagcacgaatgattctattaaagaaaatcattaggaagtggtagaaactttaaatcgccccagagtttgcctgtttccatattttattatcttataatcttcgggagtgcttacacttatggagctaacattttcagagatacagcttcttatagtaacactaaaactttcttcctctttggactgaatacctataattataactatatggtagtttaagtttccttgtgattagtcaaaaataccattttagtatgaagcaatgaagtctattatttgttgtcccataattgagaaagcttaaatacaccttttattaagagtttgtaaattctagcttagtctacacagatttttatatcaatttgtttatatttttattaatgtcatttctggaagtgtgaaaatgttaatgttcaacaagcaacattaaaaatagatttgaaacatttatatatagagaggtacacatttatttactgtttaggtactgaagattatcacttaataaaaaatatatatccca

SEQ ID NO: 321266 - DNA, 1017 bp, Homo sapiens
gggaggtcatgaagtattctgagcaggagagtaagaaaaataacttctgaaatacgtgtactggtcagaatttgcttaaagagagaaatctggccgtggtggctcacacctgtaatcccagcactttgggaggctgaggctggcgaatcaccagagttcaagagttcaagaccagcctgggcaacatggcgagaccccatctctactaaaaatacaaaaattagccgtgcatggtggtgcacgcctgtagtccctgctacgtggtggggggctgaggcaggagaattgcttgaacctgggaggtggaggttgcagtgggctaagatggcaccactgcactccagcctgggtgagagagcaagaccctgcctcagaaaaaaaaaaaaaaaaaatctaagacctgtatatcaaattttgagtttgtttcttcttttgtacctcaatagttacatttatcaaaaagctgagctgttgtaaaattgtggaattcacattggatattcaaaaacatttcttactattaatgacaaccaatagttatggatatttcattttaaacatggttataaaatgtaaacatgacactaataagctcaataaatgtttggcctgtctagtataataaatatgtttttgtcagaatttgacccatttatgatgtaagcaaaaatgatatgtcttaatccatttgtctcacacactaattttataatttaaaagagcaatagtagtttcattcagaaagacaggtttaaggccaggtgcagtggctcacacccataatcccagcattttggatcacctgaggtcaggagttcaagaccagcctggccaaggtggtgaaaccccgtctctactaaaaatacaaacgtggcaggcgcgtgtaatcccatctacttgggaggctgagacaggagaatcgcttgaacccggggggcggaggttgcagtgaatcgagatcccaccactgcactccagcctgcgcgacagagtgagactccgtttcaaaaaaaaaaa

SEQ ID NO: 321267 - DNA, 909 bp, Homo sapiens
cggccgctccttgacaggaggactggacgcgcgcccctcccccatttccgaaccgggccgccttttctcgccgttttctcgacccggtgatggccgtcatctcgtgacaagaaacttaaggtcgacagaaaattcaggacccggagtcatgggtccctccggtgggtcgtggcaacagtcccccccgccaccgcccggcacccatctatctatattgtcttttgacgctgaagcgtgaggtgccccaggaaagagtttcccaagccctggctgccctcccccggcgcgctgggtcccggtgaggtctctaggtaggttttgacctgtagcagagaaccaattctggagaacagcctcacttctttgattgaatacttacataatgcattggaacatgacatgagattaagtgtataaagccaaatgtcccgtttaaagtttgacatttgcaatagcattctatttaaaaggtaatcatatagttgctttctggtcaccttcattaaaatcactcctgatcactctcactcttaatattttcctgtgccaatcacagtaaattcagaatattagttccctggtaatattactaaaaaaagctttgtcatagtatgtgtctagttatctgaaaaaataaatgagcccacaacctttcttggcattgtgaagtcaagcatattcagccataaattgaggttacttttttgttgttgttgactaatgctagaggtttttaaaaaaaagtttatgtaatttaacagataacatattaattactgttacctcccctaactaaaacatgagttacataatcctctctattgaaagcacctcatttttaatcattacttactgcttagttgcctgcaaaccacctgtatgagaataacctagaatttaaaaaataaa

SEQ ID NO: 321268 - DNA, 1793 bp, Homo sapiens
ggcggggttggctctaacgaatttgaatgaggagcctcagcgctttcggcgccattttcgagtgatgcctgatctcatcaatctagcgggagagacaggataacctgtccgagagtatagcgccactatgactccgccggaaaaattactttaaaaatcgccaaaaattacttggagcaaagggcagtcggcggagcttcgccaaggctggcgcagtcggttttgacctgtagcagagaaccaattctggagaacagcctcacttctttgattgaatacttacataatgcattggaacatgacatgagattaaggtttaataatgatagaatgaagaccacaataaaagagacctctacttagctcagcaattcttacctttcttacctatttgatgaagatgtcttttgaaaggtgtactgcaaggaacaaaatgtttgtaaattctccttttaccaaggtggataattactgtaccttcctcatggaaaaagttttatttaaagtgttatttctcattgaatactatcaaaaaggaaaaaaaaatgacctaaacttttgagatagatttggctctagtaagtatttagttatatcacttgcatatctgggagaagaaataagagactatcatcagtacattcccatctactaaaaaaatttattttacacatgtcaagggattacttataacttccattttattactaatagcttgaacccttttaatgaagacctaactcctccaccagaaatttaagtttatgttcttactttgtttacttataaaatacatctcaggtatttcggatgtcttttttttttctaagcctatatgaaatgaaaaatatattggcaaaataaatgtttaaaccttttacgttaaaattactttgaaagatgaaaagttagtgctgtttttgtctacgttatactgaaattaaatgtttataatttatattttgggtttatgtataaatcatggaatttatgcaaaaatatgagtagtacagattctcctctaattctgtaggactttgaataatgtgatatttttcttataattggacccttgtgttttgaagaaatgccaactgcttgaagaatctccttgttatttgtattatttgctatagggttagatgttgagaaattctgctgacaaaaaattttaagccagttttacactaaatgttcctcagtctgattaatttgttattggatgtattctgtatctttcttttgtaatttgtaacttttatccacttagcacgaatgattctattaaagaaaatcattaggaagtggtagaaactttaaatcgccccagagtttgcctgtttccatattttattatcttataatcttcgggagtgcttacacttatggagctaacattttcagagatacagcttcttatagtaacactaaaactttcttcctctttggactgaatacctataattataactatatggtagtttaagtttccttgtgattagtcaaaaataccattttagtatgaagcaatgaagtctattatttgttgtcccataattgagaaagcttaaatacaccttttattaagagtttgtaaattctagcttagtctacacagatttttatatcaatttgtttatatttttattaatgtcatttctggaagtgtgaaaatgttaatgttcaacaagcaacattaaaaatagatttgaaacatttatatatagagaggtacacatttatttactgtttaggtactgaagattatcacttaataaaaaatatatatccca

SEQ ID NO: 321269 - DNA, 696 bp, Homo sapiens
  misc_feature (2)..(2): n is a, c, g, or t
  misc_feature (634)..(634): n is a, c, g, or t
  misc_feature (646)..(646): n is a, c, g, or t
  misc_feature (648)..(648): n is a, c, g, or t
anagaatcgcttgaacctggaggcaaagattgcggtgagccgagatcgcaccactgtactccagcctgggcgacagagtgagatgcccagaagaagtttaatattgaatataatctttacattccaagggcctttttattagattgtatttctccagctttttctttgtttcttaacatttccctagactgaacattgtgattgatggtgatagttggctcagcatgaagggctgaaaatgttagagaaattgtcagtattactaagttggcattcctggtttctgcctgtcctccctttaggcttggtttgttgtccacttaaaatgtttggtgctctgactgtttgttagtatcactctcaagaatgaagagaaacctcaacctttctgtttccggccaactttattgaatttgtttttttaaatgcagtttacatgcagtttctttgaaaagtcatgttgaatttagatctgttctctgagtaagacttggcgagtatgtgaaacttgactcaagttacatttctttttttctgtcccccaaacgttcacgcttcttataggctccactttgaggctctgatgaacattccagtgctggtgttggatgtcaatgatgatttttccaatgtnttccagataaangntaatggatggtgtattccaggttgttgggccggcaatggccatgcgtc

SEQ ID NO: 321270 - DNA, 682 bp, Homo sapiens
  misc_feature (2)..(2): n is a, c, g, or t
anagaatcgcttgaacctggaggcaaagattgcggtgagccgagatcgcaccactgtactccagcctgggcgacagagtgagatgcccagaagaagtttaatattgaatataatctttacattccaagggcctttttattagattgtatttctccagctttttctttgtttcttaacatttccctagactgaacattgtgattgatggtgatagttggctcagcatgaagggctgaaaatgttagagaaattgtcagtattactaagttggcattcctggtttctgcctgtcctccctttaggcttggtttgttgtccacttaaaatgtttggtgctctgactgtttgttagtatcactctcaagaatgaagagaaacctcaacctttctgtttccggccaactttattgaatttgtttttttaaatgcagtttacatgcagtttctttgaaaagtcatgttgaatttagatctgttctctgagtaagacttggcgagtatgtgaaacttgactcaagttacatttctttttttctgtcccccaaacgttcacgcttcttataggctccactttgaggctctgatgaacattccagtgctggtgttggatgtcaatgatgatttttcctgacaatatattaacactgcacataccacgtattgataattaatattattttat

SEQ ID NO: 321271 - DNA, 576 bp, Homo sapiens
ctgcctcctctgtgggctgacataacattttgtacccacaactgctgcagcacttgagttctgctgagcttgtttgcacattcaccaccttccttgggctctgaccactcagtgtgctgttcatctttgtattgctgacacctaacccccgccttgacccagtgtactcagtactgaccagattcttgaatcctgtgctatgatatccatgtggaagttaggcattggtacccacacagggaatgtattaaactgctttttaaatcaagagtgatcatcttctctaatcacaggtaacatcctcaagcaaatcagaatgagagcacccattcaggaaacctgaacagggaaggtgaacccctgtcctgaccaaaattgggtatgtttagagggcttttcttgtattccttctgctctaagtcctattattctgatcctgaaggtgcagacagcggcatgtaaggaaaattgatcagtgaagtagcaactaatggcatctagcatgacttacgaagccatataagatgtgtgattgaaagtcaaaagcttggtacctagaacccctgaaaatctaaa

SEQ ID NO: 321272 - DNA, 1143 bp, Homo sapiens
ccttacgtcaacggtgcgctggagcgagtgagcagcgatacctagggcggaagtgctctcggcggaagtgatcgctgtgtgaatcgtgggtgggatggccgcgggccgcctctttctaagtcggcttcgagcacccttcagttccatggccaagagcccactcgagggcgtttcctcctccagaggcctgcacgcggggcgcgggccccgaaggctctccatcgaaggcaacattgctgtgggaaagtccacgtttgtgaagttactcacgaaaacttacccagaatggcacgtagctacagaacctgtagcaacatggcagaatatccaggctgctggcacccaaaaagcctgcactgcccaaagtcttggaaacttgctggatatgatgtaccgggagccagcacgatggtcctacacattccagacattttcctttttgagccgcctgaaagtacagctggagcccttccctgagaaactcttacaggccaggaagccagtacagatctttgagaggtctgtgtacagtgacaggtatatctttgcaaagaatctttttgaaaatggttccctcagtgacatcgagtggcatatctatcaggactggcattcttttctcctgtgggagtttgccagccggatcacattacatggcttcatctacctccaggcttctccccaggtttgtttgaagagactgtaccagagggccagggaggaggagaaaggaattgagctggcctatctagagcagctgcatggccaacacgaagcctggcttattcacaagacaacgaagctccactttgaggctctgatgaacattccagtgctggtgttggatgtcaatgatgatttttctgaggaagtaaccaaacaagaagacctcatgagagaggtaaacacctttgtaaagaatctgtaaccaataccatgaagttcaggctgtgatctgggctccctgactttctgaagctagaaaaatgttgtgtctcccaaccacctttccatccccagcccctctcatccctggagcactctgccgctcaagagctggtttgttaattattgttagactttgccattgttttcttttgtacctgaagcattttgaaaataaagtttacttaagttatgcta

SEQ ID NO: 321273 - DNA, 1030 bp, Homo sapiens
ccttacgtcaacggtgcgctggagcgagtgagcagcgatacctagggcggaagtgctctcggcggaagtgatcgctgtgtgaatcgtgggtgggatggccgcgggccgcctctttctaagtcggcttcgagcacccttcagttccatggccaagagcccactcgagggcgtttcctcctccagaggcctgcacgcggggcgcgggccccgaaggctctccatcgaaggcaacattggcctgcactgcccaaagtcttggaaacttgctggatatgatgtaccgggagccagcacgatggtcctacacattccagacattttcctttttgagccgcctgaaagtacagctggagcccttccctgagaaactcttacaggccaggaagccagtacagatctttgagaggtctgtgtacagtgacaggtatatctttgcaaagaatctttttgaaaatggttccctcagtgacatcgagtggcatatctatcaggactggcattcttttctcctgtgggagtttgccagccggatcacattacatggcttcatctacctccaggcttctccccaggtttgtttgaagagactgtaccagagggccagggaggaggagaaaggaattgagctggcctatctagagcagctgcatggccaacacgaagcctggcttattcacaagacaacgaagctccactttgaggctctgatgaacattccagtgctggtgttggatgtcaatgatgatttttctgaggaagtaaccaaacaagaagacctcatgagagaggtaaacacctttgtaaagaatctgtaaccaataccatgaagttcaggctgtgatctgggctccctgactttctgaagctagaaaaatgttgtgtctcccaaccacctttccatccccagcccctctcatccctggagcactctgccgctcaagagctggtttgttaattattgttagactttgccattgttttcttttgtacctgaagcattttgaaaataaagtttacttaagttatgcta

SEQ ID NO: 321274 - DNA, 1153 bp, Homo sapiens
caagcataacttaagtaactttagtttcaaaatgcttcaggtaccaaagaaaaccatggccaagtctaaccataatttaaccaaccagctcttgagcggcacgagtgatcgctgtgtgaatcgtgggtgggatggccgcgggccgcctctttctaagtcggcttcgagcacccttcagttccatggccaagagcccactcgagggcgtttcctcctccagaggcctgcacgcggggcgcgggccccgaaggctctccatcgaaggcaacattggtaacatcctcaagcaaatcagaatgagagcacccattcaggaaacctgaacagggaaggtgaacccctgtcctgaccaaaattgggcctgcactgcccaaagtcttggaaacttgctggatatgatgtaccgggagccagcacgatggtcctacacattccagacattttcctttttgagccgcctgaaagtacagctggagcccttccctgagaaactcttacaggccaggaagccagtacagatctttgagaggtctgtgtacagtgacaggtatatctttgcaaagaatctttttgaaaatggttccctcagtgacatcgagtggcatatctatcaggactggcattcttttctcctgtgggagtttgccagccggatcacattacatggcttcatctacctccaggcttctccccaggtttgtttgaagagactgtaccagagggccagggaggaggagaaaggaattgagctggcctatctagagcagctgcatggccaacacgaagcctggcttattcacaagacaacgaagctccactttgaggctctgatgaacattccagtgctggtgttggatgtcaatgatgatttttctgaggaagtaaccaaacaagaagacctcatgagagaggtaaacacctttgtaaagaatctgtaaccaataccatgaagttcaggctgtgatctgggctccctgactttctgaagctagaaaaatgttgtgtctcccaaccacctttccatccccagcccctctcatccctggagcactctgccgctcaagagctggtttgttaattattgttagactttgccattgttttcttttgtacctgaagcattttgaaaataaagtttacttaagttatgcta

SEQ ID NO: 321275 - DNA, 1049 bp, Homo sapiens
caagcataacttaagtaactttagtttcaaaatgcttcaggtaccaaagaaaaccatggccaagtctaaccataatttaaccaaccagctcttgagcggcacgagtgatcgctgtgtgaatcgtgggtgggatggccgcgggccgcctctttctaagtcggcttcgagcacccttcagttccatggccaagagcccactcgagggcgtttcctcctccagaggcctgcacgcggggcgcgggccccgaaggctctccatcgaaggcaacattggcctgcactgcccaaagtcttggaaacttgctggatatgatgtaccgggagccagcacgatggtcctacacattccagacattttcctttttgagccgcctgaaagtacagctggagcccttccctgagaaactcttacaggccaggaagccagtacagatctttgagaggtatatctttgcaaagaatctttttgaaaatggttccctcagtgacatcgagtggcatatctatcaggactggcattcttttctcctgtgggagtttgccagccggatcacattacatggcttcatctacctccaggcttctccccaggtttgtttgaagagactgtaccagagggccagggaggaggagaaaggaattgagctggcctatctagagcagctgcatggccaacacgaagcctggcttattcacaagacaacgaagctccactttgaggctctgatgaacattccagtgctggtgttggatgtcaatgatgatttttctgaggaagtaaccaaacaagaagacctcatgagagaggtaaacacctttgtaaagaatctgtaaccaataccatgaagttcaggctgtgatctgggctccctgactttctgaagctagaaaaatgttgtgtctcccaaccacctttccatccccagcccctctcatccctggagcactctgccgctcaagagctggtttgttaattattgttagactttgccattgttttcttttgtacctgaagcattttgaaaataaagtttacttaagttatgcta

SEQ ID NO: 321276 - DNA, 677 bp, Homo sapiens
tctctctctcgtgcctttcattccatttcccattctcctgccctccccattcccatcccacttccaaccaggtatatctttgcaaagaatctttttgaaaatggttccctcagtgacatcgagtggcatatctatcaggactggcattcttttctcctgtgggagtttgccagccggatcacattacatggcttcatctacctccaggcttctccccaggtttgtttgaagagactgtaccagagggccagggaggaggagaaaggaattgagctggcctatctagagcagctgcatggccaacacgaagcctggcttattcacaagacaacgaagctccactttgaggctctgatgaacattccagtgctggtgttggatgtcaatgatgatttttctgaggaagtaaccaaacaagaagacctcatgagagaggtaaacacctttgtaaagaatctgtaaccaataccatgaagttcaggctgtgatctgggctccctgactttctgaagctagaaaaatgttgtgtctcccaaccacctttccatccccagcccctctcatccctggagcactctgccgctcaagagctggtttgttaattattgttagactttgccattgttttcttttgtacctgaagcattttgaaaataaagtttacttaagttatgcta

SEQ ID NO: 321277 - DNA, 1080 bp, Homo sapiens
ccttacgtcaacggtgcgctggagcgagtgagcagcgatacctagggcggaagtgctctcggcggaagtgatcgctgtgtgaatcgtgggtgggatggccgcgggccgcctctttctaagtcggcttcgagcacccttcagttccatggccaagagcccactcgagggcgtttcctcctccagaggcctgcacgcggggcgcgggccccgaaggctctccatcgaaggcaacattggcctgcactgcccaaagtcttggaaacttgctggatatgatgtaccgggagccagcacgatggtcctacacattccagacattttcctttttgagccgcctgaaagtacagctggagcccttccctgagaaactcttacaggccaggaagccagtacagatctttgagaggtctgtgtacagtgacaggtatatctttgcaaagaatctttttgaaaatggttccctcagtgacatcgagtggcatatctatcaggactggcattcttttctcctgtgggagtttgccagccggatcacattacatggcttcatctacctccaggcttctccccaggtttgtttgaagagactgtaccagagggccagggaggaggagaaaggaattgagctggcctatctagagcagctgcatggccaacacgaagcctggcttattcacaagacaacgaagctccactttgaggctctgatgaacattccagtgctggtgttggatgtcaatgatgatttttctgaggaagtaaccaaacaagaagacctcatgagagaggtaaacacctttgtaaagaatctgtaaccaataccatgaagttcaggctgtgatctgggctccctgactttctgaagctagaaaaatgttgtgtctcccaaccacctttccatccccagcccctctcatccctggagcactctgccgctcaagagctggtttgttaattattgttagactttgccattgttttcttttgtacctgaagcattttgaaaataaagtttacttaagttatgctaaaaaaaaagtcgacgcggccgcaatttagtagtagtagtagtagtagtag

SEQ ID NO: 321278 - DNA, 1025 bp, Homo sapiens
  misc_feature (1002)..(1002): n is a, c, g, or t
ccttacgtcaacggtgcgctggagcgagtgagcagcgatacctagggcggaagtgctctcggcggaagtgatcgctgtgtgaatcgtgggtgggatggccgcgggccgcctctttctaagtcggcttcgagcacccttcagttccatggccaagagcccactcgagggcgtttcctcctccagaggcctgcacgcggggcgcgggccccgaaggctctccatcgaaggcaacattggcctgcactgcccaaagtcttggaaacttgctggatatgatgtaccgggagccagcacgatggtcctacacattccagacattttcctttttgagccgcctgaaagtacagctggagcccttccctgagaaactcttacaggccaggaagccagtacagatctttgagaggtctgtgtacagtgacaggtatatctttgcaaagaatctttttgaaaatggttccctcagtgacatcgagtggcatatctatcaggactggcattcttttctcctgtgggagtttgccagccggatcacattacatggcttcatctacctccaggcttctccccaggtttgtttgaagagactgtaccagagggccagggaggaggagaaaggaattgagctggcctatctagagcagctgcatggccaacacgaagcctggcttattcacaagacaacgaagctccactttgaggctctgatgaacattccagtgctggtgttggatgtcaatgatgatttttctgaggaagtaaccaaacaagaagacctcatgagagaggtaaacacctttgtaaagaatctgtaaccaataccatgaagttcaggctgtgatctgggctccctgactttctgaagctagaaaaatgttgtgtctcccaaccacctttccatccccagcccctctcatccctggagcactctgccgctcaagagctggtttgttaattattgttagactttgccattgttttcttttgtacctgaagattgtnggtgccctgaagattgttggtgg

SEQ ID NO: 321279 - DNA, 973 bp, Homo sapiens
caagcataacttaagtaactttagtttcaaaatgcttcaggtaccaaagaaaaccatggccaagtctaaccataatttaaccaaccagctcttgagcggcacgagtgatcgctgtgtgaatcgtgggtgggatggccgcgggccgcctctttctaagtcggcttcgagcacccttcagttccatggccaagagcccactcgagggcgtttcctcctccagaggcctgcacgcggggcgcgggccccgaaggctctccatcgaaggcaacattggcctgcactgcccaaagtcttggaaacttgctggatatgatgtaccgggagccagcacgatggtcctacacattccagacattttcctttttgagccgcctgaaagtacagctggagcccttccctgagaaactcttacaggccaggaagccagtacagatctttgagaggtctgtgtacagtgacaggctccactttgaggctctgatgaacattccagtgctggtgttggatgtcaatgatgatttttctgaggaagtaaccaaacaagaagacctcatgagagaggtaaacacctttgtaaagaatctgtaaccaataccatgaagttcaggctgtgatctgggctccctgactttctgaagctagaaaaatgttgtgtctcccaaccacctttccatccccagcccctctcatccctggagcactctgccgctcaagagctggtttgttaattattgttagactttgccattgttttcttttgtacctgaagcattttgaaaataaagtttacttaagttatgctaaaaacaacacaaaaaaaaactcggagcgacatcaattgccgggtgcgggaacacacacggctccccgacaatggcccatggcccatactggtttcctgaccccagttttcttctcccaccggcaaaaccgcgggccctataggagccattaattcgataagcggtaccga

SEQ ID NO: 321280 - DNA, 1049 bp, Homo sapiens
ccttacgtcaacggtgcgctggagcgagtgagcagcgatacctagggcggaagtgctctcggcggaagtgatcgctgtgtgaatcgtgggtgggatggccgcgggccgcctctttctaagtcggcttcgagcacccttcagttccatggccaagagcccactcgagggcgtttcctcctccagaggcctgcacgcggggcgcgggccccgaaggctctccatcgaaggcaacattgctgtgggaaagtccacgtttgtgaagttactcacgaaaacttacccagaatggcacgtagctacagaacctgtagcaacatggcagaatatccaggctgctggcacccaaaaagcctgcactgcccaaagtcttggaaacttgctggatatgatgtaccgggagccagcacgatggtcctacacattccagacattttcctttttgagccgcctgaaagtacagctggagcccttccctgagaaactcttacaggccaggaagccagtacagatctttgagaggtctgtgtacagtgacaggctccactttgaggctctgatgaacattccagtgctggtgttggatgtcaatgatgatttttctgaggaagtaaccaaacaagaagacctcatgagagaggtaaacacctttgtaaagaatctgtaaccaataccatgaagttcaggctgtgatctgggctccctgactttctgaagctagaaaaatgttgtgtctcccaaccacctttccatccccagcccctctcatccctggagcactctgccgctcaagagctggtttgttaattattgttagactttgccattgttttcttttgtacctgaagcattttgaaaataaagtttacttaagttatgctaaaaacaacacaaaaaaaaactcggagcgacatcaattgccgggtgcgggaacacacacggctccccgacaatggcccatggcccatactggtttcctgaccccagttttcttctcccaccggcaaaaccgcgggccctataggagccattaattcgataagcggtaccga

SEQ ID NO: 321281 - DNA, 951 bp, Homo sapiens
caagcataacttaagtaactttagtttcaaaatgcttcaggtaccaaagaaaaccatggccaagtctaaccataatttaaccaaccagctcttgagcggcacgagtgatcgctgtgtgaatcgtgggtgggatggccgcgggccgcctctttctaagtcggcttcgagcacccttcagttccatggccaagagcccactcgagggcgtttcctcctccagaggcctgcacgcggggcgcgggccccgaaggctctccatcgaaggcaacattggcctgcactgcccaaagtcttggaaacttgctggatatgatgtaccgggagccagcacgatggtcctacacattccagacattttcctttttgagccgcctgaaagtacagctggagcccttccctgagaaactcttacaggccaggaagccagtacagatctttgagaggtctgtgtacagtgacaggtatatctttgcaaagaatctttttgaaaatggttccctcagtgacatcgagtggcatatctatcaggactggcattcttttctcctgtgggagtttgccagccggatcacattacatggcttcatctacctccaggcttctccccaggctccactttgaggctctgatgaacattccagtgctggtgttggatgtcaatgatgatttttctgaggaagtaaccaaacaagaagacctcatgagagaggtaaacacctttgtaaagaatctgtaaccaataccatgaagttcaggctgtgatctgggctccctgactttctgaagctagaaaaatgttgtgtctcccaaccacctttccatccccagcccctctcatccctggagcactctgccgctcaagagctggtttgttaattattgttagactttgccattgttttcttttgtacctgaagcattttgaaaataaagtttacttaagttatgcta

SEQ ID NO: 321282 - DNA, 562 bp, Homo sapiens
cggcggatgatggccgcggtccgcgatggggtgtggatggagtttcggccgcatctggctttattgaatttgtttttttaaatgcagtttacatgcagtttctttgaaaagtcatgttgaatttagatctgttctctgagtaagacttggcgagtatgtgaaacttgactcaagttacatttctttttttctgtcccccaaacgttcacgcttcttataggctccactttgaggctctgatgaacattccagtgctggtgttggatgtcaatgatgatttttctgaggaagtaaccaaacaagaagacctcatgagagaggtaaacacctttgtaaagaatctgtaaccaataccatgaagttcaggctgtgatctgggctccctgactttctgaagctagaaaaatgttgtgtctcccaaccacctttccatccccagcccctctcatccctggagcactctgccgctcaagagctggtttgttaattattgttagactttgccattgttttcttttgtacctgaagcattttgaaaataaagtttacttaagttatgcta

SEQ ID NO: 321283 - DNA, 906 bp, Homo sapiens
  misc_feature (2)..(2): n is a, c, g, or t
anagaatcgcttgaacctggaggcaaagattgcggtgagccgagatcgcaccactgtactccagcctgggcgacagagtgagatgcccagaagaagtttaatattgaatataatctttacattccaagggcctttttattagattgtatttctccagctttttctttgtttcttaacatttccctagactgaacattgtgattgatggtgatagttggctcagcatgaagggctgaaaatgttagagaaattgtcagtattactaagttggcattcctggtttctgcctgtcctccctttaggcttggtttgttgtccacttaaaatgtttggtgctctgactgtttgttagtatcactctcaagaatgaagagaaacctcaacctttctgtttccggccaactttattgaatttgtttttttaaatgcagtttacatgcagtttctttgaaaagtcatgttgaatttagatctgttctctgagtaagacttggcgagtatgtgaaacttgactcaagttacatttctttttttctgtcccccaaacgttcacgcttcttataggctccactttgaggctctgatgaacattccagtgctggtgttggatgtcaatgatgatttttctgaggaagtaaccaaacaagaagacctcatgagagaggtaaacacctttgtaaagaatctgtaaccaataccatgaagttcaggctgtgatctgggctccctgactttctgaagctagaaaaatgttgtgtctcccaaccacctttccatccccagcccctctcatccctggagcactctgccgctcaagagctggtttgttaattattgttagactttgccattgttttcttttgtacctgaagcattttgaaaataaagtttacttaagttatgcta

SEQ ID NO: 321284 - DNA, 564 bp, Homo sapiens
ggatggggggggggagggggggtggcggaggggagggggggggggtgcggccgcatcgggctttattgaatttgtttttttaaatgcagtttacatgcagtttctttgaaaagtcatgttgaatttagatctgttctctgagtaagacttggcgagtatgtgaaacttgactcaagttacatttctttttttctgtcccccaaacgttcacgcttcttataggctccactttgaggctctgatgaacattccagtgctggtgttggatgtcaatgatgatttttctgaggaagtaaccaaacaagaagacctcatgagagaggtaaacacctttgtaaagaatctgtaaccaataccatgaagttcaggctgtgatctgggctccctgactttctgaagctagaaaaatgttgtgtctcccaaccacctttccatccccagcccctctcatccctggagcactctgccgctcaagagctggtttgttaattattgttagactttgccattgttttcttttgtacctgaagcattttgaaaataaagtttacttaagttatgcta

SEQ ID NO: 321285 - DNA, 861 bp, Homo sapiens
ccttacgtcaacggtgcgctggagcgagtgagcagcgatacctagggcggaagtgctctcggcggaagtgatcgctgtgtgaatcgtgggtgggatggccgcgggccgcctctttctaagtcggcttcgagcacccttcagttccatggccaagagcccactcgagggcgtttcctcctccagaggcctgcacgcggggcgcgggccccgaaggctctccatcgaaggcaacattgctgtgggaaagtccacgtttgtgaagttactcacgaaaacttacccagaatggcacgtagctacagaacctgtagcaacatggcagaatatccaggctgctggcacccaaaaagcctgcactgcccaaagtcttggaaacttgctggatatgatgtaccgggagccagcacgatggtcctacacattccagacattttcctttttgagccgcctgaaagtacagctggagcccttccctgagaaactcttacaggccaggaagccagtacagatctttgagaggctccactttgaggctctgatgaacattccagtgctggtgttggatgtcaatgatgatttttctgaggaagtaaccaaacaagaagacctcatgagagaggtaaacacctttgtaaagaatctgtaaccaataccatgaagttcaggctgtgatctgggctccctgactttctgaagctagaaaaatgttgtgtctcccaaccacctttccatccccagcccctctcatccctggagcactctgccgctcaagagctggtttgttaattattgttagactttgccattgttttcttttgtacctgaagcattttgaaaataaagtttacttaagttatgcta

SEQ ID NO: 321286 - DNA, 1026 bp, Homo sapiens
cggcggatgatggccgcggtccgcgatggggtgtggatggagtttcggccgcatctggctttattgaatttgtttttttaaatgcagtttacatgcagtttctttgaaaagtcatgttgaatttagatctgttctctgagtaagacttggcgagtatgtgaaacttgactcaagttacatttctttttttctgtcccccaaacgttcacgcttcttataggctccactttgaggctctgatgaacattccagtgctggtgttggatgtcaatgatgatttttctgaggaagtaaccaaacaagaagacctcatgagagaggtgggaaggactttaactcctgttttctggtggtttcctttgttgtacttttatctttctggcctttgcttcaaagttcaatatcatgggtcttgtgctttgcatctcacattgcatttcacactccaaggcctatggaatcttgtgcagattacaaatatccctattctctaaagtatgctggactaataattgttaaataattgacttgtaacatgtgcttgccagctgactttcttctctaaggcatcctaaaactagggaaatgagactactggattctattcccagctctgccacttgatgctatatgaccctgggctgcccacatttcttctccatgcctattattttcctttcctcacaaaaacctcatgggcttggctgcatatgcattgggggtggaccattgaaaattctgttaaaaatgtgaaattaaacttctgattttctccttcccacaggtaaacacctttgtaaagaatctgtaaccaataccatgaagttcaggctgtgatctgggctccctgactttctgaagctagaaaaatgttgtgtctcccaaccacctttccatccccagcccctctcatccctggagcactctgccgctcaagagctggtttgttaattattgttagactttgccattgttttcttttgtacctgaagcattttgaaaataaagtttacttaagttatgcta

SEQ ID NO: 321287 - DNA, 646 bp, Homo sapiens
caagcataacttaagtaactttagtttcaaaatgcttcaggtaccaaagaaaaccatggccaagtctaaccataatttaaccaaccagctcttgagcggcacgagtgatcgctgtgtgaatcgtgggtgggatggccgcgggccgcctctttctaagtcggcttcgagcacccttcagttccatggccaagagcccactcgagggcgtttcctcctccagaggcctgcacgcggggcgcgggccccgaaggctctccatcgaaggcaacattgacgaagcctggcttattcacaagacaacgaagctccactttgaggctctgatgaacattccagtgctggtgttggatgtcaatgatgatttttctgaggaagtaaccaaacaagaagacctcatgagagaggtaaacacctttgtaaagaatctgtaaccaataccatgaagttcaggctgtgatctgggctccctgactttctgaagctagaaaaatgttgtgtctcccaaccacctttccatccccagcccctctcatccctggagcactctgccgctcaagagctggtttgttaattattgttagactttgccattgttttcttttgtacctgaagcattttgaaaataaagtttacttaagttatgcta

SEQ ID NO: 321288 - DNA, 320 bp, Homo sapiens
cggcggatgatggccgcggtccgcgatggggtgtggatggagtttcggccgcatctggctttattgaatttgtttttttaaatgcagtttacatgcagtttctttgaaaagtcatgttgaatttagatctgttctctgagtaagacttggcgagtatgtgaaacttgactcaagttacatttctttttttctgtcccccaaacgttcacgcttcttataggctccactttgaggctctgatgaacattccagtgctggtgttggatgtcaatgatgatttttgtgtagcggtggaggattaagagagtgtctcagctagc

SEQ ID NO: 321289 - DNA, 328 bp, Homo sapiens
cggcggatgatggccgcggtccgcgatggggtgtggatggagtttcggccgcatctggctttattgaatttgtttttttaaatgcagtttacatgcagtttctttgaaaagtcatgttgaatttagatctgttctctgagtaagacttggcgagtatgtgaaacttgactcaagttacatttctttttttctgtcccccaaacgttcacgcttcttataggctccactttgaggctctgatgaacattccagtgctggtgttggatgtcaatgatgatttttgcctgagggcgtctgcggggggtgctgtttggccgcgcgcggggca

SEQ ID NO: 321290 - DNA, 726 bp, Homo sapiens
  misc_feature (710)..(710): n is a, c, g, or t
ccttacgtcaacggtgcgctggagcgagtgagcagcgatacctagggcggaagtgctctcggcggaagtgatcgctgtgtgaatcgtgggtgggatggccgcgggccgcctctttctaagtcggcttcgagcacccttcagttccatggccaagagcccactcgagggcgtttcctcctccagaggcctgcacgcggggcgcgggccccgaaggctctccatcgaaggcaacattgctgtgggaaagtccacgtttgtgaagttactcacgaaaacttacccagaatggcacgtagctacagaacctgtagcaacatggcagaatatccaggctgctggcacccaaaaagcctgcactgcccaaagtcttggaaacttgctggatatgatgtaccgggagccagcacgatggtcctacacattccagacattttcctttttgagccgcctgaaagtacagctggagcccttccctgagaaactcttacaggccaggaagccagtacagatctttgagaggtctgtgtacagtgacaggtatatctttgcaaagaatctttttgaaaatggttccctcagtgacatcgagtggcatatctatcaggactggcattcttttctcctgtgggagtttgccagccggatcacattacatggcttcatctacctccaggcttctccccagttttgtttgaaagactgtaccctcntaagcagtgaggagat

SEQ ID NO: 321291 - DNA, 815 bp, Homo sapiens
caagcataacttaagtaactttagtttcaaaatgcttcaggtaccaaagaaaaccatggccaagtctaaccataatttaaccaaccagctcttgagcggcacgagtgatcgctgtgtgaatcgtgggtgggatggccgcgggccgcctctttctaagtcggcttcgagcacccttcagttccatggccaagagcccactcgagggcgtttcctcctccagaggcctgcacgcggggcgcgggccccgaaggctctccatcgaaggcaacattggctccactttgaggctctgatgaacattccagtgctggtgttggatgtcaatgatgatttttctgaggaagtaaccaaacaagaagacctcatgagagaggtaaacacctttgtaaagaatctgtaaccaataccatgaagttcaggctgtgatctgggctccctgactttctgaagctagaaaaatgttgtgtctcccaaccacctttccatccccagcccctctcatccctggagcactctgccgctcaagagctggtttgttaattattgttagactttgccattgttttcttttgtacctgaagcattttgaaaataaagtttacttaagttatgctaaatagagggtgtctttccacagtaccgatccttgtaggccttttgggcccagtcgactttagaactgggcaagtttagcatggcggccgaaatctgggcccacttggcccaatccctctttggcgggctgtattaccaattaactggccggcgttacacaacgtggggacttgggacccttggtgtacgccccttgggct

SEQ ID NO: 321292 - DNA, 380 bp, Homo sapiens
cattacatggcttcatctacctccaggcttctccccaggtaacactgaacctacaaccttagactttagggccatatgaaacctaagaagtgacattctccaagcccctgattttctggttggagagattagagcgtagacattacctgcagcacagagagcagtgggggacaccctcctgtcccagcgttgagcaccctgttccccactggcttcgtgtagcagagtgctaaagccattgactatgcataaaaggattgctgttgatgtaggaacaacagagcaaatcgagtgtcatctttatgatgacgcttagggtttgcaggtgggacgctctgacctgtagccacttgcctcagctcctcctttactctgactgg

SEQ ID NO: 321293 - DNA, 803 bp, Homo sapiens
caagcataacttaagtaactttagtttcaaaatgcttcaggtaccaaagaaaaccatggccaagtctaaccataatttaaccaaccagctcttgagcggcacgagtgatcgctgtgtgaatcgtgggtgggatggccgcgggccgcctctttctaagtcggcttcgagcacccttcagttccatggccaagagcccactcgagggcgtttcctcctccagaggcctgcacgcggggcgcgggccccgaaggctctccatcgaaggcaacattggcctgcactgcccaaagtcttggaaacttgctggatatgatgtaccgggagccagcacgatggtcctacacattccagacattttcctttttgagccgcctgaaagtacagctggagcccttccctgagaaactcttacaggccaggaagccagtacagatctttgagaggtctgtgtacagtgacaggctccactttgaggctctgatgaacattccagtgctggtgttggatgtcaatgatgatttttctgaggaagtaaccaaacaagaagacctcatgagagaggtaaacacctttgtaaagaatctgtaaccaataccatgaagttcaggctgtgatctgggctccctgactttctgaagctagaaaaatgttgtgtctcccaaccacctttccatccccagcccctctcatccctggagcactctgccgctcaagagctggtttgttaattattgttagactttgccattgttttcttttgtacctgaagcattttgaaaataaagtttacttaagttatgcta

SEQ ID NO: 321294 - DNA, 951 bp, Homo sapiens
  misc_feature (2)..(2): n is a, c, g, or t
anagaatcgcttgaacctggaggcaaagattgcggtgagccgagatcgcaccactgtactccagcctgggcgacagagtgagatgcccagaagaagtttaatattgaatataatctttacattccaagggcctttttattagattgtatttctccagctttttctttgtttcttaacatttccctagactgaacattgtgattgatggtgatagttggctcagcatgaagggctgaaaatgttagagaaattgtcagtattactaagttggcattcctggtttctgcctgtcctccctttaggcttggtttgttgtccacttaaaatgtttggtgctctgactgtttgttagtatcactctcaagaatgaagagaaacctcaacctttctgtttccggccaactttattgaatttgtttttttaaatgcagtttacatgcagtttctttgaaaagtcatgttgaatttagatctgttctctgagtaagacttggcgagtatgtgaaacttgactcaagttacatttctttttttctgtcccccaaacgttcacgcttcttataggctccactttgaggctctgatgaacattccagtgctggtgttggatgtcaatgatgatttttctgaggaggttagtcacatcaatcacctgagagttcagcagcatccaacagtgttagttccacgtgttaacttcctgaagaaccacaggcttgcacatccaattatgcttcctgtccctttcctcccccgtgcggaatcaacttcagctcatcaatggggtaggaaagcctccttatttcgcaccctccatgctccaggcatccagggaaatgcccctgccacccctatctcccttgagttcttagggcttcctcctctagcaaggagatttccctttctagtcccgggggcagcggcacagcccggctctgacctcgcgggagc

SEQ ID NO: 321295 - DNA, 1067 bp, Homo sapiens
caagcataacttaagtaactttagtttcaaaatgcttcaggtaccaaagaaaaccatggccaagtctaaccataatttaaccaaccagctcttgagcggcacgagtgatcgctgtgtgaatcgtgggtgggatggccgcgggccgcctctttctaagtcggcttcgagcacccttcagttccatggccaagagcccactcgagggcgtttcctcctccagaggcctgcacgcggggcgcgggccccgaaggctctccatcgaaggcaacattggcctgcactgcccaaagtcttggaaacttgctggatatgatgtaccgggagccagcacgatggtcctacacattccagacattttcctttttgagccgcctgaaagtacagctggagcccttccctgagaaactcttacaggccaggaagccagtacagatctttgagaggtctgtgtacagtgacaggtatatctttgcaaagaatctttttgaaaatggttccctcagtgacatcgagtggcatatctatcaggactggcattcttttctcctgtgggagtttgccagccggatcacattacatggcttcatctacctccaggcttctccccaggtttgtttgaagagactgtaccagagggccagggaggaggagaaaggaattgagctggcctatctagagcagctgcatggccaacacgaagcctggcttattcacaagacaacgaagctccactttgaggctctgatgaacattccagtgctggtgttggatgtcaatgatgatttttctgaggaagtaaccaaacaagaagacctcatgagagaggtaaacacctttgtaaagaatctgtaaccaataccatgaagttcaggctgtgatctgggctccctgactttctgaagctagaaaaatgttgtgtctcccaaccacctttccatccccagcccctctcatccctggagcactctgccgctcaagagctggtttgttaattattgttagactttgccattgttttcttttgtacctgaagcattttgaaaataaagtttacttaagttatgcta

SEQ ID NO: 321296 - DNA, 1011 bp, Homo sapiens
caagcataacttaagtaactttagtttcaaaatgcttcaggtaccaaagaaaaccatggccaagtctaaccataatttaaccaaccagctcttgagcggcacgagtgatcgctgtgtgaatcgtgggtgggatggccgcgggccgcctctttctaagtcggcttcgagcacccttcagttccatggccaagagcccactcgagggcgtttcctcctccagaggcctgcacgcggggcgcgggccccgaaggctctccatcgaaggcaacattggcctgcactgcccaaagtcttggaaacttgctggatatgatgtaccgggagccagcacgatggtcctacacattccagacattttcctttttgagccgcctgaaagtacagctggagcccttccctgagaaactcttacaggccaggaagccagtacagatctttgagaggtctgtgtacagtgacagatatctatcaggactggcattcttttctcctgtgggagtttgccagccggatcacattacatggcttcatctacctccaggcttctccccaggtttgtttgaagagactgtaccagagggccagggaggaggagaaaggaattgagctggcctatctagagcagctgcatggccaacacgaagcctggcttattcacaagacaacgaagctccactttgaggctctgatgaacattccagtgctggtgttggatgtcaatgatgatttttctgaggaagtaaccaaacaagaagacctcatgagagaggtaaacacctttgtaaagaatctgtaaccaataccatgaagttcaggctgtgatctgggctccctgactttctgaagctagaaaaatgttgtgtctcccaaccacctttccatccccagcccctctcatccctggagcactctgccgctcaagagctggtttgttaattattgttagactttgccattgttttcttttgtacctgaagcattttgaaaataaagtttacttaagttatgcta

SEQ ID NO: 321297 - DNA, 879 bp, Homo sapiens
ccttacgtcaacggtgcgctggagcgagtgagcagcgatacctagggcggaagtgctctcggcggaagtgatcgctgtgtgaatcgtgggtgggatggccgcgggccgcctctttctaagtcggcttcgagcacccttcagttccatggccaagagcccactcgagggcgtttcctcctccagaggcctgcacgcggggcgcgggccccgaaggctctccatcgaaggcaacattgctgtgggaaagtccacgtttgtgaagttactcacgaaaacttacccagaatggcacgtagctacagaacctgtagcaacatggcagaatatccaggctgctggcacccaaaaagcctgcactgcccaaagtcttggaaacttgctggatatgatgtaccgggagccagcacgatggtcctacacattccagacattttcctttttgagccgcctgaaagtacagctggagcccttccctgagaaactcttacaggccaggaagccagtacagatctttgagaggtctgtgtacagtgacaggctccactttgaggctctgatgaacattccagtgctggtgttggatgtcaatgatgatttttctgaggaagtaaccaaacaagaagacctcatgagagaggtaaacacctttgtaaagaatctgtaaccaataccatgaagttcaggctgtgatctgggctccctgactttctgaagctagaaaaatgttgtgtctcccaaccacctttccatccccagcccctctcatccctggagcactctgccgctcaagagctggtttgttaattattgttagactttgccattgttttcttttgtacctgaagcattttgaaaataaagtttacttaagttatgcta

SEQ ID NO: 321298 - DNA, 615 bp, Homo sapiens
caagcataacttaagtaactttagtttcaaaatgcttcaggtaccaaagaaaaccatggccaagtctaaccataatttaaccaaccagctcttgagcggcacgagtgatcgctgtgtgaatcgtgggtgggatggccgcgggccgcctctttctaagtcggcttcgagcacccttcagttccatggccaagagcccactcgagggcgtttcctcctccagaggcctgcacgcggggcgcgggccccgaaggctctccatcgaaggcaacattggctccactttgaggctctgatgaacattccagtgctggtgttggatgtcaatgatgatttttctgaggaagtaaccaaacaagaagacctcatgagagaggtaaacacctttgtaaagaatctgtaaccaataccatgaagttcaggctgtgatctgggctccctgactttctgaagctagaaaaatgttgtgtctcccaaccacctttccatccccagcccctctcatccctggagcactctgccgctcaagagctggtttgttaattattgttagactttgccattgttttcttttgtacctgaagcattttgaaaataaagtttacttaagttatgcta

SEQ ID NO: 321299 - DNA, 828 bp, Homo sapiens
ccttacgtcaacggtgcgctggagcgagtgagcagcgatacctagggcggaagtgctctcggcggaagtgatcgctgtgtgaatcgtgggtgggatggccgcgggccgcctctttctaagtcggcttcgagcacccttcagttccatggccaagagcccactcgagggcgtttcctcctccagaggcctgcacgcggggcgcgggccccgaaggctctccatcgaaggcaacattgctgtgggaaagtccacgtttgtgaagttactcacgaaaacttacccagaatggcacgtagctacagaacctgtagcaacatggcagaatatccaggctgctggcacccaaaaaccagcacgatggtcctacacattccagacattttcctttttgagccgcctgaaagtacagctggagcccttccctgagaaactcttacaggccaggaagccagtacagatctttgagaggtctgtgtacagtgacaggctccactttgaggctctgatgaacattccagtgctggtgttggatgtcaatgatgatttttctgaggaagtaaccaaacaagaagacctcatgagagaggtaaacacctttgtaaagaatctgtaaccaataccatgaagttcaggctgtgatctgggctccctgactttctgaagctagaaaaatgttgtgtctcccaaccacctttccatccccagcccctctcatccctggagcactctgccgctcaagagctggtttgttaattattgttagactttgccattgttttcttttgtacctgaagcattttgaaaataaagtttacttaagttatgcta

SEQ ID NO: 321300 - DNA, 925 bp, Homo sapiens
caagcataacttaagtaactttagtttcaaaatgcttcaggtaccaaagaaaaccatggccaagtctaaccataatttaaccaaccagctcttgagcggcacgagtgatcgctgtgtgaatcgtgggtgggatggccgcgggccgcctctttctaagtcggcttcgagcacccttcagttccatggccaagagcccactcgagggcgtttcctcctccagaggcctgcacgcggggcgcgggccccgaaggctctccatcgaaggcaacattggcctgcactgcccaaagtcttggaaacttgctggatatgatgtaccgggagccagcacgatggtcctacacattccagacattttcctttttgagccgcctgaaagtacagctggagcccttccctgagaaactcttacaggccaggaagccagtacagatctttgagaggtctgtgtacagtgacaggctccactttgaggctctgatgaacattccagtgctggtgttggatgtcaatgatgatttttctgaggaagtaaccaaacaagaagacctcatgagagaggtaaacacctttgtaaagaatctgtaaccaataccatgaagttcaggctgtgatctgggctccctgactttctgaagctagaaaaatgttgtgtctcccaaccacctttccatccccagcccctctcatccctggagcactctgccgctcaagagctggtttgttaattattgttagactttgccattgttttcttttgtacctgaagcattttgaaaataaagtttacttaagttatgctaaaaaaaaaaacaaacacaccacaaacaaaaacaacaacaaaaaaaggggggggccaaaaaaaatccccgggggggccccaattagccccacccttttttgtgcaaaagggggccgctcaagg

SEQ ID NO: 321301 - DNA, 917 bp, Homo sapiens
ccttacgtcaacggtgcgctggagcgagtgagcagcgatacctagggcggaagtgctctcggcggaagtgatcgctgtgtgaatcgtgggtgggatggccgcgggccgcctctttctaagtcggcttcgagcacccttcagttccatggccaagagcccactcgagggcgtttcctcctccagaggcctgcacgcggggcgcgggccccgaaggctctccatcgaaggcaacattgctgtgggaaagtccacgtttgtgaagttactcacgaaaacttacccagaatggcacgtagctacagaacctgtagcaacatggcagaatatccaggctgctggcacccaaaaagcctgcactgcccaaagtcttggaaacttgctggatatgatgtaccgggagccagcacgatggtcctacacattccagacattttcctttttgagccgcctgaaagtacagctggagcccttccctgagaaactcttacaggccaggaagccagtacagatctttgagaggtctgtgtacagtgacaggctccactttgaggctctgatgaacattccagtgctggtgttggatgtcaatgatgatttttctgaggaagtaaccaaacaagaagacctcatgagagaggtaaacacctttgtaaagaatctgtaaccaataccatgaagttcaggctgtgatctgggctccctgactttctgaagctagaaaaatgttgtgtctcccaaccacctttccatccccagcccctctcatccctggagcactctgccgctcaagagctggtttgttaattattgttagactttgccattgttttcttttgtacctgaagcattttgaaaataaagtttacttaagttatgctaaaaaaaaacaaagggggggcggctaaagatattccatg

SEQ ID NO: 321302 - DNA, 665 bp, Homo sapiens
caagcataacttaagtaactttagtttcaaaatgcttcaggtaccaaagaaaaccatggccaagtctaaccataatttaaccaaccagctcttgagcggcacgagtgatcgctgtgtgaatcgtgggtgggatggccgcgggccgcctctttctaagtcggcttcgagcacccttcagttccatggccaagagcccactcgagggcgtttcctcctccagaggcctgcacgcggggcgcgggccccgaaggctctccatcgaaggcaacattggctccactttgaggctctgatgaacattccagtgctggtgttggatgtcaatgatgatttttctgaggaagtaaccaaacaagaagacctcatgagagaggtaaacacctttgtaaagaatctgtaaccaataccatgaagttcaggctgtgatctgggctccctgactttctgaagctagaaaaatgttgtgtctcccaaccacctttccatccccagcccctctcatccctggagcactctgccgctcaagagctggtttgttaattattgttagactttgccattgttttcttttgtacctgaagcattttgaaaataaagtttacttaagttatgctaaaaaaaaagtcgacgcggccgcaatttagtagtagtagtagtagtagtag

SEQ ID NO: 321303 - DNA, 687 bp, Homo sapiens
ccttacgtcaacggtgcgctggagcgagtgagcagcgatacctagggcggaagtgctctcggcggaagtgatcgctgtgtgaatcgtgggtgggatggccgcgggccgcctctttctaagtcggcttcgagcacccttcagttccatggccaagagcccactcgagggcgtttcctcctccagaggcctgcacgcggggcgcgggccccgaaggctctccatcgaaggcaacattgctgtgggaaagtccacgtttgtgaagttactcacgaaaacttacccagaatggcacgtagctacagaacctgtagcaacatggcagaatatccaggctgctggcacccaaaaagcctgcactgcccaaagtcttggaaacttgctggatatgatgtaccgggagccagcacgatggtcctacacattccagacattttcctttttgagccgcctgaaagtacagctggagcccttccctgagaaactcttacaggccaggaagccagtacagatctttgagaggtctgtgtacagtgacagtatccttgcaaagattttttttgttcttctgtgggagtttgccagcggatcacattacatggcttaatttaccttcaggctttttccccaggtttgtttaagaagactgtcccaaaggcccaagggaggaggagaaggaaatttactgcg

SEQ ID NO: 321304 - DNA, 739 bp, Homo sapiens
  misc_feature (623)..(623): n is a, c, g, or t
  misc_feature (625)..(625): n is a, c, g, or t
caagcataacttaagtaactttagtttcaaaatgcttcaggtaccaaagaaaaccatggccaagtctaaccataatttaaccaaccagctcttgagcggcacgagtgatcgctgtgtgaatcgtgggtgggatggccgcgggccgcctctttctaagtcggcttcgagcacccttcagttccatggccaagagcccactcgagggcgtttcctcctccagaggcctgcacgcggggcgcgggccccgaaggctctccatcgaaggcaacattggctccactttgaggctctgatgaacattccagtgctggtgttggatgtcaatgatgatttttctgaggaagtaaccaaacaagaagacctcatgagagaggtaaacacctttgtaaagaatctgtaaccaataccatgaagttcaggctgtgatctgggctccctgactttctgaagctagaaaaatgttgtgtctcccaaccacctttccatccccagcccctctcatccctggagcactctgccgctcaagagctggtttgttaattattgttagactttgccattgttttcttttgtacctgaagcattttgaaaataaagtttacttaagttatgctaaaaaaaananacaaatatggcggcgaaattggagctacttgccaatttgccctatgggagccgattacaattactggccgcggtttacaagtcgggactgggccctggcgttcccctttggcct

SEQ ID NO: 321305 - DNA, 277 bp, Homo sapiens
atttaagtctttcataagaattttatgaggacatagcaccaaaaagcaactcaaagagagctaactctcaagggtaaacaacctggacaaatgtctatagttttttgctgatctgaatttatttcaaaataaattctagtctatctagaagacttttccccaaagaatgcatcagaggttaaaatactaatagtagatattctgggaaaaaataaaaaggaagaggaagtatagcaggaagggtatggatgaaaaaaaaggagaaagaatgcagaat

SEQ ID NO: 321306 - DNA, 438 bp, Homo sapiens
gactataggatggaaaagtgacatcagaggagttacattacttcgttcagaaccatttcacaagtgcaagggattagccaagcctgcaatcctattatgtatctgagtgtgtgtgtgtgtgtatgtgtgtgttatgggggaaggggggggttctttaaaatttctgtggtttgtggctttttcttccatacattagttcccaccatcgcatgcccagggaccactgcctggcattatcgcatgctgggatcatcgggggagggtagtgaagctcaccactgtcctttgttttggagatttttatttttgcataagtagtccatcctatacagatagctgattaactgtattcccctttcccctatggctgctggtgtaaataaactgcatctccccattggtaaacagtaataaaattttaaaaaatgaaaaaaaaat

SEQ ID NO: 321307 - DNA, 3557 bp, Homo sapiens
agcggagcggcggggctaggcccgacaggggagcggaagaggcccaggaggctgggtgaggcgctgagacggtttggcggtgagtcctgggccaggcgcagctgaaaggcccgcaacccgggaaacgtcaaaacaaacagaaggacttgggattccggagcagtcgcccctatcgctgctcctgcagttgcggacgccaccgaccccgccgccggaggactgggcactgaaaggcctctaggcctaggcgcggcccgcggagccagacgtgttgctgccgtgagtaaaacgagcgccctctccgcactcgtttacaaattaaaatggaggaaatttcgttggccaacctggatactaacaagctagaggccatcgctcaggagatttacgtagacctgatagaggattcttgtttgggattctgctttgaggtgcaccgggcagtcaagtgtggctacttctacctggagttcgcagagactggtagcgtgaaggattttggcattcagccagtggaagacaaaggagcgtgccgcctcccgctttgctcccttcccggagaacctgggaatgggcctgatcagcagctccagcgctcacctccggaattccagtagctgcaaaatgagagtctgaaagtggccaggacaataacatagactggtcctgtggcttcgaggagtaagctggagcaagctctgaagccctgggcaggaggagctgcacagcctgcgggccatgcagtgcctgttgatctctaaacacaccaggatgtgcgcaagatcctgtagtgcccccagtgcacaggtgagcagttgtgtgcccagcatataaaatttttggttcctcagcctttctgtctgcctgatgtcaagggcttcctggacagtttggacgttacagttcgtcaggccgtgatcagtggcctgcagtgggactgctcctttgatatctgaacctctgttatgggcttctctgagacaagtaaatgtcaggtgcaagatctggatactaacagtttcagtttgggaaatccaagaaaaagaattatcaagtttgatagggaagctctgtagccttgactccagcaagaagaaaaggtcaaaaccacgtgtttcccaaaagtccagactacaatgattcagctgacttgaggacaaggcctagcatttggctgagcagagccctcttccttgccctccaacctggtggcataggcttggcaaatggacaacttggttgtccagacaggttgaggattcggttatgatcccctggggaggtagcagggacctctgcaactatgcatgatttctcaaacttcaagattcatgtctggatgtattatgctgtggatataagtttagtagggcggtcatttcctactctgagttactggttacctagccagtccatgggtgtgacttggtccttaagtcaggtcactatctgcctcccaccctgggggcaggactgaagtatagaagagcatcatggctgtgcaggaggctgtggtttgaaaactgagcccagagggcactttcagctgccctcaataatgtgaatggattagtgctaggagccaaggagcaggactggattatctcatctgactgtgtgcagaatcctgttgaatgtccctgttttctttggttgggcagtcagagctctgctatggtgaacatccagactgtcaccactttctgtctgccgctcgaaagggatagtcctttccactcggtcccctttggatcttcttgacaacaggagcagtccttttattgttagaagtcagagaaagacctccagaatctcctgactttagggaatggtataggggaagatgggaagtaagagtcacatatcaaaactaccctccactttattccctgagcgagggtttatgaagtataaaggggtgggagccccgaggtgagcgggaacggtgctgctttatttgaaatgttttcttacctcattctgtgccccagtagggggtccagcctcatctgtctggcttggccctgtgttcctcctgtcccctgctccactgcctatctggtgccccaggtgctgcttgccactccagctgtcacattgaacagtttcaattcagctcttaatgctcctgcttccgaagcctgcccaatttcttttttcttggcctctgtttttttttttctttctttttcccttgtttttgtagaagactcagaggagaatctttcttatggctccctctgttgagattggaattggaagagaacttaattttttgtatttaaaatgcagtgtcatgcctataagcatttctcctatataggactgctttgctagtgtgccctcttgctgtgtcttacttcataaggagttgtatcttcccacctccatttcaatactgccggttaggacctaagtagaagagcagtaaaggctgattgacacacagggggatggagttggtccttgtccattctctcacccttgctgtgcatgtatcaatccttatcccagaaggtactatttagactgtatagactgatttagattacatactttagaggattaaggaaaccatagagtttgggccttggaactgttactgccttgtcctagagttgtcctgatcaggcttggggcctagttacagattagtcttaaagaattgcattaacttaaaaaaaatcaaaccttggcaagagctaaaataatttggagatatctttgcccttgacttgtagacgacatctaagaggatgaagaaaggagagtctaagtgagactctggcctacttcctaacaatgtcttggaagtgggatgatggtaaaggagaaaggccacagtccaatccctctgccttcagatagggaactcaaatcctgaaattactgttttctttctggccttttctcctggttagaggaggaagcggaaagtagttttgagtaatactttgttcatattaccccccttttgttttttgtttctggcccctctaccaatagggcagtagcctcctgccctggatgggtataaggtgggcttggtccaacaggtgcccagagggtacatactcctttctggggagagaatgctccctaccatatagttgacagtggttaggaactctccctttccctacctaccttccttttaatagcagaattcctatttttcccttgattatgtgtattgatcaccctgcaatcctattatgtatctgagtgtgtgtgtgtgtgtatgtgtgtgttatgggggaaggggggggttctttaaaatttctgtggtttgtggctttttcttccatacattagttcccaccatcgcatgcccagggaccactgcctggcattatcgcatgctgggatcatcgggggagggtagtgaagctcaccactgtcctttgttttggagatttttatttttgcataagtagtccatcctatacagatagctgattaactgtattcccctttcccctatggctgctggtgtaaataaactgcatctccccattggtaaacagtaataaaattttaaaaaatgaaaaaaaaat

SEQ ID NO: 321308 - DNA, 3617 bp, Homo sapiens
agcggagcggcggggctaggcccgacaggggagcggaagaggcccaggaggctgggtgaggcgctgagacggtttggcggtgagtcctgggccaggcgcagctgaaaggcccgcaacccgggaaacgtcaaaacaaacagaaggacttgggattccggagcagtcgcccctatcgctgctcctgcagttgcggacgccaccgaccccgccgccggaggactgggcactgaaaggcctctaggcctaggcgcggcccgcggagccagacgtgttgctgccgtgagtaaaacgagcgccctctccgcactcgtttacaaattaaaatggaggaaatttcgttggccaacctggatactaacaagctagaggccatcgctcaggagatttacgtagacctgatagaggattcttgtttgggattctgctttgaggtgcaccgggcagtcaagtgtggctacttctacctggagttcgcagagactggtagcgtgaaggattttggcattcagccagtggaagacaaaggagcgtgccgcctcccgctttgctcccttcccggagaacctgggaatgggcctgatcagcagctccagcgctcacctccggaattccagtagctgcaaaatgagagtctgaaagtggccaggacaataacatagactggtcctgtggcttcgaggagtaagctaagtagaaaaaagtagaaaaatcagacaaaagttttaattcccccttgaagatcctagcatttaaaaacccaaagtggataatttaggaatcctttttttaaagtgtattacctggagcaagctctgaagccctgggcaggaggagctgcacagcctgcgggccatgcagtgcctgttgatctctaaacacaccaggatgtgcgcaagatcctgtagtgcccccagtgcacaggtgagcagttgtgtgcccagcatataaaatttttggttcctcagcctttctgtctgcctgatgtcaagggcttcctggacagtttggacgttacagttcgtcaggccgtgatcagtggcctgcagtgggactgctcctttgatatctgaacctctgttatgggcttctctgagacaagtaaatgtcaggtgcaagatctggatactaacagtttcagtttgggaaatccaagaaaaagaattatcaagtttgatagggaagctctgtagccttgactccagcaagaagaaaaggtcaaaaccacgtgtttcccaaaagtccagactacaatgattcagctgacttgaggacaaggcctagcatttggctgagcagagccctcttccttgccctccaacctggtggcataggcttggcaaatggacaacttggttgtccagacaggttgaggattcggttatgatcccctggggaggtagcagggacctctgcaactatgcatgatttctcaaacttcaagattcatgtctggatgtattatgctgtggatataagtttagtagggcggtcatttcctactctgagttactggttacctagccagtccatgggtgtgacttggtccttaagtcaggtcactatctgcctcccaccctgggggcaggactgaagtatagaagagcatcatggctgtgcaggaggctgtggtttgaaaactgagcccagagggcactttcagctgccctcaataatgtgaatggattagtgctaggagccaaggagcaggactggattatctcatctgactgtgtgcagaatcctgttgaatgtccctgttttctttggttgggcagtcagagctctgctatggtgaacatccagactgtcaccactttctgtctgccgctcgaaagggatagtcctttccactcggtcccctttggatcttcttgacaacaggagcagtccttttattgttagaagtcagagaaagacctccagaatctcctgactttagggaatggtataggggaagatgggaagtaagagtcacatatcgggagccccgaggtgagcgggaacggtgctgctttatttgaaatgttttcttacctcattctgtgccccagtagggggtccagcctcatctgtctggcttggccctgtgttcctcctgtcccctgctccactgcctatctggtgccccaggtgctgcttgccactccagctgtcacattgaacagtttcaattcagctcttaatgctcctgcttccgaagcctgcccaatttcttttttcttggcctctgtttttttttttctttctttttcccttgtttttgtagaagactcagaggagaatctttcttatggctccctctgttgagattggaattggaagagaacttaattttttgtatttaaaatgcagtgtcatgcctataagcatttctcctatataggactgctttgctagtgtgccctcttgctgtgtcttacttcataaggagttgtatcttcccacctccatttcaatactgccggttaggacctaagtagaagagcagtaaaggctgattgacacacagggggatggagttggtccttgtccattctctcacccttgctgtgcatgtatcaatccttatcccagaaggtactatttagactgtatagactgatttagattacatactttagaggattaaggaaaccatagagtttgggccttggaactgttactgccttgtcctagagttgtcctgatcaggcttggggcctagttacagattagtcttaaagaattgcattaacttaaaaaaaatcaaaccttggcaagagctaaaataatttggagatatctttgcccttgacttgtagacgacatctaagaggatgaagaaaggagagtctaagtgagactctggcctacttcctaacaatgtcttggaagtgggatgatggtaaaggagaaaggccacagtccaatccctctgccttcagatagggaactcaaatcctgaaattactgttttctttctggccttttctcctggttagaggaggaagcggaaagtagttttgagtaatactttgttcatattaccccccttttgttttttgtttctggcccctctaccaatagggcagtagcctcctgccctggatgggtataaggtgggcttggtccaacaggtgcccagagggtacatactcctttctggggagagaatgctccctaccatatagttgacagtggttaggaactctccctttccctacctaccttccttttaatagcagaattcctatttttcccttgattatgtgtattgatcaccctgcaatcctattatgtatctgagtgtgtgtgtgtgtgtatgtgtgtgttatgggggaaggggggggttctttaaaatttctgtggtttgtggctttttcttccatacattagttcccaccatcgcatgcccagggaccactgcctggcattatcgcatgctgggatcatcgggggagggtagtgaagctcaccactgtcctttgttttggagatttttatttttgcataagtagtccatcctatacagatagctgattaactgtattcccctttcccctatggctgctggtgtaaataaactgcatctccccattggtaaacagtaataaaattttaaaaaatgaaaaaaaaat

SEQ ID NO: 321309 - DNA, 2791 bp, Homo sapiens
gaatcgagctctgtacccagcagcatagatattaccgacaggtgagcagttgtgtgcccagcatataaaatttttggttcctcagcctttctgtctgcctgatgtcaagggcttcctggacagtttggacgttacagttcgtcaggccgtgatcagtggcctgcagtgggactgctcctttgatatctgaacctctgttatgggcttctctgagacaagtaaatgtcaggtgcaagatctggatactaacagtttcagtttgggaaatccaagaaaaagaattatcaagtttgatagggaagctctgtagccttgactccagcaagaagaaaaggtcaaaaccacgtgtttcccaaaagtccagactacaatgattcagctgacttgaggacaaggcctagcatttggctgagcagagccctcttccttgccctccaacctggtggcataggcttggcaaatggacaacttggttgtccagacaggttgaggattcggttatgatcccctggggaggtagcagggacctctgcaactatgcatgatttctcaaacttcaagattcatgtctggatgtattatgctgtggatataagtttagtagggcggtcatttcctactctgagttactggttacctagccagtccatgggtgtgacttggtccttaagtcaggtcactatctgcctcccaccctgggggcaggactgaagtatagaagagcatcatggctgtgcaggaggctgtggtttgaaaactgagcccagagggcactttcagctgccctcaataatgtgaatggattagtgctaggagccaaggagcaggactggattatctcatctgactgtgtgcagaatcctgttgaatgtccctgttttctttggttgggcagtcagagctctgctatggtgaacatccagactgtcaccactttctgtctgccgctcgaaagggatagtcctttccactcggtcccctttggatcttcttgacaacaggagcagtccttttattgttagaagtcagagaaagacctccagaatctcctgactttagggaatggtataggggaagatgggaagtaagagtcacatatcaaaactaccctccactttattccctgagcgagggtttatgaagtataaaggggtgggagccccgaggtgagcgggaacggtgctgctttatttgaaatgttttcttacctcattctgtgccccagtagggggtccagcctcatctgtctggcttggccctgtgttcctcctgtcccctgctccactgcctatctggtgccccaggtgctgcttgccactccagctgtcacattgaacagtttcaattcagctcttaatgctcctgcttccgaagcctgcccaatttcttttttcttggcctctgtttttttttttctttctttttcccttgtttttgtagaagactcagaggagaatctttcttatggctccctctgttgagattggaattggaagagaacttaattttttgtatttaaaatgcagtgtcatgcctataagcatttctcctatataggactgctttgctagtgtgccctcttgctgtgtcttacttcataaggagttgtatcttcccacctccatttcaatactgccggttaggacctaagtagaagagcagtaaaggctgattgacacacagggggatggagttggtccttgtccattctctcacccttgctgtgcatgtatcaatccttatcccagaaggtactatttagactgtatagactgatttagattacatactttagaggattaaggaaaccatagagtttgggccttggaactgttactgccttgtcctagagttgtcctgatcaggcttggggcctagttacagattagtcttaaagaattgcattaacttaaaaaaaatcaaaccttggcaagagctaaaataatttggagatatctttgcccttgacttgtagacgacatctaagaggatgaagaaaggagagtctaagtgagactctggcctacttcctaacaatgtcttggaagtgggatgatggtaaaggagaaaggccacagtccaatccctctgccttcagatagggaactcaaatcctgaaattactgttttctttctggccttttctcctggttagaggaggaagcggaaagtagttttgagtaatactttgttcatattaccccccttttgttttttgtttctggcccctctaccaatagggcagtagcctcctgccctggatgggtataaggtgggcttggtccaacaggtgcccagagggtacatactcctttctggggagagaatgctccctaccatatagttgacagtggttaggaactctccctttccctacctaccttccttttaatagcagaattcctatttttcccttgattatgtgtattgatcaccctgcaatcctattatgtatctgagtgtgtgtgtgtgtgtatgtgtgtgttatgggggaaggggggggttctttaaaatttctgtggtttgtggctttttcttccatacattagttcccaccatcgcatgcccagggaccactgcctggcattatcgcatgctgggatcatcgggggagggtagtgaagctcaccactgtcctttgttttggagatttttatttttgcataagtagtccatcctatacagatagctgattaactgtattcccctttcccctatggctgctggtgtaaataaactgcatctccccattggtaaacagtaataaaattttaaaaaatgaaaaaaaaat

SEQ ID NO: 321310 - DNA, 3608 bp, Homo sapiens
agcggagcggcggggctaggcccgacaggggagcggaagaggcccaggaggctgggtgaggcgctgagacggtttggcggtgagtcctgggccaggcgcagctgaaaggcccgcaacccgggaaacgtcaaaacaaacagaaggacttgggattccggagcagtcgcccctatcgctgctcctgcagttgcggacgccaccgaccccgccgccggaggactgggcactgaaaggcctctaggcctaggcgcggcccgcggagccagacgtgttgctgccgtgagtaaaacgagcgccctctccgcactcgtttacaaattaaaatggaggaaatttcgttggccaacctggatactaacaagctagaggccatcgctcaggagatttacgtagacctgatagaggattcttgtttgggattctgctttgaggtgcaccgggcagtcaagtgtggctacttctacctggagttcgcagagactggtagcgtgaaggattttggcattcagccagtggaagacaaaggagcgtgccgcctcccgctttgctcccttcccggagaacctgggaatgggcctgatcagcagctccagcgctcacctccggaattccagtagctgcaaaatgagagtctgaaagtggccaggacaataacatagactggtcctgtggcttcgaggagtaagctaagtagaaaaaagtagaaaaatcagacaaaagttttaattcccccttgaagatcctagcatttaaaaacccaaagtggataatttaggaatcctttttttaaagtgtattacctggagcaagctctgaagccctgggcaggaggagctgcacagcctgcgggccatgcagtgcctgttgatctctaaacacaccaggatgtgcgcaagatcctgtagtgcccccagtgcacaggtgagcagttgtgtgcccagcatataaaatttttggttcctcagcctttctgtctgcctgatgtcaagggcttcctggacagtttggacgttacagttcgtcaggccgtgatcagtggcctgcagtgggactgctcctttgatatctgaacctctgttatgggcttctctgagacaagtaaatgtcaggtgcaagatctggatactaacagtttcagtttgggaaatccaagaaaaagaattatcaagtttgatagggaagctctgtagccttgactccagcaagaagaaaaggtcaaaaccacgtgtttcccaaaagtccagactacaatgattcagctgacttgaggacaaggcctagcatttggctgagcagagccctcttccttgccctccaacctggtggcataggcttggcaaatggacaacttggttgtccagacaggttgaggattcggttatgatcccctggggaggtagcagggacctctgcaactatgcatgatttctcaaacttcaagattcatgtctggatgtattatgctgtggatataagtttagtagggcggtcatttcctactctgagttactggttacctagccagtccatgggtgtgacttggtccttaagtcaggtcactatctgcctcccaccctgggggcaggactgaagtatagaagagcatcatggctgtgcaggaggctgtggtttgaaaactgagcccagagggcactttcagctgccctcaataatgtgaatggattagtgctaggagccaaggagcaggactggattatctcatctgactgtgtgcagaatcctgttgaatgtccctgttttctttggttgggcagtcagagctctgctatggtgaacatccagactgtcaccactttctgtctgccgctcgaaagggatagtcctttccactcggtcccctttggatcttcttgacaacaggagcagtccttttattgttagaagtcagagaaagacctccagaatctcctgactttagggaatggtataggggaagatgggaagtaagagtcacatatcaaaactaccctccactttattccctgagcgagggtttatgaagtataaaggggtgggagccccgaggtgagcgggaacggtgctgctttatttgaaatgttttcttacctcattctgtgccccagtagggggtccagcctcatctgtctggcttggccctgtgttcctcctgtcccctgctccactgcctatctggtgccccaggtgctgcttgccactccagctgtcacattgaacagtttcaattcagctcttaatgctcctgcttccgaagcctgcccaatttcttttttcttggcctctgtttttttttttctttctttttcccttgtttttgtagaagactcagaggagaatctttcttatggctccctctgttgagattggaattggaagagaacttaattttttgtatttaaaatgcagtgtcatgcctataagcatttctcctatataggactgctttgctagtgtgccctcttgctgtgtcttacttcataaggagttgtatcttcccacctccatttcaatactgccggttaggacctaagtagaagagcagtaaaggctgattgacacacagggggatggagttggtccttgtccattctctcacccttgctgtgcatgtatcaatccttatcccagaaggtactatttagactgtatagactgatttagattacatactttagaggattaaggaaaccatagagtttgggccttggaactgttactgccttgtcctagagttgtcctgatcaggcttggggcctagttacagattagtcttaaagaattgcattaacttaaaaaaaatcaaaccgatgaagaaaggagagtctaagtgagactctggcctacttcctaacaatgtcttggaagtgggatgatggtaaaggagaaaggccacagtccaatccctctgccttcagatagggaactcaaatcctgaaattactgttttctttctggccttttctcctggttagaggaggaagcggaaagtagttttgagtaatactttgttcatattaccccccttttgttttttgtttctggcccctctaccaatagggcagtagcctcctgccctggatgggtataaggtgggcttggtccaacaggtgcccagagggtacatactcctttctggggagagaatgctccctaccatatagttgacagtggttaggaactctccctttccctacctaccttccttttaatagcagaattcctatttttcccttgattatgtgtattgatcaccctgcaatcctattatgtatctgagtgtgtgtgtgtgtgtatgtgtgtgttatgggggaaggggggggttctttaaaatttctgtggtttgtggctttttcttccatacattagttcccaccatcgcatgcccagggaccactgcctggcattatcgcatgctgggatcatcgggggagggtagtgaagctcaccactgtcctttgttttggagatttttatttttgcataagtagtccatcctatacagatagctgattaactgtattcccctttcccctatggctgctggtgtaaataaactgcatctccccattggtaaacagtaataaaattttaaaaaatgaaaaaaaaat

SEQ ID NO: 321311 - DNA, 2174 bp, Homo sapiens
cggtacccctcaacgctttatacttcagtccatgggtgtgacttggtccttaagtcaggtcactatctgcctcccaccctgggggcaggactgaagtatagaagagcatcatggctgtgcaggaggctgtggtttgaaaactgagcccagagggcactttcagctgccctcaataatgtgaatggattagtgctaggagccaaggagcaggactggattatctcatctgactgtgtgcagaatcctgttgaatgtccctgttttctttggttgggcagtcagagctctgctatggtgaacatccagactgtcaccactttctgtctgccgctcgaaagggatagtcctttccactcggtcccctttggatcttcttgacaacaggagcagtccttttattgttagaagtcagagaaagacctccagaatctcctgactttagggaatggtataggggaagatgggaagtaagagtcacatatcaaaactaccctccactttattccctgagcgagggtttatgaagtataaaggggtgggagccccgaggtgagcgggaacggtgctgctttatttgaaatgttttcttacctcattctgtgccccagtagggggtccagcctcatctgtctggcttggccctgtgttcctcctgtcccctgctccactgcctatctggtgccccaggtgctgcttgccactccagctgtcacattgaacagtttcaattcagctcttaatgctcctgcttccgaagcctgcccaatttcttttttcttggcctctgtttttttttttctttctttttcccttgtttttgtagaagactcagaggagaatctttcttatggctccctctgttgagattggaattggaagagaacttaattttttgtatttaaaatgcagtgtcatgcctataagcatttctcctatataggactgctttgctagtgtgccctcttgctgtgtcttacttcataaggagttgtatcttcccacctccatttcaatactgccggttaggacctaagtagaagagcagtaaaggctgattgacacacagggggatggagttggtccttgtccattctctcacccttgctgtgcatgtatcaatccttatcccagaaggtactatttagactgtatagactgatttagattacatactttagaggattaaggaaaccatagagtttgggccttggaactgttactgccttgtcctagagttgtcctgatcaggcttggggcctagttacagattagtcttaaagaattgcattaacttaaaaaaaatcaaaccttggcaagagctaaaataatttggagatatctttgcccttgacttgtagacgacatctaagaggatgaagaaaggagagtctaagtgagactctggcctacttcctaacaatgtcttggaagtgggatgatggtaaaggagaaaggccacagtccaatccctctgccttcagatagggaactcaaatcctgaaattactgttttctttctggccttttctcctggttagaggaggaagcggaaagtagttttgagtaatactttgttcatattaccccccttttgttttttgtttctggcccctctaccaatagggcagtagcctcctgccctggatgggtataaggtgggcttggtccaacaggtgcccagagggtacatactcctttctggggagagaatgctccctaccatatagttgacagtggttaggaactctccctttccctacctaccttccttttaatagcagaattcctatttttcccttgattatgtgtattgatcaccctgcaatcctattatgtatctgagtgtgtgtgtgtgtgtatgtgtgtgttatgggggaaggggggggttctttaaaatttctgtggtttgtggctttttcttccatacattagttcccaccatcgcatgcccagggaccactgcctggcattatcgcatgctgggatcatcgggggagggtagtgaagctcaccactgtcctttgttttggagatttttatttttgcataagtagtccatcctatacagatagctgattaactgtattcccctttcccctatggctgctggtgtaaataaactgcatctccccattggtaaacagtaataaaattttaaaaaatgaaaaaaaaat

SEQ ID NO: 321312 - DNA, 3371 bp, Homo sapiens
agcggagcggcggggctaggcccgacaggggagcggaagaggcccaggaggctgggtgaggcgctgagacggtttggcggtgagtcctgggccaggcgcagctgaaaggcccgcaacccgggaaacgtcaaaacaaacagaaggacttgggattccggagcagtcgcccctatcgctgctcctgcagttgcggacgccaccgaccccgccgccggaggactgggcactgaaaggcctctaggcctaggcgcggcccgcggagccagacgtgttgctgccgtgagtaaaacgagcgccctctccgcactcgtttacaaattaaaatggaggaaatttcgttggccaacctggatactaacaagctagaggccatcgctcaggagatttacgtagacctgatagaggattcttgtttgggattctgctttgaggtgcaccgggcagtcaagtgtggctacttctacctggagttcgcagagactggtagcgtgaaggattttggcattcagccagtggaagacaaaggagcgtgccgcctcccgctttgctcccttcccggagaacctgggaatgggcctgatcagcagctccagcgctcacctccggaattccagtagctgcaaaatgagagtctgaaagtggccaggacaataacatagactggtcctgtggcttcgaggagtaagctaagtagaaaaaagtagaaaaatcagacaaaagttttaattcccccttgaagatcctagcatttaaaaacccaaagtggataatttaggaatcctttttttaaagtgtattacctggagcaagctctgaagccctgggcaggaggagctgcacagcctgcgggccatgcagtgcctgttgatctctaaacacaccaggatgtgcgcaagatcctgtagtgcccccagtgcacaggtgagcagttgtgtgcccagcatataaaatttttggttcctcagcctttctgtctgcctgatgtcaagggcttcctggacagtttggacgttacagttcgtcaggccgtgatcagtggcctgcagtgggactgctcctttgatatctgaacctctgttatgggcttctctgagacaagtaaatgtcaggtgcaagatctggatactaacagtttcagtttgggaaatccaagaaaaagaattatcaagtttgatagggaagctctgtagccttgactccagcaagaagaaaaggtcaaaaccacgtgtttcccaaaagtccagactacaatgattcagctgacttgaggacaaggcctagcatttggctgagcagagccctcttccttgccctccaacctggtggcataggcttggcaaatggacaacttggttgtccagacaggttgaggattcggttatgatcccctggggaggtagcagggacctctgcaactatgcatgatttctcaaacttcaagattcatgtctggatgtattatgctgtggatataagtttagtagggcggtcatttcctactctgagttactggttacctagccagtccatgggtgtgacttggtccttaagtcaggtcactatctgcctcccaccctgggggcaggactgaagtatagaagagcatcatggctgtgcaggaggctgtggtttgaaaactgagcccagagggcactttcagctgccctcaataatgtgaatggattagtgctaggagccaaggagcaggactggattatctcatctgactgtgtgcagaatcctgttgaatgtccctgttttctttggttgggcagtcagagctctgctatggtgaacatccagactgtcaccactttctgtctgccgctcgaaagggatagtcctttccactcggtcccctttggatcttcttgacaacaggagcagtccttttattgttagaagtcagagaaagacctccagaatctcctgactttagggaatggtataggggaagatgggaagtaagagtcacatatcaaaactaccctccactttattccctgagcgagggtttatgaagtataaaggggtgggagccccgaggtgagcgggaacggtgctgctttatttgaaatgttttcttacctcattctgtgccccagtagggggtccagcctcatctgtctggcttggccctgtgttcctcctgtcccctgctccactgcctatctggtgccccaggtgctgcttgccactccagctgtcacattgaacagtttcaattcagctcttaatgctcctgcttccgaagcctgcccaatttcttttttcttggcctctgtttttttttttctttctttttcccttgtttttgtagaagactcagaggagaatctttcttatggctccctctgttgagattggaattggaagagaacttaattttttgtatttaaaatgcagtgtcatgcctataagcatttctcctatataggactgctttgctagtgtgccctcttgctgtgtcttacttcataaggagttgtatcttcccacctccatttcaatactgccggttaggacctaagtagaagagcagtaaaggctgattgacacacagggggatggagttggtccttgtccattctctcacccttgctgtgcatgtatcaatccttatcccagaaggtactatttagactgtatagactgatttagattacatactttagaggattaaggaaaccatagagtttgggccttggaactgttactgccttgtcctagagttgtcctgatcaggcttggggcctagttacagattagtcttaaagaattgcattaacttaaaaaaaatcaaaccttggcaagagctaaaataatttggagatatctttgcccttgacttgtagacgacatctaagaggatgaagaaaggagagtctaagtgagactctggcctacttcctaacaatgtcttggaagtgggatgatggtaaaggagaaaggccacagtccaatccctctgccttcagatagggaactcaaatcctgaaattactgttttctttctggccttttctcctggttagaggaggaagcggaaagtagttttgagtaatactttgttcatattaccccccttttgttttttgtttctggcccctctaccaatagggcagtagcctcctgccctggatgggtataaggtgggcttggtccaacaggtgcccagagggtacatactcctttctggggagagaatgctccctaccatatagttgacagtggttaggaactctccctttccctacctaccttccttttaatagcagaattcctatttttcccctatggctgctggtgtaaataaactgcatctccccattggtaaacagtaataaaattttaaaaaatgaaaaaaaaat

SEQ ID NO: 321313 - DNA, 2543 bp, Homo sapiens
agcggagcggcggggctaggcccgacaggggagcggaagaggcccaggaggctgggtgaggcgctgagacggtttggcggtgagtcctgggccaggcgcagctgaaaggcccgcaacccgggaaacgtcaaaacaaacagaaggacttgggattccggagcagtcgcccctatcgctgctcctgcagttgcggacgccaccgaccccgccgccggaggactgggcactgaaaggcctctaggcctaggcgcggcccgcggagccagacgtgttgctgccgtgagtaaaacgagcgccctctccgcactcgtttacaaattaaaatggaggaaatttcgttggccaacctggatactaacaagctagaggccatcgctcaggagatttacgtagacctgatagaggattcttgtttgggattctgctttgaggtgcaccgggcagtcaagtgtggctacttctacctggagttcgcagagactggtagcgtgaaggattttggcattcagccagtggaagacaaaggagcgtgccgcctcccgctttgctcccttcccggagaacctgggaatgggcctgatcagcagctccagcgctcacctccggaattccagtagctgcaaaatgagagtctgaaagtggccaggacaataacatagactggtcctgtggcttcgaggagtaagctaagtagaaaaaagtagaaaaatcagacaaaagttttaattcccccttgaagatcctagcatttaaaaacccaaagtggataatttaggaatcctttttttaaagtgtattacctggagcaagctctgaagccctgggcaggaggagctgcacagcctgcgggccatgcagtgcctgttgatctctaaacacaccaggatgtgcgcaagatcctgtagtgcccccagtgcacaggtgagcagttgtgtgcccagcatataaaatttttggttcctcagcctttctgtctgcctgatgtcaagggcttcctggacagtttggacgttacagttcgtcaggccgtgatcagtggcctgcagtgggactgctcctttgatatctgaacctctgttatgggcttctctgagacaagtaaatgtcaggtgcaagatctggatactaacagtttcagtttgggaaatccaagaaaaagaattatcaagtttgatagggaagctctgtagccttgactccagcaagaagaaaaggtcaaaaccacgtgtttcccaaaagtccagactacaatgattcagctgacttgaggacaaggcctagcatttggctgagcagagccctcttccttgccctccaacctggtggcataggcttggcaaatggacaacttggttgtccagacaggttgaggattcggttatgatcccctggggaggtagcagggacctctgcaactatgcatgatttctcaaacttcaagattcatgtctggatgtattatgctgtggatataagtttagtagggcggtcatttcctactctgagttactggttacctagccagtccatgggtgtgacttggtccttaagtcaggtcactatctgcctcccaccctgggggcaggactgaagtatagaagagcatcatggctgtgcaggaggctgtggtttgaaaactgagcccagagggcactttcagctgccctcaataatgtgaatggattagtgctaggagccaaggagcaggactggattatctcatctgactgtgtgcagaatcctgttgaatgtccctgttttctttggttgggcagtcagagctctgctatggtgaacatccagactgtcaccactttctgtctgccgctcgaaagggatagtcctttccactcggtcccctttggatcttcttgacaacaggagcagtccttttattgttagaagtcagagaaagacctccagaatctcctgactttagggaatggtataggggaagatgggaagtaagagtcacatatcaaaactaccctccactttattccctgagcgagggtttatgaagtataaaggggtgggagccccgaggtgagcgggaacggtgctgctttatttgaaatgttttcttacctcattctgtgccccagtagggggtccagcctcatctgtctggcttggccctgtgttcctcctgtcccctgctccactgcctatctggtgccccaggtgctgcttgccactccagctgtcacattgaacagtttcaattcagctcttaatgctcctgcttccgaagcctgcccaatttcttttttcttggcctctgtttttttttttctttctttttcccttgtttttgtagaagactcagaggagaatctttcttatggctccctctgttgagattggaattggaagagaacttaattttttgtatttaaaatgcagtgtcatgcctataagcatttctcctatacagatagctgattaactgtattcccctttcccctatggctgctggtgtaaataaactgcatctccccattggtaaacagtaataaaattttaaaaaatgaaaaaaaaat

SEQ ID NO: 321314 - DNA, 2097 bp, Homo sapiens
agcggagcggcggggctaggcccgacaggggagcggaagaggcccaggaggctgggtgaggcgctgagacggtttggcggtgagtcctgggccaggcgcagctgaaaggcccgcaacccgggaaacgtcaaaacaaacagaaggacttgggattccggagcagtcgcccctatcgctgctcctgcagttgcggacgccaccgaccccgccgccggaggactgggcactgaaaggcctctaggcctaggcgcggcccgcggagccagacgtgttgctgccgtgagtaaaacgagcgccctctccgcactcgtttacaaattaaaatggaggaaatttcgttggccaacctggatactaacaagctagaggccatcgctcaggagatttacgtagacctgatagaggattcttgtttgggattctgctttgaggtgcaccgggcagtcaagtgtggctacttctacctggagttcgcagagactggtagcgtgaaggattttggcattcagccagtggaagacaaaggagcgtgccgcctcccgctttgctcccttcccggagaacctgggaatgggcctgatcagcagctccagcgctcacctccggaattccagtagctgcaaaatgagagtctgaaagtggccaggacaataacatagactggtcctgtggcttcgaggagtaagctaagtagaaaaaagtagaaaaatcagacaaaagttttaattcccccttgaagatcctagcatttaaaaacccaaagtggataatttaggaatcctttttttaaagtgtattacctggagcaagctctgaagccctgggcaggaggagctgcacagcctgcgggccatgcagtgcctgttgatctctaaacacaccaggatgtgcgcaagatcctgtagtgcccccagtgcacaggtgagcagttgtgtgcccagcatataaaatttttggttcctcagcctttctgtctgcctgatgtcaagggcttcctggacagtttggacgttacagttcgtcaggccgtgatcagtggcctgcagtgggactgctcctttgatatctgaacctctgttatgggcttctctgagacaagtaaatgtcaggtgcaagatctggatactaacagtttcagtttgggaaatccaagaaaaagaattatcaagtttgatagggaagctctgtagccttgactccagcaagaagaaaaggtcaaaaccacgtgtttcccaaaagtccagactacaatgattcagctgacttgaggacaaggcctagcatttggctgagcagagccctcttccttgccctccaacctggtggcataggcttggcaaatggacaacttggttgtccagacaggttgaggattcggttatgatcccctggggaggtagcagggacctctgcaactatgcatgatttctcaaacttcaagattcatgtctggatgtattatgctgtggatataagtttagtagggcggtcatttcctactctgagttactggttacctagccagtccatgggtgtgacttggtccttaagtcaggtcactatctgcctcccaccctgggggcaggactgaagtatagaagagcatcatggctgtgcaggaggctgtggtttgaaaactgagcccagagggcactttcagctgccctcaataatgtgaatggattagtgctaggagccaaggagcaggactggattatctcatctgactgtgtgcagaatcctgttgaatgtccctgttttctttggttgggcagtcagagctctgctatggtgaacatccagactgtcaccactttctgtctgccgctcgaaagggatagtcctttccactcggtcccctttggatcttcttgacaacaggagcagtccttttattgttagaagtcagagaaagacctccagaatctcctgactttagggaatggtataggggaagatgggaagtaagagtcacatatcaaaactaccctccactttattccctgagcgagggtttatgaagtataaaggggtgggagccccgaggtgagcggtaatatctatgctgctgggtaccgagctgattgtatcatgtaa

SEQ ID NO: 321315 - DNA, 3671 bp, Homo sapiens
agcggagcggcggggctaggcccgacaggggagcggaagaggcccaggaggctgggtgaggcgctgagacggtttggcggtgagtcctgggccaggcgcagctgaaaggcccgcaacccgggaaacgtcaaaacaaacagaaggacttgggattccggagcagtcgcccctatcgctgctcctgcagttgcggacgccaccgaccccgccgccggaggactgggcactgaaaggcctctaggcctaggcgcggcccgcggagccagacgtgttgctgccgtgagtaaaacgagcgccctctccgcactcgtttacaaattaaaatggaggaaatttcgttggccaacctggatactaacaagctagaggccatcgctcaggagatttacgtagacctgatagaggattcttgtttgggattctgctttgaggtgcaccgggcagtcaagtgtggctacttctacctggagttcgcagagactggtagcgtgaaggattttggcattcagccagtggaagacaaaggagcgtgccgcctcccgctttgctcccttcccggagaacctgggaatgggcctgatcagcagctccagcgctcacctccggaattccagtagctgcaaaatgagagtctgaaagtggccaggacaataacatagactggtcctgtggcttcgaggagtaagctaagtagaaaaaagtagaaaaatcagacaaaagttttaattcccccttgaagatcctagcatttaaaaacccaaagtggataatttaggaatcctttttttaaagtgtattacctggagcaagctctgaagccctgggcaggaggagctgcacagcctgcgggccatgcagtgcctgttgatctctaaacacaccaggatgtgcgcaagatcctgtagtgcccccagtgcacaggtgagcagttgtgtgcccagcatataaaatttttggttcctcagcctttctgtctgcctgatgtcaagggcttcctggacagtttggacgttacagttcgtcaggccgtgatcagtggcctgcagtgggactgctcctttgatatctgaacctctgttatgggcttctctgagacaagtaaatgtcaggtgcaagatctggatactaacagtttcagtttgggaaatccaagaaaaagaattatcaagtttgatagggaagctctgtagccttgactccagcaagaagaaaaggtcaaaaccacgtgtttcccaaaagtccagactacaatgattcagctgacttgaggacaaggcctagcatttggctgagcagagccctcttccttgccctccaacctggtggcataggcttggcaaatggacaacttggttgtccagacaggttgaggattcggttatgatcccctggggaggtagcagggacctctgcaactatgcatgatttctcaaacttcaagattcatgtctggatgtattatgctgtggatataagtttagtagggcggtcatttcctactctgagttactggttacctagccagtccatgggtgtgacttggtccttaagtcaggtcactatctgcctcccaccctgggggcaggactgaagtatagaagagcatcatggctgtgcaggaggctgtggtttgaaaactgagcccagagggcactttcagctgccctcaataatgtgaatggattagtgctaggagccaaggagcaggactggattatctcatctgactgtgtgcagaatcctgttgaatgtccctgttttctttggttgggcagtcagagctctgctatggtgaacatccagactgtcaccactttctgtctgccgctcgaaagggatagtcctttccactcggtcccctttggatcttcttgacaacaggagcagtccttttattgttagaagtcagagaaagacctccagaatctcctgactttagggaatggtataggggaagatgggaagtaagagtcacatatcaaaactaccctccactttattccctgagcgagggtttatgaagtataaaggggtgggagccccgaggtgagcgggaacggtgctgctttatttgaaatgttttcttacctcattctgtgccccagtagggggtccagcctcatctgtctggcttggccctgtgttcctcctgtcccctgctccactgcctatctggtgccccaggtgctgcttgccactccagctgtcacattgaacagtttcaattcagctcttaatgctcctgcttccgaagcctgcccaatttcttttttcttggcctctgtttttttttttctttctttttcccttgtttttgtagaagactcagaggagaatctttcttatggctccctctgttgagattggaattggaagagaacttaattttttgtatttaaaatgcagtgtcatgcctataagcatttctcctatataggactgctttgctagtgtgccctcttgctgtgtcttacttcataaggagttgtatcttcccacctccatttcaatactgccggttaggacctaagtagaagagcagtaaaggctgattgacacacagggggatggagttggtccttgtccattctctcacccttgctgtgcatgtatcaatccttatcccagaaggtactatttagactgtatagactgatttagattacatactttagaggattaaggaaaccatagagtttgggccttggaactgttactgccttgtcctagagttgtcctgatcaggcttggggcctagttacagattagtcttaaagaattgcattaacttaaaaaaaatcaaaccttggcaagagctaaaataatttggagatatctttgcccttgacttgtagacgacatctaagaggatgaagaaaggagagtctaagtgagactctggcctacttcctaacaatgtcttggaagtgggatgatggtaaaggagaaaggccacagtccaatccctctgccttcagatagggaactcaaatcctgaaattactgttttctttctggccttttctcctggttagaggaggaagcggaaagtagttttgagtaatactttgttcatattaccccccttttgttttttgtttctggcccctctaccaatagggcagtagcctcctgccctggatgggtataaggtgggcttggtccaacaggtgcccagagggtacatactcctttctggggagagaatgctccctaccatatagttgacagtggttaggaactctccctttccctacctaccttccttttaatagcagaattcctatttttcccttgattatgtgtattgatcaccctgcaatcctattatgtatctgagtgtgtgtgtgtgtgtatgtgtgtgttatgggggaaggggggggttctttaaaatttctgtggtttgtggctttttcttccatacattagttcccaccatcgcatgcccagggaccactgcctggcattatcgcatgctgggatcatcgggggagggtagtgaagctcaccactgtcctttgttttggagatttttatttttgcataagtagtccatcctatacagatagctgattaactgtattcccctttcccctatggctgctggtgtaaataaactgcatctccccattggtaaacagtaataaaattttaaaaaatgaaaaaaaaat

SEQ ID NO: 321316 - DNA, 547 bp, Homo sapiens
ctaggccttaaagtaagacagtgcccaacacatggcagttgcttgacacatttttattaaacctgtgctttggtccttttcccccaattcttgaagcttcccttctttcctaggctccctcgacattgcatggatcaggaagtactgtaaaagagcatactcttacttttgatgtgttgacctgagagtcctccccatctgtcttgcctactgacagcacccctgcccacacccaaaataaaacaacatcatcaaaaataagagtctgtcttgggatacataaggcttgtatcaagagcaaggatatgctcagggtatgttgagaaattactgctaaaattgaataaggatgatctttttaaattttctgggagaaaacagtcaagttctccccactttaagtttttcctcttaaaattttcataaggccaggtgcagtgactcatgcctataatcccaacactttgggaggccgaggcagaaggatcacttgaagccaggagttcaagacaagcctggtcaacgtagcaagaccccatctctatta

SEQ ID NO: 321317 - DNA, 540 bp, Homo sapiens
ccgcgtctgaggggagggatgtgggggaagcgacggcccccggtttgtttgggctgtgggcggtgcgcagcggagagcccgggaaaagcgggaaatggcggcgccgagcgcggggtcttggtccaccttccagcacaaggagctgatggccgctgacaggggacgcaggtaagtagggaacggtcttagggctccttaggggagcccagggaaggggagcgtggcccccaggcgtgcggccctgcagccccctcccctcggagccccggaaagcagccgtgtccgcgcttcctgccaagggtgggacgcccgcccgagccgctccgagcctgactccgcgcaagggcccgcgggcggacctcttggccttgtctctcgtgggaaaagactgccccagcctccctttgttcaacccacgagggttctaaaggggaggtctttgcagtcctgcccgctcttgggttctcttgaagattcttcatcctttcctctggctcccttatgagggaaactataaaaagaccatactctgtctcctta

SEQ ID NO: 321318 - DNA, 409 bp, Homo sapiens
gcccacgcgctcagacatgatatgcggctatgcctgcctcaaagggactgccgccatgcggaacaccaaacgaggttcctggtacatcgaggctcttgctcaagtgttttctgagcgggcttgtgatatgcacgtggccgacatgctggttaaggtgaacgcacttattgctcagggtatgttgagaaattactgctaaaattgaataaggatgatctttttaaattttctgggagaaaacagtcaagttctccccactttaagtttttcctcttaaaattttcataaggccaggtgcagtgactcatgcctataatcccaacactttgggaggccgaggcagaaggatcacttgaagccaggagttcaagacaagcctggtcaacgtagcaagaccccatctctatta

SEQ ID NO: 321319 - DNA, 4089 bp, Homo sapiens
ccgcgtctgaggggagggatgtgggggaagcgacggcccccggtttgtttgggctgtgggcggtgcgcagcggagagcccgggaaaagcgggaaatggcggcgccgagcgcggggtcttggtccaccttccagcacaaggagctgatggccgctgacaggggacgcaggatattgggagtgtgtggcatgcatcctcatcatcaggaaactctaaaaaagaaccgagtggtgctagccaaacagctgttgttgagcgaattgttagaacatcttctggagaaggacatcatcaccttggaaatgagggagctcatccaggccaaagtgggcagtttcagccagaatgtggaactcctcaacttgctgcctaagaggggtccccaagcttttgatgccttctgtgaagcactgagggagaccaagcaaggccacctggaggatatgttgctcaccaccctttctgggcttcagcatgtactcccaccgttgagctgtgactacgacttgagtctcccttttccggtgtgtgagtcctgtcccctttacaagaagctccgcctgtcgacagatactgtggaacactccctagacaataaagatggtcctgtctgccttcaggtgaagccttgcactcctgaattttatcaaacacacttccagctggcatataggttgcagtctcggcctcgtggcctagcactggtgttgagcaatgtgcacttcactggagagaaagaactggaatttcgctctggaggggatgtggaccacagtactctagtcaccctcttcaagcttttgggctatgacgtccatgttctatgtgaccagactgcacaggaaatgcaagagaaactgcagaattttgcacagttacctgcacaccgagtcacggactcctgcatcgtggcactcctctcgcatggtgtggagggcgccatctatggtgtggatgggaaactgctccagctccaagaggtttttcagctctttgacaacgccaactgcccaagcctacagaacaaaccaaaaatgttcttcatccaggcctgccgtggagatgagactgatcgtggggttgaccaacaagatggaaagaaccacgcaggatcccctgggtgcgaggagagtgatgccggtaaagaaaagttgccgaagatgagactgcccacgcgctcagacatgatatgcggctatgcctgcctcaaagggactgccgccatgcggaacaccaaacgaggttcctggtacatcgaggctcttgctcaagtgttttctgagcgggcttgtgatatgcacgtggccgacatgctggttaaggtgaacgcacttatcaaggatcgggaaggttatgctcctggcacagaattccaccggtgcaaggagatgtctgaatactgcagcactctgtgccgccacctctacctgttcccaggacaccctcccacatgatgtcacctccccatcatccacgccaagtggaagccactggaccacaggaggtgtgatagagcctttgatcttcaggatgcacggtttctgttctgccccctcagggatgtgggaatctcccagacttgtttcctgtgcccatcatctctgcctttgagtgtgggactccaggccagctccttttctgtgaagccctttgcctgtagagccagccttggttggacctattgccaggaatgtttcagctgcagttgaagagcctgacaagtgaagttgtaaacacagtgtggttatggggagagggcatataaattccccatatttgtgttcagttccagcttttgtagatggcactttagtgattgcttttattacattagttaagatgtctgagagaccatctcctatcttttatttcattcatatcctccgccctttttgtcctagagtgagagtttggaaggtgtccaaatttaatgtagacattatcttttggctctgaagaagcaaacatgactagagacgcaccttgctgcagtgtccagaagcggcctgtgcgttcccttcagtactgcagcgccacccagtggaaggacactcttggctcgtttgggctcaaggcaccgcagcctgtcagccaacattgccttgcatttgtaccttattgatctttgcccatggaagtctcaaagatctttcgttggttgtttctctgagctttgttactgaaatgagcctcgtggggagcatcagagaaggccaggaagaatggtgtgtttccctagactctgtaaccacctctctgtctttttccttcctgagaaacgtccatctctctcccttactattcccactttcattcaatcaacctgcacttcatatctagatttctagaaaagcttcctagcttatctccctgcttcatatctctcccttctttaccttcatttcatcctgttggctgctgccaccaaatctgtctagaatcctgctttacaggatcatgtaaatgctcaaagatgtaatgtagttctttgttcctgctttctctttcagtattaaactctcctttgatattatgtggcttttatttcagtgccatacatgttattgttttcaacctagaaacctttatccctgcttatctgaaacttcccaacttccctgatctttaagacttttttttttttttttttttttttgagacagagtctcgctctgtcgcccaggctggagggcagtggcacgatctcagctcactgcaagctccaactcccgggttcacgccattctcctgcctcagccttccaagtagctgggactacaggtgcccgccaccgtgcccggctaatttttttgtatttttagtagagacagggtttcaccatgttagccgggatggtcttgatctcctgacctcatgatccacccacctcagcctcccaaagtgttgggattacaggcgtgagccactgcgcccgggcaagacctttttttaaaaaaaaaaaaaaaaaaacttccattctttcttcctccagtctgttctcacataacagagtagttttggtttttaattttttttggttgtttgctgttttttgttttttaaggtgagttctcactatgtttctcagactggtctcgaactcctggcctcaagccatcttcccgcctcagcctctcaaatagctgggcttacaggcatgagccaccacacctggccaggatttggttgtttaaatataaatctgatcacccccctgcttagaacccttctgctttctattacccctcatttaaaatgtaaactcttcaccttggtttatgagaactggttcttgccttccccttgaacctcattaaatggtgatttcttgctaagctccagcccgagtggtctcctctcagcttctaattttgtgctctttcctgcccttttcctgggccttctcagctctccacccccaccactcttgactcaggtggtgtccttcttcctcaagtcttgacaattcccgggcccttcagtccctgagcagtctacttctgtgtctgtcaccacatcttgtcttttcccctcattgcatttattgcagtttatatatatgctacttttacttgttcatttctgtctcccctaccaggctgtaaatgagggcagaaaccttgtttgttttattcaccatcatgtaccaagtgcttggcacatagtgggccttcattaaatgtttgttgaataaaagagggaagaaggcaagccaaccttagctacaatcctaccttttgataaaatgttccttttgacaatatacacggattattatttgtactttgtttttccatgtgttttgcttttatccactggcatttttagctccttgaagacatatcatgtgtgagataacttccttcacatctcccatggtccctagcaaaatgctaggcctgtagtagtcaaggtgctcaataaatatttgtttgggtggtttgtgagccttgctgccaagtcctgcctttgggtcgacatagtatggaagtatttgagagagagaacctttccactcccactgccaggattttgtattgccatcgggtgccaaataaatgctcatatttattaaaaaaaaaagctcaat

SEQ ID NO: 321320 - DNA, 3871 bp, Homo sapiens
ccgcgtctgaggggagggatgtgggggaagcgacggcccccggtttgtttgggctgtgggcggtgcgcagcggagagcccgggaaaagcgggaaatggcggcgccgagcgcggggtcttggtccaccttccagcacaaggagctgatggccgctgacaggggacgcaggatattgggagtgtgtggcatgcatcctcatcatcaggaaactctaaaaaagaaccgagtggtgctagccaaacagctgttgttgagcgaattgttagaacatcttctggagaaggacatcatcaccttggaaatgagggagctcatccaggccaaagtgggcagtttcagccagaatgtggaactcctcaacttgctgcctaagaggggtccccaagcttttgatgccttctgtgaagccttgcactcctgaattttatcaaacacacttccagctggcatataggttgcagtctcggcctcgtggcctagcactggtgttgagcaatgtgcacttcactggagagaaagaactggaatttcgctctggaggggatgtggaccacagtactctagtcaccctcttcaagcttttgggctatgacgtccatgttctatgtgaccagactgcacaggaaatgcaagagaaactgcagaattttgcacagttacctgcacaccgagtcacggactcctgcatcgtggcactcctctcgcatggtgtggagggcgccatctatggtgtggatgggaaactgctccagctccaagaggtttttcagctctttgacaacgccaactgcccaagcctacagaacaaaccaaaaatgttcttcatccaggcctgccgtggagatgagactgatcgtggggttgaccaacaagatggaaagaaccacgcaggatcccctgggtgcgaggagagtgatgccggtaaagaaaagttgccgaagatgagactgcccacgcgctcagacatgatatgcggctatgcctgcctcaaagggactgccgccatgcggaacaccaaacgaggttcctggtacatcgaggctcttgctcaagtgttttctgagcgggcttgtgatatgcacgtggccgacatgctggttaaggtgaacgcacttatcaaggatcgggaaggttatgctcctggcacagaattccaccggtgcaaggagatgtctgaatactgcagcactctgtgccgccacctctacctgttcccaggacaccctcccacatgatgtcacctccccatcatccacgccaagtggaagccactggaccacaggaggtgtgatagagcctttgatcttcaggatgcacggtttctgttctgccccctcagggatgtgggaatctcccagacttgtttcctgtgcccatcatctctgcctttgagtgtgggactccaggccagctccttttctgtgaagccctttgcctgtagagccagccttggttggacctattgccaggaatgtttcagctgcagttgaagagcctgacaagtgaagttgtaaacacagtgtggttatggggagagggcatataaattccccatatttgtgttcagttccagcttttgtagatggcactttagtgattgcttttattacattagttaagatgtctgagagaccatctcctatcttttatttcattcatatcctccgccctttttgtcctagagtgagagtttggaaggtgtccaaatttaatgtagacattatcttttggctctgaagaagcaaacatgactagagacgcaccttgctgcagtgtccagaagcggcctgtgcgttcccttcagtactgcagcgccacccagtggaaggacactcttggctcgtttgggctcaaggcaccgcagcctgtcagccaacattgccttgcatttgtaccttattgatctttgcccatggaagtctcaaagatctttcgttggttgtttctctgagctttgttactgaaatgagcctcgtggggagcatcagagaaggccaggaagaatggtgtgtttccctagactctgtaaccacctctctgtctttttccttcctgagaaacgtccatctctctcccttactattcccactttcattcaatcaacctgcacttcatatctagatttctagaaaagcttcctagcttatctccctgcttcatatctctcccttctttaccttcatttcatcctgttggctgctgccaccaaatctgtctagaatcctgctttacaggatcatgtaaatgctcaaagatgtaatgtagttctttgttcctgctttctctttcagtattaaactctcctttgatattatgtggcttttatttcagtgccatacatgttattgttttcaacctagaaacctttatccctgcttatctgaaacttcccaacttccctgatctttaagacttttttttttttttttttttttttgagacagagtctcgctctgtcgcccaggctggagggcagtggcacgatctcagctcactgcaagctccaactcccgggttcacgccattctcctgcctcagccttccaagtagctgggactacaggtgcccgccaccgtgcccggctaatttttttgtatttttagtagagacagggtttcaccatgttagccgggatggtcttgatctcctgacctcatgatccacccacctcagcctcccaaagtgttgggattacaggcgtgagccactgcgcccgggcaagacctttttttaaaaaaaaaaaaaaaaaaacttccattctttcttcctccagtctgttctcacataacagagtagttttggtttttaattttttttggttgtttgctgttttttgttttttaaggtgagttctcactatgtttctcagactggtctcgaactcctggcctcaagccatcttcccgcctcagcctctcaaatagctgggcttacaggcatgagccaccacacctggccaggatttggttgtttaaatataaatctgatcacccccctgcttagaacccttctgctttctattacccctcatttaaaatgtaaactcttcaccttggtttatgagaactggttcttgccttccccttgaacctcattaaatggtgatttcttgctaagctccagcccgagtggtctcctctcagcttctaattttgtgctctttcctgcccttttcctgggccttctcagctctccacccccaccactcttgactcaggtggtgtccttcttcctcaagtcttgacaattcccgggcccttcagtccctgagcagtctacttctgtgtctgtcaccacatcttgtcttttcccctcattgcatttattgcagtttatatatatgctacttttacttgttcatttctgtctcccctaccaggctgtaaatgagggcagaaaccttgtttgttttattcaccatcatgtaccaagtgcttggcacatagtgggccttcattaaatgtttgttgaataaaagagggaagaaggcaagccaaccttagctacaatcctaccttttgataaaatgttccttttgacaatatacacggattattatttgtactttgtttttccatgtgttttgcttttatccactggcatttttagctccttgaagacatatcatgtgtgagataacttccttcacatctcccatggtccctagcaaaatgctaggcctgtagtagtcaaggtgctcaataaatatttgtttgggtggtttgtgagccttgctgccaagtcctgcctttgggtcgacatagtatggaagtatttgagagagagaacctttccactcccactgccaggattttgtattgccatcgggtgccaaataaatgctcatatttattaaaaaaaaaagctcaat

SEQ ID NO: 321321 - DNA, 3772 bp, Homo sapiens
agagggagggaacgatttaaggagcgaatactactggtaaactaatggaagaaatctgctgcaccactggatattgggagtgtgtggcatgcatcctcatcatcaggaaactctaaaaaagaaccgagtggtgctagccaaacagctgttgttgagcgaattgttagaacatcttctggagaaggacatcatcaccttggaaatgagggagctcatccaggccaaagtgggcagtttcagccagaatgtggaactcctcaacttgctgcctaagaggggtccccaagcttttgatgccttctgtgaagccttgcactcctgaattttatcaaacacacttccagctggcatataggttgcagtctcggcctcgtggcctagcactggtgttgagcaatgtgcacttcactggagagaaagaactggaatttcgctctggaggggatgtggaccacagtactctagtcaccctcttcaagcttttgggctatgacgtccatgttctatgtgaccagactgcacaggaaatgcaagagaaactgcagaattttgcacagttacctgcacaccgagtcacggactcctgcatcgtggcactcctctcgcatggtgtggagggcgccatctatggtgtggatgggaaactgctccagctccaagaggtttttcagctctttgacaacgccaactgcccaagcctacagaacaaaccaaaaatgttcttcatccaggcctgccgtggagatgagactgatcgtggggttgaccaacaagatggaaagaaccacgcaggatcccctgggtgcgaggagagtgatgccggtaaagaaaagttgccgaagatgagactgcccacgcgctcagacatgatatgcggctatgcctgcctcaaagggactgccgccatgcggaacaccaaacgaggttcctggtacatcgaggctcttgctcaagtgttttctgagcgggcttgtgatatgcacgtggccgacatgctggttaaggtgaacgcacttatcaaggatcgggaaggttatgctcctggcacagaattccaccggtgcaaggagatgtctgaatactgcagcactctgtgccgccacctctacctgttcccaggacaccctcccacatgatgtcacctccccatcatccacgccaagtggaagccactggaccacaggaggtgtgatagagcctttgatcttcaggatgcacggtttctgttctgccccctcagggatgtgggaatctcccagacttgtttcctgtgcccatcatctctgcctttgagtgtgggactccaggccagctccttttctgtgaagccctttgcctgtagagccagccttggttggacctattgccaggaatgtttcagctgcagttgaagagcctgacaagtgaagttgtaaacacagtgtggttatggggagagggcatataaattccccatatttgtgttcagttccagcttttgtagatggcactttagtgattgcttttattacattagttaagatgtctgagagaccatctcctatcttttatttcattcatatcctccgccctttttgtcctagagtgagagtttggaaggtgtccaaatttaatgtagacattatcttttggctctgaagaagcaaacatgactagagacgcaccttgctgcagtgtccagaagcggcctgtgcgttcccttcagtactgcagcgccacccagtggaaggacactcttggctcgtttgggctcaaggcaccgcagcctgtcagccaacattgccttgcatttgtaccttattgatctttgcccatggaagtctcaaagatctttcgttggttgtttctctgagctttgttactgaaatgagcctcgtggggagcatcagagaaggccaggaagaatggtgtgtttccctagactctgtaaccacctctctgtctttttccttcctgagaaacgtccatctctctcccttactattcccactttcattcaatcaacctgcacttcatatctagatttctagaaaagcttcctagcttatctccctgcttcatatctctcccttctttaccttcatttcatcctgttggctgctgccaccaaatctgtctagaatcctgctttacaggatcatgtaaatgctcaaagatgtaatgtagttctttgttcctgctttctctttcagtattaaactctcctttgatattatgtggcttttatttcagtgccatacatgttattgttttcaacctagaaacctttatccctgcttatctgaaacttcccaacttccctgatctttaagacttttttttttttttttttttttttgagacagagtctcgctctgtcgcccaggctggagggcagtggcacgatctcagctcactgcaagctccaactcccgggttcacgccattctcctgcctcagccttccaagtagctgggactacaggtgcccgccaccgtgcccggctaatttttttgtatttttagtagagacagggtttcaccatgttagccgggatggtcttgatctcctgacctcatgatccacccacctcagcctcccaaagtgttgggattacaggcgtgagccactgcgcccgggcaagacctttttttaaaaaaaaaaaaaaaaaaacttccattctttcttcctccagtctgttctcacataacagagtagttttggtttttaattttttttggttgtttgctgttttttgttttttaaggtgagttctcactatgtttctcagactggtctcgaactcctggcctcaagccatcttcccgcctcagcctctcaaatagctgggcttacaggcatgagccaccacacctggccaggatttggttgtttaaatataaatctgatcacccccctgcttagaacccttctgctttctattacccctcatttaaaatgtaaactcttcaccttggtttatgagaactggttcttgccttccccttgaacctcattaaatggtgatttcttgctaagctccagcccgagtggtctcctctcagcttctaattttgtgctctttcctgcccttttcctgggccttctcagctctccacccccaccactcttgactcaggtggtgtccttcttcctcaagtcttgacaattcccgggcccttcagtccctgagcagtctacttctgtgtctgtcaccacatcttgtcttttcccctcattgcatttattgcagtttatatatatgctacttttacttgttcatttctgtctcccctaccaggctgtaaatgagggcagaaaccttgtttgttttattcaccatcatgtaccaagtgcttggcacatagtgggccttcattaaatgtttgttgaataaaagagggaagaaggcaagccaaccttagctacaatcctaccttttgataaaatgttccttttgacaatatacacggattattatttgtactttgtttttccatgtgttttgcttttatccactggcatttttagctccttgaagacatatcatgtgtgagataacttccttcacatctcccatggtccctagcaaaatgctaggcctgtagtagtcaaggtgctcaataaatatttgtttgggtggtttgtgagccttgctgccaagtcctgcctttgggtcgacatagtatggaagtatttgagagagagaacctttccactcccactgccaggattttgtattgccatcgggtgccaaataaatgctcatatttattaaaaaaaaaagctcaat

SEQ ID NO: 321322 - DNA, 4238 bp, Homo sapiens
ccgcgtctgaggggagggatgtgggggaagcgacggcccccggtttgtttgggctgtgggcggtgcgcagcggagagcccgggaaaagcgggaaatggcggcgccgagcgcggggtcttggtccaccttccagcacaaggagctgatggccgctgacaggggacgcaggatattgggagtgtgtggcatgcatcctcatcatcaggaaactctaaaaaagaaccgagtggtgctagccaaacagctgttgttgagcgaattgttagaacatcttctggagaaggacatcatcaccttggaaatgagggagctcatccaggccaaagtgggcagtttcagccagaatgtggaactcctcaacttgctgcctaagaggggtccccaagcttttgatgccttctgtgaagcactgagggagaccaagcaaggccacctggaggatatgttgctcaccaccctttctgggcttcagcatgtactcccaccggtatgaagctttagtaatatggggtgttgggaagggttagtttgactggaaaggaatttgtaagtcagagtgagggagactagattttgttgtatttggaccggaccacttccctaaggtctgtcatcatgagttttgatttcttacagttgagctgtgactacgacttgagtctcccttttccggtgtgtgagtcctgtcccctttacaagaagctccgcctgtcgacagatactgtggaacactccctagacaataaagatggtcctgtctgccttcaggtgaagccttgcactcctgaattttatcaaacacacttccagctggcatataggttgcagtctcggcctcgtggcctagcactggtgttgagcaatgtgcacttcactggagagaaagaactggaatttcgctctggaggggatgtggaccacagtactctagtcaccctcttcaagcttttgggctatgacgtccatgttctatgtgaccagactgcacaggaaatgcaagagaaactgcagaattttgcacagttacctgcacaccgagtcacggactcctgcatcgtggcactcctctcgcatggtgtggagggcgccatctatggtgtggatgggaaactgctccagctccaagaggtttttcagctctttgacaacgccaactgcccaagcctacagaacaaaccaaaaatgttcttcatccaggcctgccgtggagatgagactgatcgtggggttgaccaacaagatggaaagaaccacgcaggatcccctgggtgcgaggagagtgatgccggtaaagaaaagttgccgaagatgagactgcccacgcgctcagacatgatatgcggctatgcctgcctcaaagggactgccgccatgcggaacaccaaacgaggttcctggtacatcgaggctcttgctcaagtgttttctgagcgggcttgtgatatgcacgtggccgacatgctggttaaggtgaacgcacttatcaaggatcgggaaggttatgctcctggcacagaattccaccggtgcaaggagatgtctgaatactgcagcactctgtgccgccacctctacctgttcccaggacaccctcccacatgatgtcacctccccatcatccacgccaagtggaagccactggaccacaggaggtgtgatagagcctttgatcttcaggatgcacggtttctgttctgccccctcagggatgtgggaatctcccagacttgtttcctgtgcccatcatctctgcctttgagtgtgggactccaggccagctccttttctgtgaagccctttgcctgtagagccagccttggttggacctattgccaggaatgtttcagctgcagttgaagagcctgacaagtgaagttgtaaacacagtgtggttatggggagagggcatataaattccccatatttgtgttcagttccagcttttgtagatggcactttagtgattgcttttattacattagttaagatgtctgagagaccatctcctatcttttatttcattcatatcctccgccctttttgtcctagagtgagagtttggaaggtgtccaaatttaatgtagacattatcttttggctctgaagaagcaaacatgactagagacgcaccttgctgcagtgtccagaagcggcctgtgcgttcccttcagtactgcagcgccacccagtggaaggacactcttggctcgtttgggctcaaggcaccgcagcctgtcagccaacattgccttgcatttgtaccttattgatctttgcccatggaagtctcaaagatctttcgttggttgtttctctgagctttgttactgaaatgagcctcgtggggagcatcagagaaggccaggaagaatggtgtgtttccctagactctgtaaccacctctctgtctttttccttcctgagaaacgtccatctctctcccttactattcccactttcattcaatcaacctgcacttcatatctagatttctagaaaagcttcctagcttatctccctgcttcatatctctcccttctttaccttcatttcatcctgttggctgctgccaccaaatctgtctagaatcctgctttacaggatcatgtaaatgctcaaagatgtaatgtagttctttgttcctgctttctctttcagtattaaactctcctttgatattatgtggcttttatttcagtgccatacatgttattgttttcaacctagaaacctttatccctgcttatctgaaacttcccaacttccctgatctttaagacttttttttttttttttttttttttgagacagagtctcgctctgtcgcccaggctggagggcagtggcacgatctcagctcactgcaagctccaactcccgggttcacgccattctcctgcctcagccttccaagtagctgggactacaggtgcccgccaccgtgcccggctaatttttttgtatttttagtagagacagggtttcaccatgttagccgggatggtcttgatctcctgacctcatgatccacccacctcagcctcccaaagtgttgggattacaggcgtgagccactgcgcccgggcaagacctttttttaaaaaaaaaaaaaaaaaaacttccattctttcttcctccagtctgttctcacataacagagtagttttggtttttaattttttttggttgtttgctgttttttgttttttaaggtgagttctcactatgtttctcagactggtctcgaactcctggcctcaagccatcttcccgcctcagcctctcaaatagctgggcttacaggcatgagccaccacacctggccaggatttggttgtttaaatataaatctgatcacccccctgcttagaacccttctgctttctattacccctcatttaaaatgtaaactcttcaccttggtttatgagaactggttcttgccttccccttgaacctcattaaatggtgatttcttgctaagctccagcccgagtggtctcctctcagcttctaattttgtgctctttcctgcccttttcctgggccttctcagctctccacccccaccactcttgactcaggtggtgtccttcttcctcaagtcttgacaattcccgggcccttcagtccctgagcagtctacttctgtgtctgtcaccacatcttgtcttttcccctcattgcatttattgcagtttatatatatgctacttttacttgttcatttctgtctcccctaccaggctgtaaatgagggcagaaaccttgtttgttttattcaccatcatgtaccaagtgcttggcacatagtgggccttcattaaatgtttgttgaataaaagagggaagaaggcaagccaaccttagctacaatcctaccttttgataaaatgttccttttgacaatatacacggattattatttgtactttgtttttccatgtgttttgcttttatccactggcatttttagctccttgaagacatatcatgtgtgagataacttccttcacatctcccatggtccctagcaaaatgctaggcctgtagtagtcaaggtgctcaataaatatttgtttgggtggtttgtgagccttgctgccaagtcctgcctttgggtcgacatagtatggaagtatttgagagagagaacctttccactcccactgccaggattttgtattgccatcgggtgccaaataaatgctcatatttattaaaaaaaaaagctcaat

SEQ ID NO: 321323 - DNA, 3334 bp, Homo sapiens
ctaggccttaaagtaagacagtgcccaacacatggcagttgcttgacacatttttattaaacctgtgctttggtccttttcccccaattcttgaagcttcccttctttcctaggctccctcgacattgcatggatcaggaagtactgtaaaagagcatactcttacttttgatgtgttgacctgagagtcctccccatctgtcttgcctactgacagcacccctgcccacacccaaaataaaacaacatcatcaaaaataagagtctgtcttgggatacataaggcttgtatcaagagcaaggataatgagactgatcgtggggttgaccaacaagatggaaagaaccacgcaggatcccctgggtgcgaggagagtgatgccggtaaagaaaagttgccgaagatgagactgcccacgcgctcagacatgatatgcggctatgcctgcctcaaagggactgccgccatgcggaacaccaaacgaggttcctggtacatcgaggctcttgctcaagtgttttctgagcgggcttgtgatatgcacgtggccgacatgctggttaaggtgaacgcacttatcaaggatcgggaaggttatgctcctggcacagaattccaccggtgcaaggagatgtctgaatactgcagcactctgtgccgccacctctacctgttcccaggacaccctcccacatgatgtcacctccccatcatccacgccaagtggaagccactggaccacaggaggtgtgatagagcctttgatcttcaggatgcacggtttctgttctgccccctcagggatgtgggaatctcccagacttgtttcctgtgcccatcatctctgcctttgagtgtgggactccaggccagctccttttctgtgaagccctttgcctgtagagccagccttggttggacctattgccaggaatgtttcagctgcagttgaagagcctgacaagtgaagttgtaaacacagtgtggttatggggagagggcatataaattccccatatttgtgttcagttccagcttttgtagatggcactttagtgattgcttttattacattagttaagatgtctgagagaccatctcctatcttttatttcattcatatcctccgccctttttgtcctagagtgagagtttggaaggtgtccaaatttaatgtagacattatcttttggctctgaagaagcaaacatgactagagacgcaccttgctgcagtgtccagaagcggcctgtgcgttcccttcagtactgcagcgccacccagtggaaggacactcttggctcgtttgggctcaaggcaccgcagcctgtcagccaacattgccttgcatttgtaccttattgatctttgcccatggaagtctcaaagatctttcgttggttgtttctctgagctttgttactgaaatgagcctcgtggggagcatcagagaaggccaggaagaatggtgtgtttccctagactctgtaaccacctctctgtctttttccttcctgagaaacgtccatctctctcccttactattcccactttcattcaatcaacctgcacttcatatctagatttctagaaaagcttcctagcttatctccctgcttcatatctctcccttctttaccttcatttcatcctgttggctgctgccaccaaatctgtctagaatcctgctttacaggatcatgtaaatgctcaaagatgtaatgtagttctttgttcctgctttctctttcagtattaaactctcctttgatattatgtggcttttatttcagtgccatacatgttattgttttcaacctagaaacctttatccctgcttatctgaaacttcccaacttccctgatctttaagacttttttttttttttttttttttttgagacagagtctcgctctgtcgcccaggctggagggcagtggcacgatctcagctcactgcaagctccaactcccgggttcacgccattctcctgcctcagccttccaagtagctgggactacaggtgcccgccaccgtgcccggctaatttttttgtatttttagtagagacagggtttcaccatgttagccgggatggtcttgatctcctgacctcatgatccacccacctcagcctcccaaagtgttgggattacaggcgtgagccactgcgcccgggcaagacctttttttaaaaaaaaaaaaaaaaaaacttccattctttcttcctccagtctgttctcacataacagagtagttttggtttttaattttttttggttgtttgctgttttttgttttttaaggtgagttctcactatgtttctcagactggtctcgaactcctggcctcaagccatcttcccgcctcagcctctcaaatagctgggcttacaggcatgagccaccacacctggccaggatttggttgtttaaatataaatctgatcacccccctgcttagaacccttctgctttctattacccctcatttaaaatgtaaactcttcaccttggtttatgagaactggttcttgccttccccttgaacctcattaaatggtgatttcttgctaagctccagcccgagtggtctcctctcagcttctaattttgtgctctttcctgcccttttcctgggccttctcagctctccacccccaccactcttgactcaggtggtgtccttcttcctcaagtcttgacaattcccgggcccttcagtccctgagcagtctacttctgtgtctgtcaccacatcttgtcttttcccctcattgcatttattgcagtttatatatatgctacttttacttgttcatttctgtctcccctaccaggctgtaaatgagggcagaaaccttgtttgttttattcaccatcatgtaccaagtgcttggcacatagtgggccttcattaaatgtttgttgaataaaagagggaagaaggcaagccaaccttagctacaatcctaccttttgataaaatgttccttttgacaatatacacggattattatttgtactttgtttttccatgtgttttgcttttatccactggcatttttagctccttgaagacatatcatgtgtgagataacttccttcacatctcccatggtccctagcaaaatgctaggcctgtagtagtcaaggtgctcaataaatatttgtttgggtggtttgtgagccttgctgccaagtcctgcctttgggtcgacatagtatggaagtatttgagagagagaacctttccactcccactgccaggattttgtattgccatcgggtgccaaataaatgctcatatttattaaaaaaaaaagctcaat

SEQ ID NO: 321324 - DNA, 4051 bp, Homo sapiens
agagggagggaacgatttaaggagcgaatactactggtaaactaatggaagaaatctgctgcaccactggatattgggagtgtgtggcatgcatcctcatcatcaggaaactctaaaaaagaaccgagtggtgctagccaaacagctgttgttgagcgaattgttagaacatcttctggagaaggacatcatcaccttggaaatgagggagctcatccaggccaaagtgggcagtttcagccagaatgtggaactcctcaacttgctgcctaagaggggtccccaagcttttgatgccttctgtgaagcactgagggagaccaagcaaggccacctggaggatatgttgctcaccaccctttctgggcttcagcatgtactcccaccgttgagctgtgactacgacttgagtctcccttttccggtgtgtgagtcctgtcccctttacaagaagctccgcctgtcgacagatactgtggaacactccctagacaataaagatggtcctgtctgccttcaggtgaagccttgcactcctgaattttatcaaacacacttccagctggcatataggttgcagtctcggcctcgtggcctagcactggtgttgagcaatgtgcacttcactggagagaaagaactggaatttcgctctggaggggatgtggaccacagtactctagtcaccctcttcaagcttttgggctatgacgtccatgttctatgtgaccagactgcacaggaaatgcaagagaaactgcagaattttgcacagttacctgcacaccgagtcacggactcctgcatcgtggcactcctctcgcatggtgtggagggcgccatctatggtgtggatgggaaactgctccagctccaagaggtttttcagctctttgacaacgccaactgcccaagcctacagaacaaaccaaaaatgttcttcatccaggcctgccgtggaggtgctattggatcccttgggcacctccttctgttcactgctgccaccgcctctcttgctctatgagactgatcgtggggttgaccaacaagatggaaagaaccacgcaggatcccctgggtgcgaggagagtgatgccggtaaagaaaagttgccgaagatgagactgcccacgcgctcagacatgatatgcggctatgcctgcctcaaagggactgccgccatgcggaacaccaaacgaggttcctggtacatcgaggctcttgctcaagtgttttctgagcgggcttgtgatatgcacgtggccgacatgctggttaaggtgaacgcacttatcaaggatcgggaaggttatgctcctggcacagaattccaccggtgcaaggagatgtctgaatactgcagcactctgtgccgccacctctacctgttcccaggacaccctcccacatgatgtcacctccccatcatccacgccaagtggaagccactggaccacaggaggtgtgatagagcctttgatcttcaggatgcacggtttctgttctgccccctcagggatgtgggaatctcccagacttgtttcctgtgcccatcatctctgcctttgagtgtgggactccaggccagctccttttctgtgaagccctttgcctgtagagccagccttggttggacctattgccaggaatgtttcagctgcagttgaagagcctgacaagtgaagttgtaaacacagtgtggttatggggagagggcatataaattccccatatttgtgttcagttccagcttttgtagatggcactttagtgattgcttttattacattagttaagatgtctgagagaccatctcctatcttttatttcattcatatcctccgccctttttgtcctagagtgagagtttggaaggtgtccaaatttaatgtagacattatcttttggctctgaagaagcaaacatgactagagacgcaccttgctgcagtgtccagaagcggcctgtgcgttcccttcagtactgcagcgccacccagtggaaggacactcttggctcgtttgggctcaaggcaccgcagcctgtcagccaacattgccttgcatttgtaccttattgatctttgcccatggaagtctcaaagatctttcgttggttgtttctctgagctttgttactgaaatgagcctcgtggggagcatcagagaaggccaggaagaatggtgtgtttccctagactctgtaaccacctctctgtctttttccttcctgagaaacgtccatctctctcccttactattcccactttcattcaatcaacctgcacttcatatctagatttctagaaaagcttcctagcttatctccctgcttcatatctctcccttctttaccttcatttcatcctgttggctgctgccaccaaatctgtctagaatcctgctttacaggatcatgtaaatgctcaaagatgtaatgtagttctttgttcctgctttctctttcagtattaaactctcctttgatattatgtggcttttatttcagtgccatacatgttattgttttcaacctagaaacctttatccctgcttatctgaaacttcccaacttccctgatctttaagacttttttttttttttttttttttttgagacagagtctcgctctgtcgcccaggctggagggcagtggcacgatctcagctcactgcaagctccaactcccgggttcacgccattctcctgcctcagccttccaagtagctgggactacaggtgcccgccaccgtgcccggctaatttttttgtatttttagtagagacagggtttcaccatgttagccgggatggtcttgatctcctgacctcatgatccacccacctcagcctcccaaagtgttgggattacaggcgtgagccactgcgcccgggcaagacctttttttaaaaaaaaaaaaaaaaaaacttccattctttcttcctccagtctgttctcacataacagagtagttttggtttttaattttttttggttgtttgctgttttttgttttttaaggtgagttctcactatgtttctcagactggtctcgaactcctggcctcaagccatcttcccgcctcagcctctcaaatagctgggcttacaggcatgagccaccacacctggccaggatttggttgtttaaatataaatctgatcacccccctgcttagaacccttctgctttctattacccctcatttaaaatgtaaactcttcaccttggtttatgagaactggttcttgccttccccttgaacctcattaaatggtgatttcttgctaagctccagcccgagtggtctcctctcagcttctaattttgtgctctttcctgcccttttcctgggccttctcagctctccacccccaccactcttgactcaggtggtgtccttcttcctcaagtcttgacaattcccgggcccttcagtccctgagcagtctacttctgtgtctgtcaccacatcttgtcttttcccctcattgcatttattgcagtttatatatatgctacttttacttgttcatttctgtctcccctaccaggctgtaaatgagggcagaaaccttgtttgttttattcaccatcatgtaccaagtgcttggcacatagtgggccttcattaaatgtttgttgaataaaagagggaagaaggcaagccaaccttagctacaatcctaccttttgataaaatgttccttttgacaatatacacggattattatttgtactttgtttttccatgtgttttgcttttatccactggcatttttagctccttgaagacatatcatgtgtgagataacttccttcacatctcccatggtccctagcaaaatgctaggcctgtagtagtcaaggtgctcaataaatatttgtttgggtggtttgtgagccttgctgccaagtcctgcctttgggtcgacatagtatggaagtatttgagagagagaacctttccactcccactgccaggattttgtattgccatcgggtgccaaataaatgctcatatttattaaaaaaaaaagctcaat

SEQ ID NO: 321325 - DNA, 3310 bp, Homo sapiens
ccgcgtctgaggggagggatgtgggggaagcgacggcccccggtttgtttgggctgtgggcggtgcgcagcggagagcccgggaaaagcgggaaatggcggcgccgagcgcggggtcttggtccaccttccagcacaaggagctgatggccgctgacaggggacgcaggatattgggagtgtgtggcatgcatcctcatcatcaggaaactctaaaaaagaaccgagtggtgctagccaaacagctgttgttgagcgaattgttagaacatcttctggagaaggacatcatcaccttggaaatgagggagctcatccaggccaaagtgggcagtttcagccagaatgtggaactcctcaacttgctgcctaagaggggtccccaagcttttgatgccttctgtgaagcactgagggagaccaagcaaggccacctggaggatatgttgctcaccaccctttctgggcttcagcatgtactcccaccgttgagctgtgactacgacttgagtctcccttttccggtgtgtgagtcctgtcccctttacaagaagctccgcctgtcgacagatactgtggaacactccctagacaataaagatggtcctgtctgccttcaggtgaagccttgcactcctgaattttatcaaacacacttccagctggcatataggttgcagtctcggcctcgtggcctagcactggtgttgagcaatgtgcacttcactggagagaaagaactggaatttcgctctggaggggatgtggaccacagtactctagtcaccctcttcaagcttttgggctatgacgtccatgttctatgtgaccagactgcacaggaaatgcaagagaaactgcagaattttgcacagttacctgcacaccgagtcacggactcctgcatcgtggcactcctctcgcatggtgtggagggcgccatctatggtgtggatgggaaactgctccagctccaagaggtttttcagctctttgacaacgccaactgcccaagcctacagaacaaaccaaaaatgttcttcatccaggcctgccgtggagatgagactgatcgtggggttgaccaacaagatggaaagaaccacgcaggatcccctgggtgcgaggagagtgatgccggtaaagaaaagttgccgaagatgagactgcccacgcgctcagacatgatatgcggctatgcctgcctcaaagggactgccgccatgcggaacaccaaacgaggttcctggtacatcgaggctcttgctcaagtgttttctgagcgggcttgtgatatgcacgtggccgacatgctggttaaggtgaacgcacttatcaaggatcgggaaggttatgctcctggcacagaattccaccggtgcaaggagatgtctgaatactgcagcactctgtgccgccacctctacctgttcccaggacaccctcccacatgatgtcacctccccatcatccacgccaagtggaagccactggaccacaggaggtgtgatagagcctttgatcttcaggatgcacggtttctgttctgccccctcagggatgtgggaatctcccagacttgtttcctgtgcccatcatctctgcctttgagtgtgggactccaggccagctccttttctgtgaagccctttgcctgtagagccagccttggttggacctattgccaggaatgtttcagctgcagttgaagagcctgacaagtgaagttgtaaacacagtgtggttatggggagagggcatataaattccccatatttgtgttcagttccagcttttgtagatggcactttagtgattgcttttattacattagttaagatgtctgagagaccatctcctatcttttatttcattcatatcctccgccctttttgtcctagagtgagagtttggaaggtgtccaaatttaatgtagacattatcttttggctctgaagaagcaaacatgactagagacgcaccttgctgcagtgtccagaagcggcctgtgcgttcccttcagtactgcagcgccacccagtggaaggacactcttggctcgtttgggctcaaggcaccgcagcctgtcagccaacattgccttgcatttgtaccttattgatctttgcccatggaagtctcaaagatctttcgttggttgtttctctgagctttgttactgaaatgagcctcgtggggagcatcagagaaggccaggaagaatggtgtgtttccctagactctgtaaccacctctctgtctttttccttcctgagaaacgtccatctctctcccttactattcccactttcattcaatcaacctgcacttcatatctagatttctagaaaagcttcctagcttatctccctgcttcatatctctcccttctttaccttcatttcatcctgttggctgctgccaccaaatctgtctagaatcctgctttacaggatcatgtaaatgctcaaagatgtaatgtagttctttgttcctgctttctctttcagtattaaactctcctttgatattatgtggcttttatttcagtgccatacatgttattgttttcaacctagaaacctttatccctgcttatctgaaacttcccaacttccctgatctttaagacttttttttttttttttttttttttgagacagagtctcgctctgtcgcccaggctggagggcagtggcacgatctcagctcactgcaagctccaactcccgggttcacgccattctcctgcctcagccttccaagtagctgggactacaggtgcccgccaccgtgcccggctaatttttttgtatttttagtagagacagggtttcaccatgttagccgggatggtcttgatctcctgacctcatgatccacccacctcagcctcccaaagtgttgggattacaggcgtgagccactgcgcccgggcaagacctttttttaaaaaaaaaaaaaaaaaaacttccattctttcttcctccagtctgttctcacataacagagtagttttggtttttaattttttttggttgtttgctgttttttgttttttaaggtgagttctcactatgtttctcagactggtctcgaactcctggcctcaagccatcttcccgcctcagcctctcaaatagctgggcttacaggcatgagccaccacacctggccaggatttggttgtttaaatataaatctgatcacccccctgcttagaacccttctgctttctattacccctcatttaaaatgtaaactcttcaccttggtttatgagccactgcgcccgggcaagaccttttttt

SEQ ID NO: 321326 - DNA, 1151 bp, Homo sapiens
ccgcgtctgaggggagggatgtgggggaagcgacggcccccggtttgtttgggctgtgggcggtgcgcagcggagagcccgggaaaagcgggaaatggcggcgccgagcgcggggtcttggtccaccttccagcacaaggagctgatggccgctgacaggggacgcaggatattgggagtgtgtggcatgcatcctcatcatcaggaaactctaaaaaagaaccgagtggtgctagccaaacagctgttgttgagcgaattgttagaacatcttctggagaaggacatcatcaccttggaaatgagggagctcatccaggccaaagtgggcagtttcagccagaatgtggaactcctcaacttgctgcctaagaggggtccccaagcttttgatgccttctgtgaagcactgagggagaccaagcaaggccacctggaggatatgttgctcaccaccctttctgggcttcagcatgtactcccaccgttgagctgtgactacgacttgagtctcccttttccggtgtgtgagtcctgtcccctttacaagaagctccgcctgtcgacagatactgtggaacactccctagacaataaagatggtcctgtctgccttcaggtgaagccttgcactcctgaattttatcaaacacacttccagctggcatataggttgcagtctcggcctcgtggcctagcactggtgttgagcaatgtgcacttcactggagagaaagaactggaatttcgctctggaggggatgtggaccacagtactctagtcaccctcttcaagcttttgggctatgacgtccatgttctatgtgaccagactgcacaggaaatgcaagagaaactgcagaattttgcacagttacctgcacaccgagtcacggactcctgcatcgtggcactcctctcgcatggtgtggagggcgccatctatggtgtggatgggaaactgctccagctccaagaggtttttcagctctttgacaacttttctttaccggcatcactctcctcgcacccaggggatcctgcgtggttctttccatcttgttggtcaaccccacgatcagtctcatctccacggcaggcctggatgaagaacattttgggttggttctgtaggcttgggcagttggggg

SEQ ID NO: 321327 - DNA, 1491 bp, Homo sapiens
  misc_feature (1393)..(1393): n is a, c, g, or t
ctgaatctaaatcagtcttaaaacacgcctccggagcagtgtgaagaagaggcgagaacgacccccggaccgaccaaagcccgcgcgccgctgcatcccgcgtccagcacctacgtcccgctgccgtcgccgccgccaccatgcccaagagaaaggctgaaggggatgctaagggagataaagcaaaggtgaaggacgaaccacagagaagatccgcgaggttgtctgctaaacctgctcctccaaagccagagcccaagcctaaaaaggcccctgcaaagaagggagagaaggtacccaaagggaaaaagggaaaagctgatgctggcaaggaggggaataaccctgcagaaaatggagatgccaaaacagaccaggcacagaaagctgaaggtgctggagatgccaagtgaagtgtgtgcatttttgataactgtgtacttctggtgactgtacagtttgaaatactattttttatcaagttttataaaaatgcagaattttgttttactttttttttttttttaaaagctatgttgttagcacacagaacacttcattgtggtttttggggggaaggggcatatgtcactaatagaatgtctccaaagctggattgatgtggagaaaacacctttcccttctagttttgagagacttcctcttggctcccaggaggagggattccctgactttgacacacatggccaccttggcacaaaagccttgtggtatagaaaaacaaatttgtttttatgtcctcttctccctttccatctttcagcatagacttaactcccttaagcccagacatctgttgagacctgacccctagtcattggttaccagtgtgtcaggcaatctggactttccagtgatgccactgagatggcacctgtcaaaagagcagtggttccatttctagattgtggatcttcagataaattctgccattttcatttcacttcctgaaagtcagggtcggcttgtgaaaagttgttaaacaccatgctaaatgtgaaatgtcaaccctcactctaaactttccctgttcagagcatcagatgaagacttcattgggttttatagtggctttctgatttttggtagtccattgaagaagggagtttgaaagttgttgtatactgttaacgattgtctgcccatgtcctgcctgaaataccatgattgtttatggaaagtatctttaataaagctggatacagtttggcttggaaaaaaaaaaaaaaagaaaagaaaaaaaaaaaacgacccccacaagggggaaggccccaagtgggccccgtgcctgttgtcctctctggcctccagagattgtctgcattggcctcagctttctcactggccaattctccttcttcatgggcaccangccactgctaaacattctttcccttcacttcttgttgtaagctttgctccccttgagccacaggtttgcacattcttaaacctcagcttccagggaaa

SEQ ID NO: 321328 - DNA, 1435 bp, Homo sapiens
  misc_feature (1337)..(1337): n is a, c, g, or t
ctgaatctaaatcagtcttaaaacacgcctccggagcagtgtgaagaagaggcgagaacgacccccggaccgaccaaagcccgcgcgccgctgcatcccgcgtccagcacctacgtcccgctgccgtcgccgccgccaccatgcccaagagaaaggctgaaggggatgctaagggagataaagcaaaggtgaaggacgaaccacagagaagatccgcgaggttgtctgctaaacctgctcctccaaaggaaaaagggaaaagctgatgctggcaaggaggggaataaccctgcagaaaatggagatgccaaaacagaccaggcacagaaagctgaaggtgctggagatgccaagtgaagtgtgtgcatttttgataactgtgtacttctggtgactgtacagtttgaaatactattttttatcaagttttataaaaatgcagaattttgttttactttttttttttttttaaaagctatgttgttagcacacagaacacttcattgtggtttttggggggaaggggcatatgtcactaatagaatgtctccaaagctggattgatgtggagaaaacacctttcccttctagttttgagagacttcctcttggctcccaggaggagggattccctgactttgacacacatggccaccttggcacaaaagccttgtggtatagaaaaacaaatttgtttttatgtcctcttctccctttccatctttcagcatagacttaactcccttaagcccagacatctgttgagacctgacccctagtcattggttaccagtgtgtcaggcaatctggactttccagtgatgccactgagatggcacctgtcaaaagagcagtggttccatttctagattgtggatcttcagataaattctgccattttcatttcacttcctgaaagtcagggtcggcttgtgaaaagttgttaaacaccatgctaaatgtgaaatgtcaaccctcactctaaactttccctgttcagagcatcagatgaagacttcattgggttttatagtggctttctgatttttggtagtccattgaagaagggagtttgaaagttgttgtatactgttaacgattgtctgcccatgtcctgcctgaaataccatgattgtttatggaaagtatctttaataaagctggatacagtttggcttggaaaaaaaaaaaaaaagaaaagaaaaaaaaaaaacgacccccacaagggggaaggccccaagtgggccccgtgcctgttgtcctctctggcctccagagattgtctgcattggcctcagctttctcactggccaattctccttcttcatgggcaccangccactgctaaacattctttcccttcacttcttgttgtaagctttgctccccttgagccacaggtttgcacattcttaaacctcagcttccagggaaa

SEQ ID NO: 321329 - DNA, 293 bp, Homo sapiens
cacagacgctctcacatttgtatttttcctgcagaagactgtatattagatgagatatccaaatttgttcattgtctgctttcttttgatgaagagatcatgtgatagcttcaaaaacaggtgcagaaagtaagatcacagccctggaacaaaaggaacaagagctccaagcactcattcagcagctttccattgatttgcaaaaggtaagtagaatatgaggagaagacctggatttctaagattcataaaaactaattctttcagaaatttctgcctgagagtagctactg

SEQ ID NO: 321330 - DNA, 4331 bp, Homo sapiens
ccattcatttttttgtttaattaacttcctttcctgatgtttgtccatttctggtatgtgcgtcaccctcctcacccaagactatgctgaacaggtccgaaacttgcagaagataaaagagaagcttgaaattgcattagaaaaacaccaggattcttccatgcggaaatttcaagagcagaatgagacattccaagccaacagagccaaaatggcagaaggactggctttggcattagccagaaaggaccaggaatggtcagaaaagatggatcagcttgaaaaggagaaaaatattctgacagcccagttacaggaaatgaagaaccagagtatgaatcttttccaaaggagagatgaaatggatgaattagaggggttccagcagcaggaactaagtaaaataaagcacatgcttttaaaaaaagaagaaagtctagggaaaatggaacaagaattggaggcacgaaccagagaacttagtcgtacccaggaggagttgatgaactccaatcagatgtcatcagacttaagccagaagctagaagaattgcagagacactactcaacgctggaagagcagagagatcatgtgatagcttcaaaaacaggtgcagaaagtaagatcacagccctggaacaaaaggaacaagagctccaagcactcattcagcagctttccattgatttgcaaaaggtcactgctgaaactcaagagaaagaagacgttatcacacatttgcaagagaaggttgcatccttggagaagagactagaacagaacttatcaggagaagaacacgtgcaagaactcctgaaagagaaaacacttgctgagcagaatttggaggataccagacaacagctcttggcagccagaagcagccaggctaaggccattaacaccctggagactcgggtgagagaactggagcagaccttgcaggcctctgaggagcagctccaacagagcaagggcattgtggctgcccaggaaactcagatacaggagctcgctgccgccaaccaggagagcagccatgtgcagcagcaggcccttgctctggagcagcagttcttggagcgcacccaggcgctagaagcccagatagtggccctggagagaacgcgggcagctgaccagaccaccgcagagcaagggatgagacaactggagcaagaaaatgcagcccttaaagaatgcaggaatgaatatgaacgttctttacaaaatcaccaatttgaactaaagaagctgaaggaagaatggagccaaagagaaattgtgagcgtggccatggctcaagccctggaggaggtgcggaagcaaagggaagagttccagcaacaggcagctaacctgacagccataatagacgagaaggaacagaatctgcgggaaaaaaccgaagtgcttctccagaaagagcaggagattctccagctggagcgaggtcacaactctgccctgctgcagatacaccagctgcaggccgagctggaggccctgaggaccctcaaggcggaggaggctgcagtggtcgcggagcaggaggacctgctgaggctgcggggcccattgcaggccgaagcactctcagtcaatgagtcgcacgtgacctcgagggccatgcaggaccctgtgttccagcttccaactgcaggaagaacaccaaatggtgaggttggggccatggatctcacacagctacagaaggagaaacaggacttggagcagcaacttctggagaaaaataagaccataaagcagatgcagcagcggatgctggagctccggaagactctgcagaaggagctgaaaatcagacccgataatgagctcttcgaagtccgggagaaacctggacctgagatggcaaacatggcgccttccgtcacgaataacactgacctgacagatgcccgcgagatcaactttgagtaccttaaacatgtggttttaaaattcatgtcttgtcgcgaatccgaggcttttcatcttataaaagctgtgtcagtgttgctgaacttttcccaagaggaggagaacatgctcaaggaaactctggaatataagatgtcatggtttgggtccaaaccagctcccaagggcagcatccggccgtctatctcaaaccctcggataccatggtcctagaggggactacccaaggatggagctccgtgggttgacactttttctgtgaaaagaacactgacacaccagtctgggtgggtttttaatcactgtaactgcagtattttgtacaagtgtctaaacattgtttacaagactaaggcccacttccctgcaggctgacctgaacctcagggggtagctgatcctgtcattctggtcaccaaacaggagggtcctggcactacccagatttccacagtgctgctaatatcccagctccagccagcaccccatctgcacctgaatcctctaacttcacggtagcacttacagctgaagccatcagcatctggcaggcacacctgagtcaccatgtagcgctgctactggaggtagagacggccctttgagatggtgcccagcaggccaaacccacctgcctctgccaggaacagccaactccatgggaactctatgggagtggcttttaaaaattcagatgagttagaagctttttatcccttcctctcaagaaaatattctttcaccctgtctctcaaaccacctagaactttagaggatccatctttaagggccggtgtggatgaatgagaaaatgcacctttctgacagtatctccactttacttaagaaaactagcaaatatatgaaaagacccttagtaccaaatacactcaattgcctttttaatgaatgtacttgtcttggataggttgctggtaaaccattttaaactattttttatagctgaagttcttcactactataaacatgtcttctgtactataaaatccatttaactggtgttcttaaaatcagagcgtccagaggaaattcttcctaaaactaggattcctgttcctttgtcttctcactcgcactctggcactgctccctctgaagtgcagtgggatctcgtgtgctttgtcttgattctgtgctgcgctgccgctgggcgatgcagaccacctgtcttctactgaaggacagtccgctgtctccagtgggggcagcagctgtcccccagcctcgatggagacactggggcagtctgccttgtctgtggagctgctctctctccctcatcccaccccaaatacttaaaatgacactacacccagacggcgcccagctggctgcagcacttgtagcatgcacatgactctggtagtaaccaacaaaaacttgttttatggattcctcgtttactgaggaaagggaacatgctggttctggaaaagccacaatattgaatctaaaaggaaaccgtttattgtttgatgaaagtttcactggttaaataaaaaactaaattaataactggagcctctaaatttattatccattatccagtgatggaaagttgtatttctcaatcatgcttagggccaaaataggtatataaaatgtgtcacagaaaaacacgcatttgcaacgttaacctaacgaaatttccatgaagaaccaagtcagggcagcatctccttagtcccagctcaggctctctgccttccagaggccgcttctccagtgactaacctcctcctctggctcctccttgcagacagttatcccttgtttagaacacgaatttccatttacctggtgggaacacgaaacaggagtctcttctgttctgcaagtttgatgggtaagaggtagccttttttcaaagtaggatttcctttttcaactgttccaggaaagaatctctaagactgggtagctcacagccagccaaaggcagctacatttccacagaagcccgtccgctgcctccgtggcttctccagccattgaactggtcccacacgcaccccaggccccactcctcggcagtttcaggtgtagctgtggggcccgttcctaggtctgtactcactttagggaggcttcactgactaggctttcctcctgcatgttgaatttccttcagctttaagaggaagagtggaataaatattctaagtgatttaatgcactttgacttgtataaaactttctgtgttagcgacggtatctatagccctttatacgagcgatggatcttgagctctccttccatgttgtaaatagggattgtattcttgaaaactgctgtagcaaattcatctgtggtgcaatacactttttgattaaagctcttcaatccagatgcaactacaatgga

SEQ ID NO: 321331 - DNA, 4005 bp, Homo sapiens
tgttgggattacaggcgtgagccagcatgcctgatcttaagtgtatttttcttagcatagcccaatgaaactttgtatttttgtgtcagcttttaaaaaaagaagaaagtctagggaaaatggaacaagaattggaggcacgaaccagagaacttagtcgtacccaggaggagttgatgaactccaatcagatgtcatcagacttaagccagaagctagaagaattgcagagacactactcaacgctggaagagcagagagatcatgtgatagcttcaaaaacaggtgcagaaagtaagatcacagccctggaacaaaaggaacaagagctccaagcactcattcagcagctttccattgatttgcaaaaggtcactgctgaaactcaagagaaagaagacgttatcacacatttgcaagagaaggttgcatccttggagaagagactagaacagaacttatcaggagaagaacacgtgcaagaactcctgaaagagaaaacacttgctgagcagaatttggaggataccagacaacagctcttggcagccagaagcagccaggctaaggccattaacaccctggagactcgggtgagagaactggagcagaccttgcaggcctctgaggagcagctccaacagagcaagggcattgtggctgcccaggaaactcagatacaggagctcgctgccgccaaccaggagagcagccatgtgcagcagcaggcccttgctctggagcagcagttcttggagcgcacccaggcgctagaagcccagatagtggccctggagagaacgcgggcagctgaccagaccaccgcagagcaagggatgagacaactggagcaagaaaatgcagcccttaaagaatgcaggaatgaatatgaacgttctttacaaaatcaccaatttgaactaaagaagctgaaggaagaatggagccaaagagaaattgtgagcgtggccatggctcaagccctggaggaggtgcggaagcaaagggaagagttccagcaacaggcagctaacctgacagccataatagacgagaaggaacagaatctgcgggaaaaaaccgaagtgcttctccagaaagagcaggagattctccagctggagcgaggtcacaactctgccctgctgcagatacaccagctgcaggccgagctggaggccctgaggaccctcaaggcggaggaggctgcagtggtcgcggagcaggaggacctgctgaggctgcggggcccattgcaggccgaagcactctcagtcaatgagtcgcacgtgacctcgagggccatgcaggaccctgtgttccagcttccaactgcaggaagaacaccaaatggtgaggttggggccatggatctcacacagctacagaaggagaaacaggacttggagcagcaacttctggagaaaaataagaccataaagcagatgcagcagcggatgctggagctccggaagactctgcagaaggagctgaaaatcagacccgataatgagctcttcgaagtccgggagaaacctggacctgagatggcaaacatggcgccttccgtcacgaataacactgacctgacagatgcccgcgagatcaactttgagtaccttaaacatgtggttttaaaattcatgtcttgtcgcgaatccgaggcttttcatcttataaaagctgtgtcagtgttgctgaacttttcccaagaggaggagaacatgctcaaggaaactctggaatataagatgtcatggtttgggtccaaaccagctcccaagggcagcatccggccgtctatctcaaaccctcggataccatggtcctagaggggactacccaaggatggagctccgtgggttgacactttttctgtgaaaagaacactgacacaccagtctgggtgggtttttaatcactgtaactgcagtattttgtacaagtgtctaaacattgtttacaagactaaggcccacttccctgcaggctgacctgaacctcagggggtagctgatcctgtcattctggtcaccaaacaggagggtcctggcactacccagatttccacagtgctgctaatatcccagctccagccagcaccccatctgcacctgaatcctctaacttcacggtagcacttacagctgaagccatcagcatctggcaggcacacctgagtcaccatgtagcgctgctactggaggtagagacggccctttgagatggtgcccagcaggccaaacccacctgcctctgccaggaacagccaactccatgggaactctatgggagtggcttttaaaaattcagatgagttagaagctttttatcccttcctctcaagaaaatattctttcaccctgtctctcaaaccacctagaactttagaggatccatctttaagggccggtgtggatgaatgagaaaatgcacctttctgacagtatctccactttacttaagaaaactagcaaatatatgaaaagacccttagtaccaaatacactcaattgcctttttaatgaatgtacttgtcttggataggttgctggtaaaccattttaaactattttttatagctgaagttcttcactactataaacatgtcttctgtactataaaatccatttaactggtgttcttaaaatcagagcgtccagaggaaattcttcctaaaactaggattcctgttcctttgtcttctcactcgcactctggcactgctccctctgaagtgcagtgggatctcgtgtgctttgtcttgattctgtgctgcgctgccgctgggcgatgcagaccacctgtcttctactgaaggacagtccgctgtctccagtgggggcagcagctgtcccccagcctcgatggagacactggggcagtctgccttgtctgtggagctgctctctctccctcatcccaccccaaatacttaaaatgacactacacccagacggcgcccagctggctgcagcacttgtagcatgcacatgactctggtagtaaccaacaaaaacttgttttatggattcctcgtttactgaggaaagggaacatgctggttctggaaaagccacaatattgaatctaaaaggaaaccgtttattgtttgatgaaagtttcactggttaaataaaaaactaaattaataactggagcctctaaatttattatccattatccagtgatggaaagttgtatttctcaatcatgcttagggccaaaataggtatataaaatgtgtcacagaaaaacacgcatttgcaacgttaacctaacgaaatttccatgaagaaccaagtcagggcagcatctccttagtcccagctcaggctctctgccttccagaggccgcttctccagtgactaacctcctcctctggctcctccttgcagacagttatcccttgtttagaacacgaatttccatttacctggtgggaacacgaaacaggagtctcttctgttctgcaagtttgatgggtaagaggtagccttttttcaaagtaggatttcctttttcaactgttccaggaaagaatctctaagactgggtagctcacagccagccaaaggcagctacatttccacagaagcccgtccgctgcctccgtggcttctccagccattgaactggtcccacacgcaccccaggccccactcctcggcagtttcaggtgtagctgtggggcccgttcctaggtctgtactcactttagggaggcttcactgactaggctttcctcctgcatgttgaatttccttcagctttaagaggaagagtggaataaatattctaagtgatttaatgcactttgacttgtataaaactttctgtgttagcgacggtatctatagccctttatacgagcgatggatcttgagctctccttccatgttgtaaatagggattgtattcttgaaaactgctgtagcaaattcatctgtggtgcaatacactttttgattaaagctcttcaatccagatgcaactacaatgga

SEQ ID NO: 321332 - DNA, 2031 bp, Homo sapiens
gcggccgctccaactcagacctcgtgccgaattcggcacgaggtgttaccattctggtcaccaaacaggagggtcctggcactacccagatttccacagtgctgctaatatcccagctccagccagcaccccatctgcacctgaatcctctaacttcacggtagcacttacagctgaagccatcagcatctggcaggcacacctgagtcaccatgtagcgctgctactggaggtagagacggccctttgagatggtgcccagcaggccaaacccacctgcctctgccaggaacagccaactccatgggaactctatgggagtggcttttaaaaattcagatgagttagaagctttttatcccttcctctcaagaaaatattctttcaccctgtctctcaaaccacctagaactttagaggatccatctttaagggccggtgtggatgaatgagaaaatgcacctttctgacagtatctccactttacttaagaaaactagcaaatatatgaaaagacccttagtaccaaatacactcaattgcctttttaatgaatgtacttgtcttggataggttgctggtaaaccattttaaactattttttatagctgaagttcttcactactataaacatgtcttctgtactataaaatccatttaactggtgttcttaaaatcagagcgtccagaggaaattcttcctaaaactaggattcctgttcctttgtcttctcactcgcactctggcactgctccctctgaagtgcagtgggatctcgtgtgctttgtcttgattctgtgctgcgctgccgctgggcgatgcagaccacctgtcttctactgaaggacagtccgctgtctccagtgggggcagcagctgtcccccagcctcgatggagacactggggcagtctgccttgtctgtggagctgctctctctccctcatcccaccccaaatacttaaaatgacactacacccagacggcgcccagctggctgcagcacttgtagcatgcacatgactctggtagtaaccaacaaaaacttgttttatggattcctcgtttactgaggaaagggaacatgctggttctggaaaagccacaatattgaatctaaaaggaaaccgtttattgtttgatgaaagtttcactggttaaataaaaaactaaattaataactggagcctctaaatttattatccattatccagtgatggaaagttgtatttctcaatcatgcttagggccaaaataggtatataaaatgtgtcacagaaaaacacgcatttgcaacgttaacctaacgaaatttccatgaagaaccaagtcagggcagcatctccttagtcccagctcaggctctctgccttccagaggccgcttctccagtgactaacctcctcctctggctcctccttgcagacagttatcccttgtttagaacacgaatttccatttacctggtgggaacacgaaacaggagtctcttctgttctgcaagtttgatgggtaagaggtagccttttttcaaagtaggatttcctttttcaactgttccaggaaagaatctctaagactgggtagctcacagccagccaaaggcagctacatttccacagaagcccgtccgctgcctccgtggcttctccagccattgaactggtcccacacgcaccccaggccccactcctcggcagtttcaggtgtagctgtggggcccgttcctaggtctgtactcactttagggaggcttcactgactaggctttcctcctgcatgttgaatttccttcagctttaagaggaagagtggaataaatattctaagtgatttaatgcactttgacttgtataaaactttctgtgttagcgacggtatctatagccctttatacgagcgatggatcttgagctctccttccatgttgtaaatagggattgtattcttgaaaactgctgtagcaaattcatctgtggtgcaatacactttttgattaaagctcttcaatccagatgcaactacaatgga

SEQ ID NO: 321333 - DNA, 1806 bp, Homo sapiens
gcactgggagacgtgcggttccgggtcgctgctcggctcgccggctgggcggtgggggttggtgacgcgggccggggctcacgagaggcccgggaggcggggctttgctggcttcccagagagaggcaggacagaatgctttgacctccaagctgttttaaatctagtagataagccagatcctgtgttgccataagcccttggcccacatttaagtgggaatgcagctagcttggatgtctgaaactttgtaggcgcctctgtctgaatcctgaacacaggcaccaggactactgagagctcgtcatctgtgcaggatagccacacagcaaacatgtttgcaaaactgaagaagaaaattgcagaagagactgctgttgctcagaggccaggaggtgctactaggatcccacggtctgtgagcaaggaatcagttgcctcaatgggagctgactcaggagatgactttgcttccgatggaagcagctccagagaagatctttcatcccagcttctgagaaggaatgaacagatacggaagttagaggccagactttctgactatgctgaacaggtccgaaacttgcagaagataaaagagaagcttgaaattgcattagaaaaacaccaggattcttccatgcggaaatttcaagagcagaatgagacattccaagccaacagagccaaaatggcagaaggactggctttggcattagccagaaaggaccaggaatggtcagaaaagatggatcagcttgaaaaggagaaaaatattctgacagcccagttacaggaaatgaagaaccagagtatgaatcttttccaaaggagagatgaaatggatgaattagaggggttccagcagcaggaactaagtaaaataaagcacatgcttttaaaaaaagaagaaagtctagggaaaatggaacaagaattggaggcacgaaccagagaacttagtcgtacccaggaggagttgatgaactccaatcagatgtcatcagacttaagccagaagctagaagaattgcagagacactactcaacgctggaagagcagagagatcatgtgatagcttcaaaaacaggtgcagaaagtaagatcacagccctggaacaaaaggaacaagagctccaagcactcattcagcagctttccattgatttgcaaaaggtcactgctgaaactcaagagaaagaagacgttatcacacatttgcaagagaaggttgcatccttggagaagagactagaacagaacttatcaggagaagaacacgtgcaagaactcctgaaagagaaaacacttgctgagcagaatttggaggataccagacaacagctcttggcagccagaagcagccaggctaaggccattaacaccctggagactcgggtgagagaactggagcagaccttgcaggcctctgaggagcagctccaacagagcaagggcattgtggctgcccaggaaactcagatacaggagctcgtaagtgcttattggagctgctgcattccaggcccttaatgctttctctccaggcctttgcagatgctccaaactcattccgaacttcggcaacggtacctggacctgcccatagatacagttcttgtgctggatgtgagcaggccagcagcagggggtggagggagtcaggacctaatggtgggcctgagttacctgggaggtgcaccagcagctcctttccaccttacatcccaccttctggtccagcctggtcctggggctgtcagaggtggcagctccgctaggagtcaagcctcaacttgcaatca

SEQ ID NO: 321334 - DNA, 367 bp, Homo sapiens
gaatggtcagaaaagatggatcagcttgaaaaggttagttcatctttatttttgtctcatttttgttggtctcgtctctggggtatggaaaacgttttatccggtaaccaacatactgattgctataccacctcttggaagcaggacagtttatgattagatactgacttgaaaagctctgatcctccccttttttggtgaatgtgcaggatgtcttttgtttgcccctcttgatatactctgcactcctcctctcttccctttctctgtgtacctgaacgccgatagaaactgtatcagcagggctcagaatgccctctggcatccggttgggttcagccagtggggaaccctgaaagaaccatgt

SEQ ID NO: 321335 - DNA, 4811 bp, Homo sapiens
gcactgggagacgtgcggttccgggtcgctgctcggctcgccggctgggcggtgggggttggtgacgcgggccggggctcacgagaggcccgggaggcggggctttgctggcttcccagagagaggcaggacagaatgctttgacctccaagctgttttaaatctagtagataagccagatcctgtgttgccataagcccttggcccacatttaagtgggaatgcagctagcttggatgtctgaaactttgtaggcgcctctgtctgaatcctgaacacaggcaccaggactactgagagctcgtcatctgtgcaggatagccacacagcaaacatgtttgcaaaactgaagaagaaaattgcagaagagactgctgttgctcagaggccaggaggtgctactaggatcccacggtctgtgagcaaggaatcagttgcctcaatgggagctgactcaggagatgactttgcttccgatggaagcagctccagagaagatctttcatcccagcttctgagaaggaatgaacagatacggaagttagaggccagactttctgactatgctgaacaggtccgaaacttgcagaagataaaagagaagcttgaaattgcattagaaaaacaccaggattcttccatgcggaaatttcaagagcagaatgagacattccaagccaacagagccaaaatggcagaaggactggctttggcattagccagaaaggaccaggaatggtcagaaaagatggatcagcttgaaaaggagaaaaatattctgacagcccagttacaggaaatgaagaaccagagtatgaatcttttccaaaggagagatgaaatggatgaattagaggggttccagcagcaggaactaagtaaaataaagcacatgcttttaaaaaaagaagaaagtctagggaaaatggaacaagaattggaggcacgaaccagagaacttagtcgtacccaggaggagttgatgaactccaatcagatgtcatcagacttaagccagaagctagaagaattgcagagacactactcaacgctggaagagcagagagatcatgtgatagcttcaaaaacaggtgcagaaagtaagatcacagccctggaacaaaaggaacaagagctccaagcactcattcagcagctttccattgatttgcaaaaggtcactgctgaaactcaagagaaagaagacgttatcacacatttgcaagagaaggttgcatccttggagaagagactagaacagaacttatcaggagaagaacacgtgcaagaactcctgaaagagaaaacacttgctgagcagaatttggaggataccagacaacagctcttggcagccagaagcagccaggctaaggccattaacaccctggagactcgggtgagagaactggagcagaccttgcaggcctctgaggagcagctccaacagagcaagggcattgtggctgcccaggaaactcagatacaggagctcgctgccgccaaccaggagagcagccatgtgcagcagcaggcccttgctctggagcagcagttcttggagcgcacccaggcgctagaagcccagatagtggccctggagagaacgcgggcagctgaccagaccaccgcagagcaagggatgagacaactggagcaagaaaatgcagcccttaaagaatgcaggaatgaatatgaacgttctttacaaaatcaccaatttgaactaaagaagctgaaggaagaatggagccaaagagaaattgtgagcgtggccatggctcaagccctggaggaggtgcggaagcaaagggaagagttccagcaacaggcagctaacctgacagccataatagacgagaaggaacagaatctgcgggaaaaaaccgaagtgcttctccagaaagagcaggagattctccagctggagcgaggtcacaactctgccctgctgcagatacaccagctgcaggccgagctggaggccctgaggaccctcaaggcggaggaggctgcagtggtcgcggagcaggaggacctgctgaggctgcggggcccattgcaggccgaagcactctcagtcaatgagtcgcacgtgacctcgagggccatgcaggaccctgtgttccagcttccaactgcaggaagaacaccaaatggtgaggttggggccatggatctcacacagctacagaaggagaaacaggacttggagcagcaacttctggagaaaaataagaccataaagcagatgcagcagcggatgctggagctccggaagactctgcagaaggagctgaaaatcagacccgataatgagctcttcgaagtccgggagaaacctggacctgagatggcaaacatggcgccttccgtcacgaataacactgacctgacagatgcccgcgagatcaactttgagtaccttaaacatgtggttttaaaattcatgtcttgtcgcgaatccgaggcttttcatcttataaaagctgtgtcagtgttgctgaacttttcccaagaggaggagaacatgctcaaggaaactctggaatataagatgtcatggtttgggtccaaaccagctcccaagggcagcatccggccgtctatctcaaaccctcggataccatggtcctagaggggactacccaaggatggagctccgtgggttgacactttttctgtgaaaagaacactgacacaccagtctgggtgggtttttaatcactgtaactgcagtattttgtacaagtgtctaaacattgtttacaagactaaggcccacttccctgcaggctgacctgaacctcagggggtagctgatcctgtcattctggtcaccaaacaggagggtcctggcactacccagatttccacagtgctgctaatatcccagctccagccagcaccccatctgcacctgaatcctctaacttcacggtagcacttacagctgaagccatcagcatctggcaggcacacctgagtcaccatgtagcgctgctactggaggtagagacggccctttgagatggtgcccagcaggccaaacccacctgcctctgccaggaacagccaactccatgggaactctatgggagtggcttttaaaaattcagatgagttagaagctttttatcccttcctctcaagaaaatattctttcaccctgtctctcaaaccacctagaactttagaggatccatctttaagggccggtgtggatgaatgagaaaatgcacctttctgacagtatctccactttacttaagaaaactagcaaatatatgaaaagacccttagtaccaaatacactcaattgcctttttaatgaatgtacttgtcttggataggttgctggtaaaccattttaaactattttttatagctgaagttcttcactactataaacatgtcttctgtactataaaatccatttaactggtgttcttaaaatcagagcgtccagaggaaattcttcctaaaactaggattcctgttcctttgtcttctcactcgcactctggcactgctccctctgaagtgcagtgggatctcgtgtgctttgtcttgattctgtgctgcgctgccgctgggcgatgcagaccacctgtcttctactgaaggacagtccgctgtctccagtgggggcagcagctgtcccccagcctcgatggagacactggggcagtctgccttgtctgtggagctgctctctctccctcatcccaccccaaatacttaaaatgacactacacccagacggcgcccagctggctgcagcacttgtagcatgcacatgactctggtagtaaccaacaaaaacttgttttatggattcctcgtttactgaggaaagggaacatgctggttctggaaaagccacaatattgaatctaaaaggaaaccgtttattgtttgatgaaagtttcactggttaaataaaaaactaaattaataactggagcctctaaatttattatccattatccagtgatggaaagttgtatttctcaatcatgcttagggccaaaataggtatataaaatgtgtcacagaaaaacacgcatttgcaacgttaacctaacgaaatttccatgaagaaccaagtcagggcagcatctccttagtcccagctcaggctctctgccttccagaggccgcttctccagtgactaacctcctcctctggctcctccttgcagacagttatcccttgtttagaacacgaatttccatttacctggtgggaacacgaaacaggagtctcttctgttctgcaagtttgatgggtaagaggtagccttttttcaaagtaggatttcctttttcaactgttccaggaaagaatctctaagactgggtagctcacagccagccaaaggcagctacatttccacagaagcccgtccgctgcctccgtggcttctccagccattgaactggtcccacacgcaccccaggccccactcctcggcagtttcaggtgtagctgtggggcccgttcctaggtctgtactcactttagggaggcttcactgactaggctttcctcctgcatgttgaatttccttcagctttaagaggaagagtggaataaatattctaagtgatttaatgcactttgacttgtataaaactttctgtgttagcgacggtatctatagccctttatacgagcgatggatcttgagctctccttccatgttgtaaatagggattgtattcttgaaaactgctgtagcaaattcatctgtggtgcaatacactttttgattaaagctcttcaatccagatgcaactacaatgga

SEQ ID NO: 321336 - DNA, 4874 bp, Homo sapiens
gcactgggagacgtgcggttccgggtcgctgctcggctcgccggctgggcggtgggggttggtgacgcgggccggggctcacgagaggcccgggaggcggggctttgctggcttcccagagagaggcaggacagaatgctttgacctccaagctgttttaaatctagtagataagccagatcctgtgttgccataagcccttggcccacatttaagtgggaatgcagctagcttggatgtctgaaactttgtaggcgcctctgtctgaatcctgaacacaggcaccaggactactgagagctcgtcatctgtgcaggatagccacacagcaaacatgtttgcaaaactgaagaagaaaattgcagaagagactgctgttgctcagaggccaggaggtgctactaggatcccacggtctgtgagcaaggaatcagttgcctcaatgggagctgactcaggagatgactttgcttccgatggaagcagctccagagaagatctttcatcccagcttctgagaaggaatgaacagatacggaagttagaggccagactttctgactatgctgaacaggtccgaaacttgcagaagataaaagagaagcttgaaattgcattagaaaaacaccaggattcttccatgcggaaatttcaagagcagaatgagacattccaagccaacagagccaaaatggcagaaggactggctttggcattagccagaaaggaccaggaatggtcagaaaagatggatcagcttgaaaaggagaaaaatattctgacagcccagttacaggaaatgaagaaccagagtatgaatcttttccaaaggagagatgaaatggatgaattagaggggttccagcagcaggaactaagtaaaataaagcacatgcttttaaaaaaagaagaaagtctagggaaaatggaacaagaattggaggcacgaaccagagaacttagtcgtacccaggaggagttgatgaactccaatcagatgtcatcagacttaagccagaagctagaagaattgcagagacactactcaacgctggaagagcagagagatcatgtgatagcttcaaaaacaggtgcagaaagtaagatcacagccctggaacaaaaggaacaagagctccaagcactcattcagcagctttccattgatttgcaaaaggtcactgctgaaactcaagagaaagaagacgttatcacacatttgcaagagaaggttgcatccttggagaagagactagaacagaacttatcaggagaagaacacgtgcaagaactcctgaaagagaaaacacttgctgagcagaatttggaggataccagacaacagctcttggcagccagaagcagccaggctaaggccattaacaccctggagactcgggtgagagaactggagcagaccttgcaggcctctgaggagcagctccaacagagcaagggcattgtggctgcccaggaaactcagatacaggagctcgctgccgccaaccaggagagcagccatgtgcagcagcaggcccttgctctggagcagcagttcttggagcgcacccaggcgctagaagcccagatagtggccctggagagaacgcgggcagctgaccagaccaccgcagagcaagggatgagacaactggagcaagaaaatgcagcccttaaagaatgcaggaatgaatatgaacgttctttacaaaatcaccaatttgaactaaagaagctgaaggaagaatggagccaaagagaaattgtgagcgtggccatggctcaagccctggaggaggtgcggaagcaaagggaagagttccagcaacaggcagctaacctgacagccataatagacgagaaggaacagaatctgcgggaaaaaaccgaagtgcttctccagaaagagcaggagattctccagctggagcgaggtcacaactctgccctgctgcagatacaccagctgcaggccgagctggaggccctgaggaccctcaaggcggaggaggctgcagtggtcgcggagcaggaggacctgctgaggctgcggggcccattgcaggccgaagcactctcagtcaatgagtcgcacgtgacctcgagggccatgcaggaccctgtgttccagcttccaactgcaggaagaacaccaaatggtgaggttggggccatggatctcacacagctacagaaggagaaacaggacttggagcagcaacttctggagaaaaataagaccataaagcagatgcagcagcggatgctggagctccggaagactctgcagaaggagctgaaaatcagacccgataatgagctcttcgaagtccgggagaaacctggacctgagatggcaaacatggcgccttccgtcacgaataacactgacctgacagatgcccgcgagatcaactttgagtaccttaaacatgtggttttaaaattcatgtcttgtcgcgaatccgaggcttttcatcttataaaagctgtgtcagtgttgctgaacttttcccaagaggaggagaacatgctcaaggaaactctggaatataagatgtcatggtttgggtccaaaccagctcccaagggcagcatccggccgtctatctcaaaccctcggataccatggtcctagaggggactacccaaggatggagctccgtgggttgacactttttctgtgaaaagaacactgacacaccagtctgggtgggtttttaatcactgtaactgcagtattttgtacaagtgtctaaacattgtttacaagactaaggcccacttccctgcaggctgacctgaacctcagggggtagctgatcctgtcattctggtcaccaaacaggagggtcctggcactacccagatttccacagtgctgctaatatcccagctccagccagcaccccatctgcacctgaatcctctaacttcacggtagcacttacagctgaagccatcagcatctggcaggcacacctgagtcaccatgtagcgctgctactggaggtagagacggccctttgagatggtgcccagcaggccaaacccacctgcctctgccaggaacagccaactccatgggaactctatgggagtggcttttaaaaattcagatgagttagaagctttttatcccttcctctcaagaaaatattctttcaccctgtctctcaaaccacctagaactttagaggatccatctttaagggccggtgtggatgaatgagaaaatgcacctttctgacagtatctccactttacttaagaaaactagcaaatatatgaaaagacccttagtaccaaatacactcaattgcctttttaatgaatgtacttgtcttggataggttgctggtaaaccattttaaactattttttatagctgaagttcttcactactataaacatgtcttctgtactataaaatccatttaactggtgttcttaaaatcagagcgtccagaggaaattcttcctaaaactaggattcctgttcctttgtcttctcactcgcactctggcactgctccctctgaagtgcagtgggatctcgtgtgctttgtcttgattctgtgctgcgctgccgctgggcgatgcagaccacctgtcttctactgaaggacagtccgctgtctccagtgggggcagcagctgtcccccagcctcgatggagacactggggcagtctgccttgtctgtggagctgctctctctccctcatcccaccccaaatacttaaaatgacactacacccagacggcgcccagctggctgcagcacttgtagcatgcacatgactctggtagtaaccaacaaaaacttgttttatggattcctcgtttactgaggaaagggaacatgctggttctggaaaagccacaatattgaatctaaaaggaaaccgtttattgtttgatgaaagtttcactggttaaataaaaaactaaattaataactggagcctctaaatttattatccattatccagtgatggaaagttgtatttctcaatcatgcttagggccaaaataggtatataaaatgtgtcacagaaaaacacgcatttgcaacgttaacctaacgaaatttccatgaagaaccaagtcagggcagcatctccttagtcccagctcaggctctctgccttccagaggccgcttctccagtgactaacctcctcctctggctcctccttgcagacagttatcccttgtttagaacacgaatttccatttacctggtgggaacacgaaacaggagtctcttctgttctgcaagtttgatgggtaagaggtagccttttttcaaagtaggatttcctttttcaactgttccaggaaagaatctctaagactgggtagctcacagccagccaaaggcagctacatttccacagaagcccgtccgctgcctccgtggcttctccagccattgaactggtcccacacgcaccccaggccccactcctcggcagtttcaggtgtagctgtggggcccgttcctaggtctgtactcactttagggaggcttcactgactaggctttcctcctgcatgttgaatttccttcagctttaagaggaagagtggaataaatattctaagtgatttaatgcactttgacttgtataaaactttctgtgttagcgacggtatctatagccctttatacgagcgatggatcttgagctctccttccatgttgtaaatagggattgtattcttgaaaactgctgtagcaaattcatctgtggtgcaatacactttttgattaaagctcttcaatccagatgcaactacaatggattttactagtttggtgtgtcagtatttctttgactcattaaatctggtattttgtgtctcata

SEQ ID NO: 321337 - DNA, 2054 bp, Homo sapiens
cacaccacctgagtccatccctggggcctacaggagaaccctgtacctcagcagccctgaaacctgctttccacttccggacctttctgaaatcaagacgcatctttagatcaatggcatcttactgtgtcaccggcgatactttgacagtaacaaggacgcttactctaagcgctttatctctgtggcctgcatctcccacgtggctgccatcgggtacaccacctgagtcaccatgtagcgctgctactggaggtagagacggccctttgagatggtgcccagcaggccaaacccacctgcctctgccaggaacagccaactccatgggaactctatgggagtggcttttaaaaattcagatgagttagaagctttttatcccttcctctcaagaaaatattctttcaccctgtctctcaaaccacctagaactttagaggatccatctttaagggccggtgtggatgaatgagaaaatgcacctttctgacagtatctccactttacttaagaaaactagcaaatatatgaaaagacccttagtaccaaatacactcaattgcctttttaatgaatgtacttgtcttggataggttgctggtaaaccattttaaactattttttatagctgaagttcttcactactataaacatgtcttctgtactataaaatccatttaactggtgttcttaaaatcagagcgtccagaggaaattcttcctaaaactaggattcctgttcctttgtcttctcactcgcactctggcactgctccctctgaagtgcagtgggatctcgtgtgctttgtcttgattctgtgctgcgctgccgctgggcgatgcagaccacctgtcttctactgaaggacagtccgctgtctccagtgggggcagcagctgtcccccagcctcgatggagacactggggcagtctgccttgtctgtggagctgctctctctccctcatcccaccccaaatacttaaaatgacactacacccagacggcgcccagctggctgcagcacttgtagcatgcacatgactctggtagtaaccaacaaaaacttgttttatggattcctcgtttactgaggaaagggaacatgctggttctggaaaagccacaatattgaatctaaaaggaaaccgtttattgtttgatgaaagtttcactggttaaataaaaaactaaattaataactggagcctctaaatttattatccattatccagtgatggaaagttgtatttctcaatcatgcttagggccaaaataggtatataaaatgtgtcacagaaaaacacgcatttgcaacgttaacctaacgaaatttccatgaagaaccaagtcagggcagcatctccttagtcccagctcaggctctctgccttccagaggccgcttctccagtgactaacctcctcctctggctcctccttgcagacagttatcccttgtttagaacacgaatttccatttacctggtgggaacacgaaacaggagtctcttctgttctgcaagtttgatgggtaagaggtagccttttttcaaagtaggatttcctttttcaactgttccaggaaagaatctctaagactgggtagctcacagccagccaaaggcagctacatttccacagaagcccgtccgctgcctccgtggcttctccagccattgaactggtcccacacgcaccccaggccccactcctcggcagtttcaggtgtagctgtggggcccgttcctaggtctgtactcactttagggaggcttcactgactaggctttcctcctgcatgttgaatttccttcagctttaagaggaagagtggaataaatattctaagtgatttaatgcactttgacttgtataaaactttctgtgttagcgacggtatctatagccctttatacgagcgatggatcttgagctctccttccatgttgtaaatagggattgtattcttgaaaactgctgtagcaaattcatctgtggtgcaatacactttttgattaaagctcttcaatccagatgcaactacaatgga

SEQ ID NO: 321338 - DNA, 1074 bp, Homo sapiens
gcactgggagacgtgcggttccgggtcgctgctcggctcgccggctgggcggtgggggttggtgacgcgggccggggctcacgagaggcccgggaggcggggctttgctggcttcccagagagaggcaggacagaatgctttgacctccaagctgttttaaatctagtagataagccagatcctgtgttgccataagcccttggcccacatttaagtgggaatgcagctagcttggatgtctgaaactttgtaggcgcctctgtctgaatcctgaacacaggcaccaggactactgagagctcgtcatctgtgcaggatagccacacagcaaacatgtttgcaaaactgaagaagaaaattgcagaagagactgctgttgctcagaggccaggaggtgctactaggatcccacggtctgtgagcaaggaatcagttgcctcaatgggagctgactcaggagatgactttgcttccgatggaagcagctccagagaagatctttcatcccagcttctgagaaggaatgaacagatacggaagttagaggccagactttctgactatgctgaacaggtccgaaacttgcagaagataaaagagaagcttgaaattgcattagaaaaacaccaggattcttccatgcggaaatttcaagagcagaatgagacattccaagccaacagagccaaaatggcagaaggactggctttggcattagccagaaaggaccaggaatggtcagaaaagatggatcagcttgaaaaggagaaaaatattctgacagcccagttacaggaaatgaagaaccagagtatgaatcttttccaaaggagagatgaaatggatgaattagaggggttccagcagcaggaactaagtaaaataaagcacatggtatgcatttttgttttagtagctaaatactgaatagatgattattcactctgattttactagtcatcactctctaattgctgataaacatacaccagtaatatgtgatattaatcatatttgatattaatcatatttgtatgtttttaaatttattaaaatagaaaagttctgtttaa

SEQ ID NO: 321339 - DNA, 715 bp, Homo sapiens
ttcacatttatttccttaaaacatttcactttcacaatctcttccctagtgtcttcagagtctgccaatggacaattttccagcactcaaagataaagacaatcttgaaattaagcttatacatccaggtcaggagttttgttctcacatgatttcagaagggtgaattcttaaattatcgattctaactcttcatcattgaattaatgggcttaatctaaaatgtagctccaaactaggaaatattttaattcaggctggattcaaaattccctggtcacaaagatgattcagtgcattaggatctgttgcatttatgccccaatttgcaatggataatattattttaatgctttttttatgcacacagatttttttaaaatagcctgaacaaatagaatttacagaaggacctccttgcaaaattctcatttggcacttattatagactggcttgtttcattagttatcttatttccatactcaattgtaaacaactgaagacaggatttacttacaagtcttcttatggcctgcagagctaggaactgaactgtgccttgctgcaggaacataaatatttaatgacagattggctgataataggacactaacaggacaccttcaaaaggagataccatataaaatgaaaggattgtctcctttataatagatgagaacagataaggttttctctctctctctttctctcatg

SEQ ID NO: 321340 - DNA, 454 bp, Homo sapiens
ataatttgggttatttccaataacagaattttttctgctgaaatatattttaaagaaaacacttttaaagagtccaatgtagatttttccacagtgtattctacagagcatattaagatgttaattaccgctctttgattacaggattccagggtcaaataattttgtttgataaacagtataaaacatattaatttactgcagaactttcagggcttccagtatgtgaatgtgtatactgaaatgttaagagggcatatagaatatgcagcattttccagaattatttgagaatggatattttttttcccttagagaacatctattaacaagcacccttggactctcatcctcaaagtgaggtcccagcactatgagcatcaccatcaatctggaccccaccccaaacctattgaattagatctgatggtagggcctagatgtctgtgtttta

SEQ ID NO: 321341 - DNA, 1165 bp, Homo sapiens
taagtgaaagcaagcttattaagaaagtaaaagaataaaaaggtggcttctccataggcagaaaactagcgtagttttttaattagaaattgttattcaataatagtacatgttacaaataaataccattttaaactgaaaaaattgtagactttcaaatcagttagggtggtcaccctaaaaaagggcattttttccccttagtctccttgttcatgttgctcacaacaagaaatgggctaatgctatgaataataataacaaacactgccttctgtcaggccctgtgctgaataccgtctgcatatgtataggaaagggttaactcagcaggtcttgtttgcccagactctgtacatttccaagaaaggtctgcctttaggactggtccttggccagctcctggagaatgagctctcagcttttagaaaattctatctgctaagaatagttttgcatgtctcaggtcttgggccacaaaatatcagtttaatcagatggtttatgttaacaagtatgatttatggcaaacatagatctctaatctccatttctctctcatatatctatatttatctatccatatatatgtacctatatatatcaaatatgaagatatgtttatagcaattgcatatacatagagagatagtatgtagtatggaagagagacatagatattattcttcattttagaatgttatcttggtatgtttaaaaggaaaaacttaagatgtgttgcaattgcagtatgagtttcaggtatgtacatgttatgtgtgtgtgtgagagacacacacaaacacatttcaaacatgttttatgtttaagctcaatattcaaacacagaaatataacatctattcttaatatgttttatgtaagtacagcagcagcattattaaatactgtatttctatggtgattgaaaattagtaggcagagaatttttgtaatggttcttaataatttttgtaatagtaaatgattactttttgtttagtatagttttataatctatacatgaataaagtggatatttctattcatatagaaatgtgatttactctcatgtacttatctacatgctaaaaccataagttatcaattttagttctgtgccaaggcacttttactgaataaaaataatcagctaattttaaat

SEQ ID NO: 321342 - DNA, 412 bp, Homo sapiens
tttttaagagatgggtgtctccctgtgttgcctaggctggtcttgaacagcctgggaaacagcaagaatcactttctaaaaaattaaaaataaaaagattagccggatgtggcagcacacacctaaagtctcagctactcatgatgctgagggaggtggatcacttgagcccaggcgtttaaggttacagtgagctatgatcatgccactgcattcttgcctcttttagtgagaccctcctttaaaaaataaaaagttatgtttacactcttctgtagtcttttattaattaattaacttttttattttttgagagggggtcttgctgtgtcacccaggctgaagtgcagtggcgtgatcttggctcactgcaacctccaccttctgggttcaagtgattctcctgcctcag

SEQ ID NO: 321343 - DNA, 2504 bp, Homo sapiens
gcttccagcagggctagaagatgcgctgcccggggcggccagagccctgcagaacaaaccgccgcacggaattaggggccgccgtccgcgcctgccaggcttggaagcggactcgcccccagggccaccgccctaggaaacctcccgtcggaagcctcccaagcaagccgctcacccgcggctcccgcgcgaggcggcgtgggcgtgggcgcggccctggcgcggcggcgcgcgcggggtgaagggagcccggcgcgctggctgcggcgacggcggccgttgctgcgccgggtactggggtcgctgcctgaggcgcaggcgccgtggactccacccgccccggggcctgggctcgctgtggactcgtcatggcgaccgagcagaggcctttccacctggtggtgttcggcgcgtctggcttcaccggccagttcgtgaccgaggaggtggcccgggagcaggtggacccggagcggagctcccgcctgccctgggccgtggcgggccgctcccgggagaagctgcagcgggtgctggagaaggcggccctgaagctgggaagaccaacactgtcatctgaagttggaatcatcatctgtgatattgctaatccagcctcgcttgatgaaatggctaaacaggcaacagttgtcctcaattgcgtaggaccatatcggttttatggagaacctgtaataaaagcatgtattgaaaatggagccagttgtatcgacatcagtggagaacctcagtttctggaactaatgcaactgaagtatcatgagaaagctgcagacaaaggggtttatatcattggaagcagcggctttgactccattccagcagatctgggagtaatatataccagaaataaaatgaatggtactttgactgctgtggaaagtttcctgactatacattcaggacctgaggggttgagcattcatgatggtacctggaagtcagcaatttatggttttggagatcagagtaatttgagaaaactaagaaatgtatcaaatctgaaacctgtcccgctcattggtccaaaattgaagagaaggtggccaatttcttattgtcgggaactcaaaggttattccattccttttatgggatctgatgtgtctgttgtaaggaggactcaacgttacttgtatgaaaatttagaggaatcaccagttcagtatgctgcgtatgtaactgtgggaggcatcacctctgttattaagctgatgtttgcaggacttttctttttgttctttgtgaggtttggaattggaaggcaacttctcataaaattcccatggttcttctcctttggctatttttcaaaacaaggcccaacacaaaaacagattgatgctgcctcattcacgctgacattctttggtcaaggatacagccaaggcactggtacagataagaacaaaccaaatatcaaaatttgtactcaggtgaaaggaccagaggctggctatgtggctacccccatagctatggttcaggcagccatgactcttctaagtgatgcttctcatctgcctaaggcgggcggggtcttcacacctggagcagctttttccaaaacaaagttgattgacagactcaacaaacacggtattgagtttagtgttattagcagctctgaagtctaaacactggaagaattaactgaagtcataacgtgcgtgaattaacagcttctctatttgatatttgaaattcttctgtaagcctgtctgagtgtatgtggaaacgattgtcaaatctaaaatatctatatattaaaaagtaggaaattgtcctagcttaccctaaatttcaaatctgagttgattttgtgattttattgcttataacagagaactcatatttgacatatttttttcattgatgtgttcctggtagattttcacgaatgagctggcaggtctaatgggggaggcggcgtcccagtctgtgttgcagcagcattctcatcgggggtgcgcacaccatcgttactgtcgggcagtaactgccgcttgccttgccgcagtaggagggaaatctcaccttccttccacatactgtcttgagcctttgctaaattaaactgcactttttgctatttttgcctagtttttcgccaatctacactgattttggactgttacctaagttgaaaaataaaaggttgtcaatcgaatggtggtttaatgtttggacctgccgatgtatttgtatagtggtagaaacatgctgcttaagtggcctaacctgtttcttgccaataagtaggcttatcattttatctttacgtaattctatatctgtgactaggtttttaaggatacagcttataagttgctatcaattttcactacctaagcagaatttttctctaatttactttttgtattttaactaggttttacatggaagccctaaaataaggcaaaagactttttcttttgtaataagcatataataaacacgtatatacatagcaaattgattca

SEQ ID NO: 321344 - DNA, 2579 bp, Homo sapiens
gcttccagcagggctagaagatgcgctgcccggggcggccagagccctgcagaacaaaccgccgcacggaattaggggccgccgtccgcgcctgccaggcttggaagcggactcgcccccagggccaccgccctaggaaacctcccgtcggaagcctcccaagcaagccgctcacccgcggctcccgcgcgaggcggcgtgggcgtgggcgcggccctggcgcggcggcgcgcgcggggtgaagggagcccggcgcgctggctgcggcgacggcggccgttgctgcgccgggtactggggtcgctgcctgaggcgcaggcgccgtggactccacccgccccggggcctgggctcgctgtggactcgtcatggcgaccgagcagaggcctttccacctggtggtgttcggcgcgtctggcttcaccggccagttcgtgaccgaggaggtggcccgggagcaggtggacccggagcggagctcccgcctgccctgggccgtggcgggccgctcccgggagaagctgcagcgggtgctggagaaggcggccctgaagctgggaagaccaacactgtcatctgaagttggaatcatcatctgtgatattgctaatccagcctcgcttgatgaaatggctaaacaggcaacagttgtcctcaattgcgtaggaccatatcggttttatggagaacctgtaataaaagcatgtattgaaaatggagccagttgtatcgacatcagtggagaacctcagtttctggaactaatgcaactgaagtatcatgagaaagctgcagacaaaggggtttatatcattggaagcagcggctttgactccattccagcagatctgggagtaatatataccagaaataaaatgaatggtactttgactgctgtggaaagtttcctgactatacattcaggacctgaggggttgagcattcatgatggtacctggaagtcagcaatttatggttttggagatcagagtaatttgagaaaactaagaaatgtatcaaatctgaaacctgtcccgctcattggtccaaaattgaagagaaggtggccaatttcttattgtcgggaactcaaaggttattccattccttttatgggatctgatgtgtctgttgtaaggaggactcaacgttacttgtatgaaaatttagaggaatcaccagttcagtatgctgcgtatgtaactgtgggaggcatcacctctgttattaagctgatgtttgcaggacttttctttttgttctttgtgaggtttggaattggaaggcaacttctcataaaattcccatggttcttctcctttggctatttttcaaaacaaggcccaacacaaaaacagattgatgctgcctcattcacgctgacattctttggtcaaggatacagccaaggcactggtacagataagaacaaaccaaatatcaaaatttgtactcaggtgaaaggaccagaggctggctatgtggctacccccatagctatggttcaggcagccatgactcttctaagtgatgcttctcatctgcctaaggcgggcggggtcttcacacctggagcagctttttccaaaacaaagttgattgacagactcaacaaacacggtattgagtttagtgttattagcagctctgaagtctaaacactggaagaattaactgaagtcataacgtgcgtgaattaacagcttctctatttgatatttgaaattcttctgtaagcctgtctgagtgtatgtggaaacgattgtcaaatctaaaatatctatatattaaaaagtaggaaattgtcctagcttaccctaaatttcaaatctgagttgattttgtgattttattgcttataacagagaactcatatttgacatatttttttcattgatgtgttcctggtagattttcacgaatgagctggcaggtctaatgggggaggcggcgtcccagtctgtgttgcagcagcattctcatcgggggtgcgcacaccatcgttactgtcgggcagtaactgccgcttgccttgccgcagtaggagggaaatctcaccttccttccacatactgtcttgagcctttgctaaattaaactgcactttttgctatttttgcctagtttttcgccaatctacactgattttggactgttacctaagttgaaaaataaaaggttgtcaatccaaaaaaaaaaaaaaaaaaaaaaaaaaaaactgtttggggcgcgcttgggcccttcgaaaaggctttctctagaaaccccatggcggtggggcgcgcgcggggggcccccagagtggtgtctaggtggcacacgtgtggccacaacgagcgcgtggtcccaagaggagaaaacccgcggacacaagagaaaatagggggcgtagggagtcttctctccccttatatataagaaacgcgccggggggggacaaaccccagaggacggctgtcttgagacaaaatctcctagaaagtgggcatctcccgagaggggccaatatcaacgggggcctctctaccacacgaggggggctcccaaaggacgcgcccagataattaaatttacccgct

SEQ ID NO: 321345 - DNA, 1820 bp, Homo sapiens
gcttccagcagggctagaagatgcgctgcccggggcggccagagccctgcagaacaaaccgccgcacggaattaggggccgccgtccgcgcctgccaggcttggaagcggactcgcccccagggccaccgccctaggaaacctcccgtcggaagcctcccaagcaagccgctcacccgcggctcccgcgcgaggcggcgtgggcgtgggcgcggccctggcgcggcggcgcgcgcggggtgaagggagcccggcgcgctggctgcggcgacggcggccgttgctgcgccgggtactggggtcgctgcctgaggcgcaggcgccgtggactccacccgccccggggcctgggctcgctgtggactcgtcatggcgaccgagcagaggcctttccacctggtggtgttcggcgcgtctggcttcaccggccagttcgtgaccgaggaggtggcccgggagcaggtggacccggagcggagctcccgcctgccctgggccgtggcgggccgctcccgggagaagctgcagcgggtgctggagaaggcggccctgaagctgggaagaccaacactgtcatctgaagttggaatcatcatctgtgatattgctaatccagcctcgcttgatgaaatggctaaacaggcaacagttgtcctcaattgcgtaggaccatatcggttttatggagaacctgtaataaaagcatgtattgaaaatggagccagttgtatcgacatcagtggagaacctcagtttctggaactaatgcaactgaagtatcatgagaaagctgcagacaaaggggtttatatcattggaagcagcggctttgactccattccagcagatctgggagtaatatataccagaaataaaatgaatggtactttgactgctgtggaaagtttcctgactatacattcaggacctgaggggttgagcattcatgatggtacctggaagtcagcaatttatggttttggagatcagagtaatttgagaaaactaagaaatgtatcaaatctgaaacctgtcccgctcattggtccaaaattgaagagaaggtggccaatttcttattgtcgggaactcaaaggttattccattccttttatgggatctgatgtgtctgttgtaaggaggactcaacgttacttgtatgaaaatttagaggaatcaccagttcagtatgctgcgtatgtaactgtgggaggcatcacctctgttattaagctgatgtttgcaggacttttctttttgttctttgtgaggtttggaattggaaggcaacttctcataaaattcccatggttcttctcctttggctatttttcaaaacaaggcccaacacaaaaacagattgatgctgcctcattcacgctgacattctttggtcaaggatacagccaaggcactggtacagataagaacaaaccaaatatcaaaatttgtactcaggtgaaaggaccagaggctggctatgtggctacccccatagctatggttcaggcagccatgactcttctaagtgatgcttctcatctgcctaaggcgggcggggtcttcacacctggagcagctttttccaaaacaaagttgattgacagactcaacaaacacggtattgagtttagtgttattagcagctctgaagtctaaacactggaagaattaactgaagtcataacgtgcgtgaattaacagcttctctatttgatatttgaaattcttctgtaagcctgtctgagtgtatgtggaaacgattgtcaaatctaaaatatctatatattaaaaagtaggaaattgtcctagcttacccta

SEQ ID NO: 321346 - DNA, 2055 bp, Homo sapiens
  misc_feature (17)..(17): n is a, c, g, or t
gggtcgccgctgcgaanggagccgcgccatgtctgcgcatctgcaatggatggtcgtgcggaactgctccagtttcctgatcaagaggaataagcagacctacagcactgaagaccaacactgtcatctgaagttggaatcatcatctgtgatattgctaatccagcctcgcttgatgaaatggctaaacaggcaacagttgtcctcaattgcgtaggaccatatcggttttatggagaacctgtaataaaagcatgtattgaaaatggagccagttgtatcgacatcagtggagaacctcagtttctggaactaatgcaactgaagtatcatgagaaagctgcagacaaaggggtttatatcattggaagcagcggctttgactccattccagcagatctgggagtaatatataccagaaataaaatgaatggtactttgactgctgtggaaagtttcctgactatacattcaggacctgaggggttgagcattcatgatggtacctggaagtcagcaatttatggttttggagatcagagtaatttgagaaaactaagaaatgtatcaaatctgaaacctgtcccgctcattggtccaaaattgaagagaaggtggccaatttcttattgtcgggaactcaaaggttattccattccttttatgggatctgatgtgtctgttgtaaggaggactcaacgttacttgtatgaaaatttagaggaatcaccagttcagtatgctgcgtatgtaactgtgggaggcatcacctctgttattaagctgatgtttgcaggacttttctttttgttctttgtgaggtttggaattggaaggcaacttctcataaaattcccatggttcttctcctttggctatttttcaaaacaaggcccaacacaaaaacagattgatgctgcctcattcacgctgacattctttggtcaaggatacagccaaggcactggtacagataagaacaaaccaaatatcaaaatttgtactcaggtgaaaggaccagaggctggctatgtggctacccccatagctatggttcaggcagccatgactcttctaagtgatgcttctcatctgcctaaggcgggcggggtcttcacacctggagcagctttttccaaaacaaagttgattgacagactcaacaaacacggtattgagtttagtgttattagcagctctgaagtctaaacactggaagaattaactgaagtcataacgtgcgtgaattaacagcttctctatttgatatttgaaattcttctgtaagcctgtctgagtgtatgtggaaacgattgtcaaatctaaaatatctatatattaaaaagtaggaaattgtcctagcttaccctaaatttcaaatctgagttgattttgtgattttattgcttataacagagaactcatatttgacatatttttttcattgatgtgttcctggtagattttcacgaatgagctggcaggtctaatgggggaggcggcgtcccagtctgtgttgcagcagcattctcatcgggggtgcgcacaccatcgttactgtcgggcagtaactgccgcttgccttgccgcagtaggagggaaatctcaccttccttccacatactgtcttgagcctttgctaaattaaactgcactttttgctatttttgcctagtttttcgccaatctacactgattttggactgttacctaagttgaaaaataaaaggttgtcaatcgaatggtggtttaatgtttggacctgccgatgtatttgtatagtggtagaaacatgctgcttaagtggcctaacctgtttcttgccaataagtaggcttatcattttatctttacgtaattctatatctgtgactaggtttttaaggatacagcttataagttgctatcaattttcactacctaagcagaatttttctctaatttactttttgtattttaactaggttttacatggaagccctaaaataaggcaaaagactttttcttttgtaataagcatataataaacacgtatatacatagcaaattgattca

SEQ ID NO: 321347 - DNA, 2449 bp, Homo sapiens
gcttccagcagggctagaagatgcgctgcccggggcggccagagccctgcagaacaaaccgccgcacggaattaggggccgccgtccgcgcctgccaggcttggaagcggactcgcccccagggccaccgccctaggaaacctcccgtcggaagcctcccaagcaagccgctcacccgcggctcccgcgcgaggcggcgtgggcgtgggcgcggccctggcgcggcggcgcgcgcggggtgaagggagcccggcgcgctggctgcggcgacggcggccgttgctgcgccgggtactggggtcgctgcctgaggcgcaggcgccgtggactccacccgccccggggcctgggctcgctgtggactcgtcatggcgaccgagcagaggcctttccacctggtggtgttcggcgcgtctggcttcaccggccagttcgtgaccgaggaggtggcccgggagcaggtggacccggagcggagctcccgcctgccctgggccgtggcgggccgctcccgggagaagctgcagcgggtgctggagaaggcggccctgaagctgggaagaccaacactgtcatctgaagttggaatcatcatctgtgatattgctaatccagcctcgcttgatgaaatggctaaacaggcaacagttgtcctcaattgcgtaggaccatatcggttttatggagaacctgtaataaaagcatgtattgaaaatggagccagttgtatcgacatcagtggagaacctcagtttctggaactaatgcaactgaagtatcatgagaaagctgcagacaaaggggtttatatcattggaagcagcggctttgactccattccagcagatctgggagtaatatataccagaaataaaatgaatggtactttgactgctgtggaaagtttcctgactatacattcaggacctgaggggttgagcattcatgatggtacctggaagtcagcaatttatggttttggagatcagagtaatttgagaaaactaagaaatgtatcaaatctgaaacctgtcccgctcattgttccattccttttatgggatctgatgtgtctgttgtaaggaggactcaacgttacttgtatgaaaatttagaggaatcaccagttcagtatgctgcgtatgtaactgtgggaggcatcacctctgttattaagctgatgtttgcaggacttttctttttgttctttgtgaggtttggaattggaaggcaacttctcataaaattcccatggttcttctcctttggctatttttcaaaacaaggcccaacacaaaaacagattgatgctgcctcattcacgctgacattctttggtcaaggatacagccaaggcactggtacagataagaacaaaccaaatatcaaaatttgtactcaggtgaaaggaccagaggctggctatgtggctacccccatagctatggttcaggcagccatgactcttctaagtgatgcttctcatctgcctaaggcgggcggggtcttcacacctggagcagctttttccaaaacaaagttgattgacagactcaacaaacacggtattgagtttagtgttattagcagctctgaagtctaaacactggaagaattaactgaagtcataacgtgcgtgaattaacagcttctctatttgatatttgaaattcttctgtaagcctgtctgagtgtatgtggaaacgattgtcaaatctaaaatatctatatattaaaaagtaggaaattgtcctagcttaccctaaatttcaaatctgagttgattttgtgattttattgcttataacagagaactcatatttgacatatttttttcattgatgtgttcctggtagattttcacgaatgagctggcaggtctaatgggggaggcggcgtcccagtctgtgttgcagcagcattctcatcgggggtgcgcacaccatcgttactgtcgggcagtaactgccgcttgccttgccgcagtaggagggaaatctcaccttccttccacatactgtcttgagcctttgctaaattaaactgcactttttgctatttttgcctagtttttcgccaatctacactgattttggactgttacctaagttgaaaaataaaaggttgtcaatcgaatggtggtttaatgtttggacctgccgatgtatttgtatagtggtagaaacatgctgcttaagtggcctaacctgtttcttgccaataagtaggcttatcattttatctttacgtaattctatatctgtgactaggtttttaaggatacagcttataagttgctatcaattttcactacctaagcagaatttttctctaatttactttttgtattttaactaggttttacatggaagccctaaaataaggcaaaagactttttcttttgtaataagcatataataaacacgtatatacatagcaaattgattca

SEQ ID NO: 321348 - DNA, 2437 bp, Homo sapiens
gcttccagcagggctagaagatgcgctgcccggggcggccagagccctgcagaacaaaccgccgcacggaattaggggccgccgtccgcgcctgccaggcttggaagcggactcgcccccagggccaccgccctaggaaacctcccgtcggaagcctcccaagcaagccgctcacccgcggctcccgcgcgaggcggcgtgggcgtgggcgcggccctggcgcggcggcgcgcgcggggtgaagggagcccggcgcgctggctgcggcgacggcggccgttgctgcgccgggtactggggtcgctgcctgaggcgcaggcgccgtggactccacccgccccggggcctgggctcgctgtggactcgtcatggcgaccgagcagaggcctttccacctggtggtgttcggcgcgtctggcttcaccggccagttcgtgaccgaggaggtggcccgggagcaggtggacccggagcggagctcccgcctgccctgggccgtggcgggccgctcccgggagaagctgcagcgggtgctggagaaggcggccctgaagctgggaagaccaacactgtcatctgaagttggaatcatcatctgtgatattgctaatccagcctcgcttgatgaaatggctaaacaggcaacagttgtcctcaattgcgtaggaccatatcggttttatggagaacctgtaataaaagcatgtattgaaaatggagccagttgtatcgacatcagtggagaacctcagtttctggaactaatgcaactgaagtatcatgagaaagctgcagacaaaggggtttatatcattggaagcagcggctttgactccattccagcagatctgggagtaatatataccagaaataaaatgaatggtactttgactgctgtggaaagtttcctgactatacattcaggacctgaggggttgagcattcatgatggtacctggaagtcagcaatttatggttttggagatcagagtaattgtggccaatttcttattgtcgggaactcaaaggttattccattccttttatgggatctgatgtgtctgttgtaaggaggactcaacgttacttgtatgaaaatttagaggaatcaccagttcagtatgctgcgtatgtaactgtgggaggcatcacctctgttattaagctgatgtttgcaggacttttctttttgttctttgtgaggtttggaattggaaggcaacttctcataaaattcccatggttcttctcctttggctatttttcaaaacaaggcccaacacaaaaacagattgatgctgcctcattcacgctgacattctttggtcaaggatacagccaaggcactggtacagataagaacaaaccaaatatcaaaatttgtactcaggtgaaaggaccagaggctggctatgtggctacccccatagctatggttcaggcagccatgactcttctaagtgatgcttctcatctgcctaaggcgggcggggtcttcacacctggagcagctttttccaaaacaaagttgattgacagactcaacaaacacggtattgagtttagtgttattagcagctctgaagtctaaacactggaagaattaactgaagtcataacgtgcgtgaattaacagcttctctatttgatatttgaaattcttctgtaagcctgtctgagtgtatgtggaaacgattgtcaaatctaaaatatctatatattaaaaagtaggaaattgtcctagcttaccctaaatttcaaatctgagttgattttgtgattttattgcttataacagagaactcatatttgacatatttttttcattgatgtgttcctggtagattttcacgaatgagctggcaggtctaatgggggaggcggcgtcccagtctgtgttgcagcagcattctcatcgggggtgcgcacaccatcgttactgtcgggcagtaactgccgcttgccttgccgcagtaggagggaaatctcaccttccttccacatactgtcttgagcctttgctaaattaaactgcactttttgctatttttgcctagtttttcgccaatctacactgattttggactgttacctaagttgaaaaataaaaggttgtcaatcgaatggtggtttaatgtttggacctgccgatgtatttgtatagtggtagaaacatgctgcttaagtggcctaacctgtttcttgccaataagtaggcttatcattttatctttacgtaattctatatctgtgactaggtttttaaggatacagcttataagttgctatcaattttcactacctaagcagaatttttctctaatttactttttgtattttaactaggttttacatggaagccctaaaataaggcaaaagactttttcttttgtaataagcatataataaacacgtatatacatagcaaattgattca

SEQ ID NO: 321349 - DNA, 1525 bp, Homo sapiens
ctctctctctctctctctctctctctctctctctctctctctcctgaaacctgtcccgctcattggtccaaaattgaagagaaggtggccaatttcttattgtcgggaactcaaaggttattccattccttttatgggatctgatgtgtctgttgtaaggaggactcaacgttacttgtatgaaaatttagaggaatcaccagttcagtatgctgcgtatgtaactgtgggaggcatcacctctgttattaagctgatgtttgcaggacttttctttttgttctttgtgaggtttggaattggaaggcaacttctcataaaattcccatggttcttctcctttggctatttttcaaaacaaggcccaacacaaaaacagattgatgctgcctcattcacgctgacattctttggtcaaggatacagccaaggcactggtacagataagaacaaaccaaatatcaaaatttgtactcaggtgaaaggaccagaggctggctatgtggctacccccatagctatggttcaggcagccatgactcttctaagtgatgcttctcatctgcctaaggcgggcggggtcttcacacctggagcagctttttccaaaacaaagttgattgacagactcaacaaacacggtattgagtttagtgttattagcagctctgaagtctaaacactggaagaattaactgaagtcataacgtgcgtgaattaacagcttctctatttgatatttgaaattcttctgtaagcctgtctgagtgtatgtggaaacgattgtcaaatctaaaatatctatatattaaaaagtaggaaattgtcctagcttaccctaaatttcaaatctgagttgattttgtgattttattgcttataacagagaactcatatttgacatatttttttcattgatgtgttcctggtagattttcacgaatgagctggcaggtctaatgggggaggcggcgtcccagtctgtgttgcagcagcattctcatcgggggtgcgcacaccatcgttactgtcgggcagtaactgccgcttgccttgccgcagtaggagggaaatctcaccttccttccacatactgtcttgagcctttgctaaattaaactgcactttttgctatttttgcctagtttttcgccaatctacactgattttggactgttacctaagttgaaaaataaaaggttgtcaatcgaatggtggtttaatgtttggacctgccgatgtatttgtatagtggtagaaacatgctgcttaagtggcctaacctgtttcttgccaataagtaggcttatcattttatctttacgtaattctatatctgtgactaggtttttaaggatacagcttataagttgctatcaattttcactacctaagcagaatttttctctaatttactttttgtattttaactaggttttacatggaagccctaaaataaggcaaaagactttttcttttgtaataagcatataataaacacgtatatacatagcaaattgattca

SEQ ID NO: 321350 - DNA, 1490 bp, Homo sapiens
caccaggatgatgagtttagtcctggaatagatgtcgtacaagtcgggtggtgaactgcactgaacatgcctggagtgatgttaggaagacagcaagctgaaaattagcattccagaagggataaagccatctgcatacaatattagaaaatttagaggaatcaccagttcagtatgctgcgtatgtaactgtgggaggcatcacctctgttattaagctgatgtttgcaggacttttctttttgttctttgtgaggtttggaattggaaggcaacttctcataaaattcccatggttcttctcctttggctatttttcaaaacaaggcccaacacaaaaacagattgatgctgcctcattcacgctgacattctttggtcaaggatacagccaaggcactggtacagataagaacaaaccaaatatcaaaatttgtactcaggtgaaaggaccagaggctggctatgtggctacccccatagctatggttcaggcagccatgactcttctaagtgatgcttctcatctgcctaaggcgggcggggtcttcacacctggagcagctttttccaaaacaaagttgattgacagactcaacaaacacggtattgagtttagtgttattagcagctctgaagtctaaacactggaagaattaactgaagtcataacgtgcgtgaattaacagcttctctatttgatatttgaaattcttctgtaagcctgtctgagtgtatgtggaaacgattgtcaaatctaaaatatctatatattaaaaagtaggaaattgtcctagcttaccctaaatttcaaatctgagttgattttgtgattttattgcttataacagagaactcatatttgacatatttttttcattgatgtgttcctggtagattttcacgaatgagctggcaggtctaatgggggaggcggcgtcccagtctgtgttgcagcagcattctcatcgggggtgcgcacaccatcgttactgtcgggcagtaactgccgcttgccttgccgcagtaggagggaaatctcaccttccttccacatactgtcttgagcctttgctaaattaaactgcactttttgctatttttgcctagtttttcgccaatctacactgattttggactgttacctaagttgaaaaataaaaggttgtcaatcgaatggtggtttaatgtttggacctgccgatgtatttgtatagtggtagaaacatgctgcttaagtggcctaacctgtttcttgccaataagtaggcttatcattttatctttacgtaattctatatctgtgactaggtttttaaggatacagcttataagttgctatcaattttcactacctaagcagaatttttctctaatttactttttgtattttaactaggttttacatggaagccctaaaataaggcaaaagactttttcttttgtaataagcatataataaacacgtatatacatagcaaattgattca

SEQ ID NO: 321351 - DNA, 905 bp, Homo sapiens
  misc_feature (7)..(7): n is a, c, g, or t
ccctttnaggggaagaaaaaaggggggggcccccccccccaaaaaaaaagaaaaattttcggggcccgaaggatttaaggttcataacgtgcgtgaattaacagcttctctatttgatatttgaaattcttctgtaagcctgtctgagtgtatgtggaaacgattgtcaaatctaaaatatctatatattaaaaagtaggaaattgtcctagcttaccctaaatttcaaatctgagttgattttgtgattttattgcttataacagagaactcatatttgacatatttttttcattgatgtgttcctggtagattttcacgaatgagctggcaggtctaatgggggaggcggcgtcccagtctgtgttgcagcagcattctcatcgggggtgcgcacaccatcgttactgtcgggcagtaactgccgcttgccttgccgcagtaggagggaaatctcaccttccttccacatactgtcttgagcctttgctaaattaaactgcactttttgctatttttgcctagtttttcgccaatctacactgattttggactgttacctaagttgaaaaataaaaggttgtcaatcgaatggtggtttaatgtttggacctgccgatgtatttgtatagtggtagaaacatgctgcttaagtggcctaacctgtttcttgccaataagtaggcttatcattttatctttacgtaattctatatctgtgactaggtttttaaggatacagcttataagttgctatcaattttcactacctaagcagaatttttctctaatttactttttgtattttaactaggttttacatggaagccctaaaataaggcaaaagactttttcttttgtaataagcatataataaacacgtatatacatagcaaattgattca

SEQ ID NO: 321352 - DNA, 1057 bp, Homo sapiens
gcttccagcagggctagaagatgcgctgcccggggcggccagagccctgcagaacaaaccgccgcacggaattaggggccgccgtccgcgcctgccaggcttggaagcggactcgcccccagggccaccgccctaggaaacctcccgtcggaagcctcccaagcaagccgctcacccgcggctcccgcgcgaggcggcgtgggcgtgggcgcggccctggcgcggcggcgcgcgcggggtgaagggagcccggcgcgctggctgcggcgacggcggccgttgctgcgccgggtactggggtcgctgcctgaggcgcaggcgccgtggactccacccgccccggggcctgggctcgctgtggactcgtcatggcgaccgagcagaggcctttccacctggtggtgttcggcgcgtctggcttcaccggccagttcgtgaccgaggaggtggcccgggagcaggtggacccggagcggagctcccgcctgccctgggccgtggcgggccgctcccgggagaagctgcagcgggtgctggagaaggcggccctgaagctgggaagaccaacactgtcatctgaagttggaatcatcatctgtgatattgctaatccagcctcgcttgatgaaatggctaaacaggcaacagttgtcctcaattgcgtaggaccagtaagtaatcaacccttctttgtatcagaacaaacaatccattcatttctagcaaaatattccagaggaacataaggacagaggacagaattgttggttgaaggccttaaccccatatggggagttttttcttcttgcgaggagcagctggagatgaccaaagtctcctgagagagtgagtgacaggctctccatgacgttctccttagggcatgtgtgctggcttgttgattggttacatctgtgattgtcagaattttctttcctttttactatataccccttcggtaaaaaatgtttgagtgtgtctccctagtatattttttatttataaattatattcttgtactactgggtaaatatattttttaaatgcacaaaaagaa

SEQ ID NO: 321353 - DNA, 1104 bp, Homo sapiens
  misc_feature (1041)..(1041): n is a, c, g, or t
gcttccagcagggctagaagatgcgctgcccggggcggccagagccctgcagaacaaaccgccgcacggaattaggggccgccgtccgcgcctgccaggcttggaagcggactcgcccccagggccaccgccctaggaaacctcccgtcggaagcctcccaagcaagccgctcacccgcggctcccgcgcgaggcggcgtgggcgtgggcgcggccctggcgcggcggcgcgcgcggggtgaagggagcccggcgcgctggctgcggcgacggcggccgttgctgcgccgggtactggggtcgctgcctgaggcgcaggcgccgtggactccacccgccccggggcctgggctcgctgtggactcgtcatggcgaccgagcagaggcctttccacctggtggtgttcggcgcgtctggcttcaccggccagttcgtgaccgaggaggtggcccgggagcaggtggacccggagcggagctcccgcctgccctgggccgtggcgggccgctcccgggagaagctgcagcgggtgctggagaaggcggccctgaagctgggaagaccaacactgtcatctgaagttggaatcatcatctgtgatattgctaatccagcctcgcttgatgaaatggctaaacaggcaacagttgtcctcaattgcgtaggaccatatcggttttatggagaacctgtaataaaagcatgtattgaaaatggagccagttgtatcgacatcagtggagaacctcagtttctggaactaatgcaactgaagtatcatgagaaagctgcagacaaaggggtttatatcattggaagcagcggctttgactccattccagcagatctgggagtaatatataccagaaataaaatgaatggtactttgactgctgtggaaagtttcctgactatacattcaggacctgaggggttgagcattcatgatggtacctggaagtcagcaatttatggttttggagatcagagtaattgagagggtgcccaattcttattgtcgggactcaaaggtatattanaggatcccattcatatgctcgatgtactggggaggcttacttgtataagctgagtgcggactt

SEQ ID NO: 321354 - DNA, 2221 bp, Homo sapiens
gcttccagcagggctagaagatgcgctgcccggggcggccagagccctgcagaacaaaccgccgcacggaattaggggccgccgtccgcgcctgccaggcttggaagcggactcgcccccagggccaccgccctaggaaacctcccgtcggaagcctcccaagcaagccgctcacccgcggctcccgcgcgaggcggcgtgggcgtgggcgcggccctggcgcggcggcgcgcgcggggtgaagggagcccggcgcgctggctgcggcgacggcggccgttgctgcgccgggtactggggtcgctgcctgaggcgcaggcgccgtggactccacccgccccggggcctgggctcgctgtggactcgtcatggcgaccgagcagaggcctttccacctggtggtgttcggcgcgtctggcttcaccggccagttcgtgaccgaggaggtggcccgggagcaggtggacccggagcggagctcccgcctgccctgggccgtggcgggccgctcccgggagaagctgcagcgggtgctggagaaggcggccctgaagctgggaagaccaacactgtcatctgaagttggaatcatcatctgtgatattgctaatccagcctcgcttgatgaaatggctaaacaggcaacagttgtcctcaattgcgtaggaccatatcggttttatggagaacctgtaataaaagcatgtattgaaaatggagccagttgtatcgacatcagtggagaacctcagtttctggaactaatgcaactgaagtatcatgagaaagctgcagacaaaggggtttatatcattggaagcagcggctttgactccattccagcagatctgggagtaatatataccagaaataaaatgaatggtactttgactgctgtggaaagtttcctgactatacattcaggacctgaggggttgagcattcatgatggtacctggaagtcagcaatttatggttttggagatcagagtaatttgagaaaactaagaaatgtatcaaatctgaaacctgtcccgctcattggtccaaaattgaagagaaggtggccaatttcttattgtcgggaactcaaaggttattccattccttttatgggatctgatgtgtctgttgtaaggaggactcaacgttacttgtatgaaaatttagaggaatcaccagttcagtatgctgcgtatgtaactgtgggaggcatcacctctgttattaagctgatgtttgcaggacttttctttttgttctttgtgaggtttggaattggaaggcaacttctcataaaattcccatggttcttctcctttggctatttttcaaaacaaggcccaacacaaaaacagattgatgctgcctcattcacgctgacattctttggtcaaggatacagccaaggcactggtacagataagaacaaaccaaatatcaaaatttgtactcaggtgaaaggaccagaggctggctatgtggctacccccatagctatggttcaggcagccatgactcttctaagtgatgcttctcatctgcctaaggcgggcggggtcttcacacctggagcagctttttccaaaacaaagttgattgacagactcaacaaacacggtattgagtttagtgttattagcagctctgaagtctaaacactggaagaattaactgaagtcataacgtgcgtgaattaacagcttctctatttgatatttgaaattcttctgtaagcctgtctgagtgtatgtggaaacgattgtcaaatctaaaatatctatatattaaaaagtaggaaattgtcctagcttaccctaaatttcaaatctgagttgattttgtgattttattgcttataacagagaactcatatttgacatatttttttcattgatgtgttcctggtagattttcacgaatgagctggcaggtctaatgggggaggcggcgtcccagtctgtgttgcagcagcattctcatcgggggtgcgcacaccatcgttactgtcgggcagtaactgccgcttgccttgccgcagtaggagggaaatctcaccttccttccacatactgtcttgagcctttgctaaattaaactgcactttttgctatttttgcctagtttttcgccaatctacactgattttggactgttacctaagaaaaaaaactggggagcggcaggtttcccttgcggttgtgatctttattcccatcct

SEQ ID NO: 321355 - DNA, 2450 bp, Homo sapiens
gcttccagcagggctagaagatgcgctgcccggggcggccagagccctgcagaacaaaccgccgcacggaattaggggccgccgtccgcgcctgccaggcttggaagcggactcgcccccagggccaccgccctaggaaacctcccgtcggaagcctcccaagcaagccgctcacccgcggctcccgcgcgaggcggcgtgggcgtgggcgcggccctggcgcggcggcgcgcgcggggtgaagggagcccggcgcgctggctgcggcgacggcggccgttgctgcgccgggtactggggtcgctgcctgaggcgcaggcgccgtggactccacccgccccggggcctgggctcgctgtggactcgtcatggcgaccgagcagaggcctttccacctggtggtgttcggcgcgtctggcttcaccggccagttcgtgaccgaggaggtggcccgggagcaggtggacccggagcggagctcccgcctgccctgggccgtggcgggccgctcccgggagaagctgcagcgggtgctggagaaggcggccctgaagctgggaagaccaacactgtcatctgaagttggaatcatcatctgtgatattgctaatccagcctcgcttgatgaaatggctaaacaggcaacagttgtcctcaattgcgtaggaccatatcggttttatggagaacctgtaataaaagcatgtattgaaaatggagccagttgtatcgacatcagtggagaacctcagtttctggaactaatgcaactgaagtatcatgagaaagctgcagacaaaggggtttatatcattggaagcagcggctttgactccattccagcagatctgggagtaatatataccagaaataaaatgaatggtactttgactgctgtggaaagtttcctgactatacattcaggacctgaggggttgagcattcatgatggtacctggaagtcagcaatttatggttttggagatcagagtaatttgagaaaactaagaaatgtatcaaatctgaaacctgtcccgctcattggtccaaaattgaagagaaggtggccaatttcttattgtcgggaactcaaaggttattccattccttttatgggatctgatgtgtctgttgtaaggaggactcaacgttacttgtatgaaaatttagaggaatcaccagttcagtatgctgcgtatgtaactgtgggaggcatcacctctgttattaagctgatgtttgcaggacttttctttttgttctttgtgaggtttggaattggaaggcaacttctcataaaattcccatggttcttctcctttggctatttttcaaaacaaggcccaacacaaaaacagattgatgctgcctcattcacgctgacattctttggtcaaggatacagccaaggcactgaggctggctatgtggctacccccatagctatggttcaggcagccatgactcttctaagtgatgcttctcatctgcctaaggcgggcggggtcttcacacctggagcagctttttccaaaacaaagttgattgacagactcaacaaacacggtattgagtttagtgttattagcagctctgaagtctaaacactggaagaattaactgaagtcataacgtgcgtgaattaacagcttctctatttgatatttgaaattcttctgtaagcctgtctgagtgtatgtggaaacgattgtcaaatctaaaatatctatatattaaaaagtaggaaattgtcctagcttaccctaaatttcaaatctgagttgattttgtgattttattgcttataacagagaactcatatttgacatatttttttcattgatgtgttcctggtagattttcacgaatgagctggcaggtctaatgggggaggcggcgtcccagtctgtgttgcagcagcattctcatcgggggtgcgcacaccatcgttactgtcgggcagtaactgccgcttgccttgccgcagtaggagggaaatctcaccttccttccacatactgtcttgagcctttgctaaattaaactgcactttttgctatttttgcctagtttttcgccaatctacactgattttggactgttacctaagttgaaaaataaaaggttgtcaatcgaatggtggtttaatgtttggacctgccgatgtatttgtatagtggtagaaacatgctgcttaagtggcctaacctgtttcttgccaataagtaggcttatcattttatctttacgtaattctatatctgtgactaggtttttaaggatacagcttataagttgctatcaattttcactacctaagcagaatttttctctaatttactttttgtattttaactaggttttacatggaagccctaaaataaggcaaaagactttttcttttgtaataagcatataataaacacgtatatacatagcaaattgattca

SEQ ID NO: 321356 - DNA, 2423 bp, Homo sapiens
gcttccagcagggctagaagatgcgctgcccggggcggccagagccctgcagaacaaaccgccgcacggaattaggggccgccgtccgcgcctgccaggcttggaagcggactcgcccccagggccaccgccctaggaaacctcccgtcggaagcctcccaagcaagccgctcacccgcggctcccgcgcgaggcggcgtgggcgtgggcgcggccctggcgcggcggcgcgcgcggggtgaagggagcccggcgcgctggctgcggcgacggcggccgttgctgcgccgggtactggggtcgctgcctgaggcgcaggcgccgtggactccacccgccccggggcctgggctcgctgtggactcgtcatggcgaccgagcagaggcctttccacctggtggtgttcggcgcgtctggcttcaccggccagttcgtgaccgaggaggtggcccgggagcaggtggacccggagcggagctcccgcctgccctgggccgtggcgggccgctcccgggagaagctgcagcgggtgctggagaaggcggccctgaagctgggaagaccaacactgtcatctgaagttggaatcatcatctgtgatattgctaatccagcctcgcttgatgaaatggctaaacaggcaacagttgtcctcaattgcgtaggaccatttctggaactaatgcaactgaagtatcatgagaaagctgcagacaaaggggtttatatcattggaagcagcggctttgactccattccagcagatctgggagtaatatataccagaaataaaatgaatggtactttgactgctgtggaaagtttcctgactatacattcaggacctgaggggttgagcattcatgatggtacctggaagtcagcaatttatggttttggagatcagagtaatttgagaaaactaagaaatgtatcaaatctgaaacctgtcccgctcattggtccaaaattgaagagaaggtggccaatttcttattgtcgggaactcaaaggttattccattccttttatgggatctgatgtgtctgttgtaaggaggactcaacgttacttgtatgaaaatttagaggaatcaccagttcagtatgctgcgtatgtaactgtgggaggcatcacctctgttattaagctgatgtttgcaggacttttctttttgttctttgtgaggtttggaattggaaggcaacttctcataaaattcccatggttcttctcctttggctatttttcaaaacaaggcccaacacaaaaacagattgatgctgcctcattcacgctgacattctttggtcaaggatacagccaaggcactggtacagataagaacaaaccaaatatcaaaatttgtactcaggtgaaaggaccagaggctggctatgtggctacccccatagctatggttcaggcagccatgactcttctaagtgatgcttctcatctgcctaaggcgggcggggtcttcacacctggagcagctttttccaaaacaaagttgattgacagactcaacaaacacggtattgagtttagtgttattagcagctctgaagtctaaacactggaagaattaactgaagtcataacgtgcgtgaattaacagcttctctatttgatatttgaaattcttctgtaagcctgtctgagtgtatgtggaaacgattgtcaaatctaaaatatctatatattaaaaagtaggaaattgtcctagcttaccctaaatttcaaatctgagttgattttgtgattttattgcttataacagagaactcatatttgacatatttttttcattgatgtgttcctggtagattttcacgaatgagctggcaggtctaatgggggaggcggcgtcccagtctgtgttgcagcagcattctcatcgggggtgcgcacaccatcgttactgtcgggcagtaactgccgcttgccttgccgcagtaggagggaaatctcaccttccttccacatactgtcttgagcctttgctaaattaaactgcactttttgctatttttgcctagtttttcgccaatctacactgattttggactgttacctaagttgaaaaataaaaggttgtcaatcgaatggtggtttaatgtttggacctgccgatgtatttgtatagtggtagaaacatgctgcttaagtggcctaacctgtttcttgccaataagtaggcttatcattttatctttacgtaattctatatctgtgactaggtttttaaggatacagcttataagttgctatcaattttcactacctaagcagaatttttctctaatttactttttgtattttaactaggttttacatggaagccctaaaataaggcaaaagactttttcttttgtaataagcatataataaacacgtatatacatagcaaattgattca

SEQ ID NO: 321357 - DNA, 2454 bp, Homo sapiens
gcttccagcagggctagaagatgcgctgcccggggcggccagagccctgcagaacaaaccgccgcacggaattaggggccgccgtccgcgcctgccaggcttggaagcggactcgcccccagggccaccgccctaggaaacctcccgtcggaagcctcccaagcaagccgctcacccgcggctcccgcgcgaggcggcgtgggcgtgggcgcggccctggcgcggcggcgcgcgcggggtgaagggagcccggcgcgctggctgcggcgacggcggccgttgctgcgccgggtactggggtcgctgcctgaggcgcaggcgccgtggactccacccgccccggggcctgggctcgctgtggactcgtcatggcgaccgagcagaggcctttccacctggtggtgttcggcgcgtctggcttcaccggccagttcgtgaccgaggaggtggcccgggagcaggtggacccggagcggagctcccgcctgccctgggccgtggcgggccgctcccgggagaagctgcagcgggtgctggagaaggcggccctgaagctgggaagaccaacactgtcatctgaagttggaatcatcatctgtgatattgctaatccagcctcgcttgatgaaatggctaaacaggcaacagttgtcctcaattgcgtaggaccatatcggttttatggagaacctgtaataaaagcatgtattgaaaatggagccagttgtatcgacatcagtggagaacctcagtttctggaactaatgcaactgaagtatcatgagaaagctgcagacaaaggggtttatatcattggaagcagcggctttgactccattccagcagatctgggagtaatatataccagaaataaaatgaatggggttgagcattcatgatggtacctggaagtcagcaatttatggttttggagatcagagtaatttgagaaaactaagaaatgtatcaaatctgaaacctgtcccgctcattggtccaaaattgaagagaaggtggccaatttcttattgtcgggaactcaaaggttattccattccttttatgggatctgatgtgtctgttgtaaggaggactcaacgttacttgtatgaaaatttagaggaatcaccagttcagtatgctgcgtatgtaactgtgggaggcatcacctctgttattaagctgatgtttgcaggacttttctttttgttctttgtgaggtttggaattggaaggcaacttctcataaaattcccatggttcttctcctttggctatttttcaaaacaaggcccaacacaaaaacagattgatgctgcctcattcacgctgacattctttggtcaaggatacagccaaggcactggtacagataagaacaaaccaaatatcaaaatttgtactcaggtgaaaggaccagaggctggctatgtggctacccccatagctatggttcaggcagccatgactcttctaagtgatgcttctcatctgcctaaggcgggcggggtcttcacacctggagcagctttttccaaaacaaagttgattgacagactcaacaaacacggtattgagtttagtgttattagcagctctgaagtctaaacactggaagaattaactgaagtcataacgtgcgtgaattaacagcttctctatttgatatttgaaattcttctgtaagcctgtctgagtgtatgtggaaacgattgtcaaatctaaaatatctatatattaaaaagtaggaaattgtcctagcttaccctaaatttcaaatctgagttgattttgtgattttattgcttataacagagaactcatatttgacatatttttttcattgatgtgttcctggtagattttcacgaatgagctggcaggtctaatgggggaggcggcgtcccagtctgtgttgcagcagcattctcatcgggggtgcgcacaccatcgttactgtcgggcagtaactgccgcttgccttgccgcagtaggagggaaatctcaccttccttccacatactgtcttgagcctttgctaaattaaactgcactttttgctatttttgcctagtttttcgccaatctacactgattttggactgttacctaagttgaaaaataaaaggttgtcaatcgaatggtggtttaatgtttggacctgccgatgtatttgtatagtggtagaaacatgctgcttaagtggcctaacctgtttcttgccaataagtaggcttatcattttatctttacgtaattctatatctgtgactaggtttttaaggatacagcttataagttgctatcaattttcactacctaagcagaatttttctctaatttactttttgtattttaactaggttttacatggaagccctaaaataaggcaaaagactttttcttttgtaataagcatataataaacacgtatatacatagcaaattgattca

SEQ ID NO: 321358 - DNA, 1349 bp, Homo sapiens
ctaactttgtcttctccatcatctaggttcagtatgctgcgtatgtaactgtgggaggcatcacctctgttattaagctgatgtttgcaggacttttctttttgttctttgtgaggtttggaattggaaggcaacttctcataaaattcccatggttcttctcctttggctatttttcaaaacaaggcccaacacaaaaacagattgatgctgcctcattcacgctgacattctttggtcaaggatacagccaaggcactggtacagataagaacaaaccaaatatcaaaatttgtactcaggtgaaaggaccagaggctggctatgtggctacccccatagctatggttcaggcagccatgactcttctaagtgatgcttctcatctgcctaaggcgggcggggtcttcacacctggagcagctttttccaaaacaaagttgattgacagactcaacaaacacggtattgagtttagtgttattagcagctctgaagtctaaacactggaagaattaactgaagtcataacgtgcgtgaattaacagcttctctatttgatatttgaaattcttctgtaagcctgtctgagtgtatgtggaaacgattgtcaaatctaaaatatctatatattaaaaagtaggaaattgtcctagcttaccctaaatttcaaatctgagttgattttgtgattttattgcttataacagagaactcatatttgacatatttttttcattgatgtgttcctggtagattttcacgaatgagctggcaggtctaatgggggaggcggcgtcccagtctgtgttgcagcagcattctcatcgggggtgcgcacaccatcgttactgtcgggcagtaactgccgcttgccttgccgcagtaggagggaaatctcaccttccttccacatactgtcttgagcctttgctaaattaaactgcactttttgctatttttgcctagtttttcgccaatctacactgattttggactgttacctaagttgaaaaataaaaggttgtcaatcgaatggtggtttaatgtttggacctgccgatgtatttgtatagtggtagaaacatgctgcttaagtggcctaacctgtttcttgccaataagtaggcttatcattttatctttacgtaattctatatctgtgactaggtttttaaggatacagcttataagttgctatcaattttcactacctaagcagaatttttctctaatttactttttgtattttaactaggttttacatggaagccctaaaataaggcaaaagactttttcttttgtaataagcatataataaacacgtatatacatagcaaattgattca

SEQ ID NO: 321359 - DNA, 1182 bp, Homo sapiens
acttagaggatcccgttatcgccaacacaaaaacagattgatgctgcctcattcacgctgacattctttggtcaaggatacagccaaggcactggtacagataagaacaaaccaaatatcaaaatttgtactcaggtgaaaggaccagaggctggctatgtggctacccccatagctatggttcaggcagccatgactcttctaagtgatgcttctcatctgcctaaggcgggcggggtcttcacacctggagcagctttttccaaaacaaagttgattgacagactcaacaaacacggtattgagtttagtgttattagcagctctgaagtctaaacactggaagaattaactgaagtcataacgtgcgtgaattaacagcttctctatttgatatttgaaattcttctgtaagcctgtctgagtgtatgtggaaacgattgtcaaatctaaaatatctatatattaaaaagtaggaaattgtcctagcttaccctaaatttcaaatctgagttgattttgtgattttattgcttataacagagaactcatatttgacatatttttttcattgatgtgttcctggtagattttcacgaatgagctggcaggtctaatgggggaggcggcgtcccagtctgtgttgcagcagcattctcatcgggggtgcgcacaccatcgttactgtcgggcagtaactgccgcttgccttgccgcagtaggagggaaatctcaccttccttccacatactgtcttgagcctttgctaaattaaactgcactttttgctatttttgcctagtttttcgccaatctacactgattttggactgttacctaagttgaaaaataaaaggttgtcaatcgaatggtggtttaatgtttggacctgccgatgtatttgtatagtggtagaaacatgctgcttaagtggcctaacctgtttcttgccaataagtaggcttatcattttatctttacgtaattctatatctgtgactaggtttttaaggatacagcttataagttgctatcaattttcactacctaagcagaatttttctctaatttactttttgtattttaactaggttttacatggaagccctaaaataaggcaaaagactttttcttttgtaataagcatataataaacacgtatatacatagcaaattgattca

SEQ ID NO: 321360 - DNA, 1147 bp, Homo sapiens
gccatttctacagaaagttaaaatttagctgggcatgctggcacatccctatagtcccagctacttgagaggctgagttgggaggatcccttgaggtcatgagttggagtctacagtgagctgtgattacagtgtgagtctacactgcactccagtctgggtgaaagagatcctgtctctcaaaaaacaagtgattctcctgggaagagatttgtttaaaaagtctgcacctctattgatgataactttgaatgtaaatggattaaattctcccacttaaaagatatagattgactgaatggattaaaaaccaccatcatgactcgactgtatgctgcctacaagaaacctcacctgtaaagacaggccaaaagtgaaggtatggagaaagatattgcatacaaatggaagccaaaaaagagcagaaataactatacttacatgagataaaatagactttaagtcaaaaactgtaaaaagaaaagtcattatgtaatgaaacaaggatcaattcatgcaagatataatcatatttttttattaagaaaatttttttgtagagatggggttatgctatgttgcctggctagtctcaaactctgggtctcaaagcagtcctcctgctttggcctcctaaggtgctgggattataggcatgagccactgtgccaggcctgaggatattatcattataaatatatatgtaccccacactggatgacccagatataaagcaaatattattagatttaaagggagaaatagactctaatacaatagtagttgaggacttcactctactctcagcattggacagattttctagacataaaaccaataaatattggatttaaattgcactttacaccaaatggacctgacatttacagaacattctaataggtgcagaacactctaatagctgcagaacacacgttcttttcatcagcacatggaacattcaccagactagttctggaacccacttcctgccttagtgttctttccaccacagtgcatgataattccgacagaacgccttttatttgtaccttattagttgtagggggaaagctttttcatgtacaaaaatgctgtaattttctgatttaataaagtaattccactgatgtttttatttacttct

SEQ ID NO: 321361 - DNA, 4107 bp, Homo sapiens
ccgaagggcgtccacagcgactcctgctatgcagggcagctgctgccagggccgggcccgggaccccacggaggcggggagaccactcttctcccacacgagcccagctctcccttcgagtagcaaccgccttcaagctcacaagcacccgtgggcctggggtgtgcctgcgtctagctggttgcacactgggccacagaggatccagcaaggatgaagaaatggagcagcacagacttgggggcagctgcggacccactccaaaaggacacctgcccagaccccctggatggagaccctaactccaggccacctccagccaagccccagctctccacggccaagagccgcacccggctctttgggaagggtgactcggaggaggctttcccggtggattgccctcacgaggaaggtgagctggactcctgcccgaccatcacagtcagccctgttatcaccatccagaggccaggagacggccccaccggtgccaggctgctgtcccaggactctgtcgccgccagcaccgagaagaccctcaggctctatgatcgcaggagtatctttgaagccgttgctcagaataactgccaggatctggagagcctgctgctcttcctgcagaagagcaagaagcacctcacagacaacgagttcaaagaccctgagacagggaagacctgtctgctgaaagccatgctcaacctgcacgacggacagaacaccaccatccccctgctcctggagatcgcgcggcaaacggacagcctgaaggagcttgtcaacgccagctacacggacagctactacaagggccagacagcactgcacatcgccatcgagagacgcaacatggccctggtgaccctcctggtggagaacggagcagacgtccaggctgcggcccatggggacttctttaagaaaaccaaagggcggcctggattctacttcggtgaactgcccctgtccctggccgcgtgcaccaaccagctgggcatcgtgaagttcctgctgcagaactcctggcagacggccgacatcagcgccagggactcggtgggcaacacggtgctgcacgccctggtggaggtggccgacaacacggccgacaacacgaagtttgtgacgagcatgtacaatgagattctgatcctgggggccaaactgcacccgacgctgaagctggaggagctcaccaacaagaagggaatgacgccgctggctctggcagctgggaccgggaagatcggggtcttggcctatattctccagcgggagatccaggagcccgagtgcaggcacctgtccaggaagttcaccgagtgggcctacgggcccgtgcactcctcgctgtacgacctgtcctgcatcgacacctgcgagaagaactcggtgctggaggtgatcgcctacagcagcagcgagacccctaatcgccacgacatgctcttggtggagccgctgaaccgactcctgcaggacaagtgggacagattcgtcaagcgcatcttctacttcaacttcctggtctactgcctgtacatgatcatcttcaccatggctgcctactacaggcccgtggatggcttgcctccctttaagatggaaaaaattggagactatttccgagttactggagagatcctgtctgtgttaggaggagtctacttctttttccgagggattcagtatttcctgcagaggcggccgtcgatgaagaccctgtttgtggacagctacagtgagatgcttttctttctgcagtcactgttcatgctggccaccgtggtgctgtacttcagccacctcaaggagtatgtggcttccatggtattctccctggccttgggctggaccaacatgctctactacacccgcggtttccagcagatgggcatctatgccgtcatgatagagaagatgatcctgagagacctgtgccgtttcatgtttgtctacatcgtcttcttgttcgggttttccacagcggtggtgacgctgattgaagacgggaagaatgactccctgccgtctgagtccacgtcgcacaggtggcgggggcctgcctgcaggccccccgatagctcctacaacagcctgtactccacctgcctggagctgttcaagttcaccatcggcatgggcgacctggagttcactgagaactatgacttcaaggctgtcttcatcatcctgctgctggcctatgtaattctcacctacatcctcctgctcaacatgctcatcgccctcatgggtgagactgtcaacaagatcgcacaggagagcaagaacatctggaagctgcagagagccatcaccatcctggacacggagaagagcttccttaagtgcatgaggaaggccttccgctcaggcaagctgctgcaggtggggtacacacctgatggcaaggacgactaccggtggtgcttcagggtggacgaggtgaactggaccacctggaacaccaacgtgggcatcatcaacgaagacccgggcaactgtgagggcgtcaagcgcaccctgagcttctccctgcggtcaagcagagtttcaggcagacactggaagaactttgccctggtcccccttttaagagaggcaagtgctcgagataggcagtctgctcagcccgaggaagtttatctgcgacagttttcagggtctctgaagccagaggacgctgaggtcttcaagagtcctgccgcttccggggagaagtgaggacgtcacgcagacagcactgtcaacactgggccttaggagaccccgttgccacggggggctgctgagggaacaccagtgctctgtcagcagcctggcctggtctgtgcctgcccagcatgttcccaaatctgtgctggacaagctgtgggaagcgttcttggaagcatggggagtgatgtacatccaaccgtcactgtccccaagtgaatctcctaacagactttcaggtttttactcactttactaaacagtgtggatggtcagtctctactgggacatgttaggcccttgttttctttgattttattcttttttttgagacagaatttcactcttctcacccaggctggaatgcagtggcacaattttggctccctgcaacctccgcctcctggattccagcaattctcctgcctcggcttcccaagtagctgggattacaggcacgtgccaccatgtctggctaattttttgtatttttttaatagatatggggtttcgccatgttggccaggctggtctcgaactcctgacctcaggtgatccgcccacctcggcctcccaaagtgctgggattacaggtgtgagcctccacacctggctgttttctttgattttattctttttttttttttctgtgagacagagtttcactcttgttgcccaggctggagtgcagtggtgtgatcttggctcactgcaacctctgcctcccgggttcaagcgattcttctgcttcagtctcccaagtagcttggattacaggtgagcactaccacgcccggctaatttttgtatttttaatagagacggggtttcaccatgttggccaggctggtctcgaactcttgacctcaggtgatctgcccgccttggcctcccaaagtgctgggattacaggtgtgagccgctgcgctcggccttctttgattttatattattaggagcaaaagtaaatgaagcccaggaaaacacctttgggaacaaactcttcctttgatggaaaatgcagaggcccttcctctctgtgccgtgcttgctcctcttacctgcccgggtggtttgggggtgttggtgtttcctccctggagaagatgggggaggctgtcccactcccagctctggcagaatcaagctgttgcagcagtgccttcttcatccttccttacgatcaatcacagtctccagaagatcagctcaattgctgtgcaggttaaaactacagaaccacatcccaaaggtacctggtaagaatgtttgaaagatcttccatttctaggaaccccagtcctgcttctccgcaatggcacatgcttccactccatccatactggcatcctcaaataaacagatatgtatacatataaatcg

SEQ ID NO: 321362 - DNA, 4292 bp, Homo sapiens
agttcccctgatcactgtagaatgttttgtggtgacaggtgcatcaccacgggcttaggtgcagggtacactccaggcctggcagtggagggctgtcctgaccctgttccccggcccagcccagggcacatgacccctcagttcctgtcccaccccgttccctggaagaagcttggtttccagtagggaatcaggtgcagagtgtgcagtatagattcagcgtttgtcgactgactgaatgatagcacaatccaggctgcttcctgttggctgggtttggttggactgggacccgtcagaggaaaaggcaacgccgctgacaaagaacattgccgaaaggttcatgggaggctccggcttaacaggttgcacactgggccacagaggatccagcaaggatgaagaaatggagcagcacagacttgggggcagctgcggacccactccaaaaggacacctgcccagaccccctggatggagaccctaactccaggccacctccagccaagccccagctctccacggccaagagccgcacccggctctttgggaagggtgactcggaggaggctttcccggtggattgccctcacgaggaaggtgagctggactcctgcccgaccatcacagtcagccctgttatcaccatccagaggccaggagacggccccaccggtgccaggctgctgtcccaggactctgtcgccgccagcaccgagaagaccctcaggctctatgatcgcaggagtatctttgaagccgttgctcagaataactgccaggatctggagagcctgctgctcttcctgcagaagagcaagaagcacctcacagacaacgagttcaaagaccctgagacagggaagacctgtctgctgaaagccatgctcaacctgcacgacggacagaacaccaccatccccctgctcctggagatcgcgcggcaaacggacagcctgaaggagcttgtcaacgccagctacacggacagctactacaagggccagacagcactgcacatcgccatcgagagacgcaacatggccctggtgaccctcctggtggagaacggagcagacgtccaggctgcggcccatggggacttctttaagaaaaccaaagggcggcctggattctacttcggtgaactgcccctgtccctggccgcgtgcaccaaccagctgggcatcgtgaagttcctgctgcagaactcctggcagacggccgacatcagcgccagggactcggtgggcaacacggtgctgcacgccctggtggaggtggccgacaacacggccgacaacacgaagtttgtgacgagcatgtacaatgagattctgatcctgggggccaaactgcacccgacgctgaagctggaggagctcaccaacaagaagggaatgacgccgctggctctggcagctgggaccgggaagatcggggtcttggcctatattctccagcgggagatccaggagcccgagtgcaggcacctgtccaggaagttcaccgagtgggcctacgggcccgtgcactcctcgctgtacgacctgtcctgcatcgacacctgcgagaagaactcggtgctggaggtgatcgcctacagcagcagcgagacccctaatcgccacgacatgctcttggtggagccgctgaaccgactcctgcaggacaagtgggacagattcgtcaagcgcatcttctacttcaacttcctggtctactgcctgtacatgatcatcttcaccatggctgcctactacaggcccgtggatggcttgcctccctttaagatggaaaaaattggagactatttccgagttactggagagatcctgtctgtgttaggaggagtctacttctttttccgagggattcagtatttcctgcagaggcggccgtcgatgaagaccctgtttgtggacagctacagtgagatgcttttctttctgcagtcactgttcatgctggccaccgtggtgctgtacttcagccacctcaaggagtatgtggcttccatggtattctccctggccttgggctggaccaacatgctctactacacccgcggtttccagcagatgggcatctatgccgtcatgatagagaagatgatcctgagagacctgtgccgtttcatgtttgtctacatcgtcttcttgttcgggttttccacagcggtggtgacgctgattgaagacgggaagaatgactccctgccgtctgagtccacgtcgcacaggtggcgggggcctgcctgcaggccccccgatagctcctacaacagcctgtactccacctgcctggagctgttcaagttcaccatcggcatgggcgacctggagttcactgagaactatgacttcaaggctgtcttcatcatcctgctgctggcctatgtaattctcacctacatcctcctgctcaacatgctcatcgccctcatgggtgagactgtcaacaagatcgcacaggagagcaagaacatctggaagctgcagagagccatcaccatcctggacacggagaagagcttccttaagtgcatgaggaaggccttccgctcaggcaagctgctgcaggtggggtacacacctgatggcaaggacgactaccggtggtgcttcagggtggacgaggtgaactggaccacctggaacaccaacgtgggcatcatcaacgaagacccgggcaactgtgagggcgtcaagcgcaccctgagcttctccctgcggtcaagcagagtttcaggcagacactggaagaactttgccctggtcccccttttaagagaggcaagtgctcgagataggcagtctgctcagcccgaggaagtttatctgcgacagttttcagggtctctgaagccagaggacgctgaggtcttcaagagtcctgccgcttccggggagaagtgaggacgtcacgcagacagcactgtcaacactgggccttaggagaccccgttgccacggggggctgctgagggaacaccagtgctctgtcagcagcctggcctggtctgtgcctgcccagcatgttcccaaatctgtgctggacaagctgtgggaagcgttcttggaagcatggggagtgatgtacatccaaccgtcactgtccccaagtgaatctcctaacagactttcaggtttttactcactttactaaacagtgtggatggtcagtctctactgggacatgttaggcccttgttttctttgattttattcttttttttgagacagaatttcactcttctcacccaggctggaatgcagtggcacaattttggctccctgcaacctccgcctcctggattccagcaattctcctgcctcggcttcccaagtagctgggattacaggcacgtgccaccatgtctggctaattttttgtatttttttaatagatatggggtttcgccatgttggccaggctggtctcgaactcctgacctcaggtgatccgcccacctcggcctcccaaagtgctgggattacaggtgtgagcctccacacctggctgttttctttgattttattctttttttttttttctgtgagacagagtttcactcttgttgcccaggctggagtgcagtggtgtgatcttggctcactgcaacctctgcctcccgggttcaagcgattcttctgcttcagtctcccaagtagcttggattacaggtgagcactaccacgcccggctaatttttgtatttttaatagagacggggtttcaccatgttggccaggctggtctcgaactcttgacctcaggtgatctgcccgccttggcctcccaaagtgctgggattacaggtgtgagccgctgcgctcggccttctttgattttatattattaggagcaaaagtaaatgaagcccaggaaaacacctttgggaacaaactcttcctttgatggaaaatgcagaggcccttcctctctgtgccgtgcttgctcctcttacctgcccgggtggtttgggggtgttggtgtttcctccctggagaagatgggggaggctgtcccactcccagctctggcagaatcaagctgttgcagcagtgccttcttcatccttccttacgatcaatcacagtctccagaagatcagctcaattgctgtgcaggttaaaactacagaaccacatcccaaaggtacctggtaagaatgtttgaaagatcttccatttctaggaaccccagtcctgcttctccgcaatggcacatgcttccactccatccatactggcatcctcaaataaacagatatgtatacatataaatcg

SEQ ID NO: 321363 - DNA, 6857 bp, Homo sapiens
gattggcaggcgactccccgcccctgccccgcccccctgggcgaagagcgcggacttgtggggccgctggctgcagactggagctgcgcgggtcagggagataatggctgcgcggccgatcaccctcggcattgacctgggcaccacatctgtgaaggcagctctgctgagggccgcgcccgacgacccatccgggttcgcagtgctggcgagctgtgcccgtgctgcgcgggcagaggcggcggtcgagagcgcggtggccgggccccaggggcgggagcaggatgtgagtagaatcctccaagccctacacgagtgccttgctgcccttccccgaccccagctccggagcgtcgtgggcatcggggtgtcgggccagatgcatggagtcgtgttttggaaaacaggccaaggctgtgaatggacagagggagggattaccccggtgttcgagccccgagctgttagccacctggtcacgtggcaggatggccgatgtagcagcgaattcctggcctctctgccccagccgaagtctcatctcagtgtggccacgggcttcggctgtgcaaccatcttctggcttttgaaatatcgcccagagttcctgaagtcctacgacgcagccggtaccatccacgactatgtggttgccatgctgtgtggcttgccaagacctctgatgtccgaccagaatgctgccagctggggctatttcaacacgcagagccaaagctggaacgtaaagacactgaggagctcgggttttcctgtccacctgctcccagacatcgccgagcctggcagtgtggcgggcagaacttcccacatgtggtttgaaatcccaaaggggacgcaggtgggagtggccttgggtgatttacaggcctctgtctattcctgcatggcccagaggacagatgcagttctcaacatcagcacctcggttcagctggcagcctccatgccttcaggattccagcctgcacagactccagaccctacggccccagtcgcctacttcccatacttcaacaggacctacctgggggtggccgcgtcactcaacgggggcaatgtgctggccacgttcgtccacatgctggttcagtggatggcagatctaggcctggaggttgaagaatccactgtgtattcacgcatgattcaggcagctgtgcagcagagagatacccacctgaccatcaccccgacagtgctgggggagaggcacctgccggaccagctggcctcagtgaccagaatctcctcctccgacctctccctggggcacgtgacccgggctctgtgccgaggcattgttcagaacctgcactccatgcttccgattcagcagctccaggagtggggcgtggagagggtgatgggcagtgggagtgcgctgtccaggaatgacgtgctgaagcaggaggtgcagagggctttccctttgcccatgtcctttgggcaggatgtggatgcagctgtcggggcagctctggtcatgctccggagacacctcaaccagaaggaatcttagacagcaaactctttcgccaaacgactgctgtgaattttacctgattaacattcctgacaccatctgtgggtcatcctttccctggaccgttcagtggacagctttcaagcagtgcttgttgtgaggtcccatctcggccaagaacttaccttcagaacatactctaataatgcagccaggagccgtcagccagatcccaaatgagtgccttccgaaattgacccacctgggagctatttacaaatgtccatgtgggagagagagagcatgagagcacagtagcccagcctgctggtcagcaggctcatctgtggttcacctgtagacagagagcagatcaatgtgtacttcagacaccagaaagtctggtggctttggtcccaagtgggaaaagagaactgccccatgcccagcttgtgattatcgtttttggagacctgaagcccacactcgggtcgtatggacttctggaaaagttcttgtctcctggactgaaccatgtgaccggaggcccctttcctagtctcatcctcccctggctgcagatgcttagctgggccagggattgacccaagcgcgatgcagcaggcaggctcagaagacgatgcggggctgtgtgccggccttcttgctgcatgtactcagcctcaggagagcttgctgcacccaggccgcccaggtcttcacagcacaactgcctggaaggcaggttgcgagaaggagaggtggatggcatgagcagcaagggggaccgatgctgtgcagctcacaccactccagaacctgacaaggcaccagcaggaccccttgccaggagcatgtctgtgcagcagtgtttttgcccctgcacattccagaagccctcatgggaagggatgcagccaggcagactcctgccagatggggcaggtagtttattcaaagagaactctgtatcccataggcccaggctctcctttcgcttggcgtgggctttgctggcccagtgtgtgctcctggctcagcagaaacatccatttgagttggcatccctgtagggatcccagagcgttgtaagccttcttgtgattggtagggatggctgtggggtggcttccaggagggggccaccattgccgcatctacttctagactcccaaaggagcccaggctcaggcaggcctggcccagagtcacgctggcaaccacgagtttgggaagcagtcgtattctctctctctctctctctctctctctcagtatccatgacagtgtgatggagagtctctgccgtgccatctgggatgcaaaccgtccctgtgttccccacgtccaggccgtagatgctccccgccggtcagtcacttagtcgtcagatcgcccgtcctggtatcacagtgcttctgttcaggttgcacactgggccacagaggatccagcaaggatgaagaaatggagcagcacagacttgggggcagctgcggacccactccaaaaggacacctgcccagaccccctggatggagaccctaactccaggccacctccagccaagccccagctctccacggccaagagccgcacccggctctttgggaagggtgactcggaggaggctttcccggtggattgccctcacgaggaaggtgagctggactcctgcccgaccatcacagtcagccctgttatcaccatccagaggccaggagacggccccaccggtgccaggctgctgtcccaggactctgtcgccgccagcaccgagaagaccctcaggctctatgatcgcaggagtatctttgaagccgttgctcagaataactgccaggatctggagagcctgctgctcttcctgcagaagagcaagaagcacctcacagacaacgagttcaaagaccctgagacagggaagacctgtctgctgaaagccatgctcaacctgcacgacggacagaacaccaccatccccctgctcctggagatcgcgcggcaaacggacagcctgaaggagcttgtcaacgccagctacacggacagctactacaagggccagacagcactgcacatcgccatcgagagacgcaacatggccctggtgaccctcctggtggagaacggagcagacgtccaggctgcggcccatggggacttctttaagaaaaccaaagggcggcctggattctacttcggtgaactgcccctgtccctggccgcgtgcaccaaccagctgggcatcgtgaagttcctgctgcagaactcctggcagacggccgacatcagcgccagggactcggtgggcaacacggtgctgcacgccctggtggaggtggccgacaacacggccgacaacacgaagtttgtgacgagcatgtacaatgagattctgatcctgggggccaaactgcacccgacgctgaagctggaggagctcaccaacaagaagggaatgacgccgctggctctggcagctgggaccgggaagatcggggtcttggcctatattctccagcgggagatccaggagcccgagtgcaggcacctgtccaggaagttcaccgagtgggcctacgggcccgtgcactcctcgctgtacgacctgtcctgcatcgacacctgcgagaagaactcggtgctggaggtgatcgcctacagcagcagcgagacccctaatcgccacgacatgctcttggtggagccgctgaaccgactcctgcaggacaagtgggacagattcgtcaagcgcatcttctacttcaacttcctggtctactgcctgtacatgatcatcttcaccatggctgcctactacaggcccgtggatggcttgcctccctttaagatggaaaaaattggagactatttccgagttactggagagatcctgtctgtgttaggaggagtctacttctttttccgagggattcagtatttcctgcagaggcggccgtcgatgaagaccctgtttgtggacagctacagtgagatgcttttctttctgcagtcactgttcatgctggccaccgtggtgctgtacttcagccacctcaaggagtatgtggcttccatggtattctccctggccttgggctggaccaacatgctctactacacccgcggtttccagcagatgggcatctatgccgtcatgatagagaagatgatcctgagagacctgtgccgtttcatgtttgtctacatcgtcttcttgttcgggttttccacagcggtggtgacgctgattgaagacgggaagaatgactccctgccgtctgagtccacgtcgcacaggtggcgggggcctgcctgcaggccccccgatagctcctacaacagcctgtactccacctgcctggagctgttcaagttcaccatcggcatgggcgacctggagttcactgagaactatgacttcaaggctgtcttcatcatcctgctgctggcctatgtaattctcacctacatcctcctgctcaacatgctcatcgccctcatgggtgagactgtcaacaagatcgcacaggagagcaagaacatctggaagctgcagagagccatcaccatcctggacacggagaagagcttccttaagtgcatgaggaaggccttccgctcaggcaagctgctgcaggtggggtacacacctgatggcaaggacgactaccggtggtgcttcagggtggacgaggtgaactggaccacctggaacaccaacgtgggcatcatcaacgaagacccgggcaactgtgagggcgtcaagcgcaccctgagcttctccctgcggtcaagcagagtttcaggcagacactggaagaactttgccctggtcccccttttaagagaggcaagtgctcgagataggcagtctgctcagcccgaggaagtttatctgcgacagttttcagggtctctgaagccagaggacgctgaggtcttcaagagtcctgccgcttccggggagaagtgaggacgtcacgcagacagcactgtcaacactgggccttaggagaccccgttgccacggggggctgctgagggaacaccagtgctctgtcagcagcctggcctggtctgtgcctgcccagcatgttcccaaatctgtgctggacaagctgtgggaagcgttcttggaagcatggggagtgatgtacatccaaccgtcactgtccccaagtgaatctcctaacagactttcaggtttttactcactttactaaacagtgtggatggtcagtctctactgggacatgttaggcccttgttttctttgattttattcttttttttgagacagaatttcactcttctcacccaggctggaatgcagtggcacaattttggctccctgcaacctccgcctcctggattccagcaattctcctgcctcggcttcccaagtagctgggattacaggcacgtgccaccatgtctggctaattttttgtatttttttaatagatatggggtttcgccatgttggccaggctggtctcgaactcctgacctcaggtgatccgcccacctcggcctcccaaagtgctgggattacaggtgtgagcctccacacctggctgttttctttgattttattctttttttttttttctgtgagacagagtttcactcttgttgcccaggctggagtgcagtggtgtgatcttggctcactgcaacctctgcctcccgggttcaagcgattcttctgcttcagtctcccaagtagcttggattacaggtgagcactaccacgcccggctaatttttgtatttttaatagagacggggtttcaccatgttggccaggctggtctcgaactcttgacctcaggtgatctgcccgccttggcctcccaaagtgctgggattacaggtgtgagccgctgcgctcggccttctttgattttatattattaggagcaaaagtaaatgaagcccaggaaaacacctttgggaacaaactcttcctttgatggaaaatgcagaggcccttcctctctgtgccgtgcttgctcctcttacctgcccgggtggtttgggggtgttggtgtttcctccctggagaagatgggggaggctgtcccactcccagctctggcagaatcaagctgttgcagcagtgccttcttcatccttccttacgatcaatcacagtctccagaagatcagctcaattgctgtgcaggttaaaactacagaaccacatcccaaaggtacctggtaagaatgtttgaaagatcttccatttctaggaaccccagtcctgcttctccgcaatggcacatgcttccactccatccatactggcatcctcaaataaacagatatgtatacatataaatcg

SEQ ID NO: 321364 - DNA, 4421 bp, Homo sapiens
ctgccgctcaccctattccagggacacagtctgcttggctcttctggactgagccatcctcatcaccgagatcctccctgaattcagcccacgacagccaccccggccgttttccttgttctgtgtggggagggaggcagcgcggtggttatcaacctcaccctgcagaggaggcacctgaggcccagagacgaggagggatgggtctaacccagaaccacagatggctctgagccgggggcctgtccaccctcccaggccgacgtcagtggccgcaggactgcctgggccctgctaggcctgctcacctctgaggcctctggggtgagaggttcagtcctggaaacacttcagttctagggggctgggggcagcagcaagttggagttttggggtaccctgcttcacagggcccttggcaaggagggcaggtggggtctaaggacaagcagtccttactttgggagtcaaccccggcgtggtggctgctgcaggttgcacactgggccacagaggatccagcaaggatgaagaaatggagcagcacagacttgggggcagctgcggacccactccaaaaggacacctgcccagaccccctggatggagaccctaactccaggccacctccagccaagccccagctctccacggccaagagccgcacccggctctttgggaagggtgactcggaggaggctttcccggtggattgccctcacgaggaaggtgagctggactcctgcccgaccatcacagtcagccctgttatcaccatccagaggccaggagacggccccaccggtgccaggctgctgtcccaggactctgtcgccgccagcaccgagaagaccctcaggctctatgatcgcaggagtatctttgaagccgttgctcagaataactgccaggatctggagagcctgctgctcttcctgcagaagagcaagaagcacctcacagacaacgagttcaaagaccctgagacagggaagacctgtctgctgaaagccatgctcaacctgcacgacggacagaacaccaccatccccctgctcctggagatcgcgcggcaaacggacagcctgaaggagcttgtcaacgccagctacacggacagctactacaagggccagacagcactgcacatcgccatcgagagacgcaacatggccctggtgaccctcctggtggagaacggagcagacgtccaggctgcggcccatggggacttctttaagaaaaccaaagggcggcctggattctacttcggtgaactgcccctgtccctggccgcgtgcaccaaccagctgggcatcgtgaagttcctgctgcagaactcctggcagacggccgacatcagcgccagggactcggtgggcaacacggtgctgcacgccctggtggaggtggccgacaacacggccgacaacacgaagtttgtgacgagcatgtacaatgagattctgatcctgggggccaaactgcacccgacgctgaagctggaggagctcaccaacaagaagggaatgacgccgctggctctggcagctgggaccgggaagatcggggtcttggcctatattctccagcgggagatccaggagcccgagtgcaggcacctgtccaggaagttcaccgagtgggcctacgggcccgtgcactcctcgctgtacgacctgtcctgcatcgacacctgcgagaagaactcggtgctggaggtgatcgcctacagcagcagcgagacccctaatcgccacgacatgctcttggtggagccgctgaaccgactcctgcaggacaagtgggacagattcgtcaagcgcatcttctacttcaacttcctggtctactgcctgtacatgatcatcttcaccatggctgcctactacaggcccgtggatggcttgcctccctttaagatggaaaaaattggagactatttccgagttactggagagatcctgtctgtgttaggaggagtctacttctttttccgagggattcagtatttcctgcagaggcggccgtcgatgaagaccctgtttgtggacagctacagtgagatgcttttctttctgcagtcactgttcatgctggccaccgtggtgctgtacttcagccacctcaaggagtatgtggcttccatggtattctccctggccttgggctggaccaacatgctctactacacccgcggtttccagcagatgggcatctatgccgtcatgatagagaagatgatcctgagagacctgtgccgtttcatgtttgtctacatcgtcttcttgttcgggttttccacagcggtggtgacgctgattgaagacgggaagaatgactccctgccgtctgagtccacgtcgcacaggtggcgggggcctgcctgcaggccccccgatagctcctacaacagcctgtactccacctgcctggagctgttcaagttcaccatcggcatgggcgacctggagttcactgagaactatgacttcaaggctgtcttcatcatcctgctgctggcctatgtaattctcacctacatcctcctgctcaacatgctcatcgccctcatgggtgagactgtcaacaagatcgcacaggagagcaagaacatctggaagctgcagagagccatcaccatcctggacacggagaagagcttccttaagtgcatgaggaaggccttccgctcaggcaagctgctgcaggtggggtacacacctgatggcaaggacgactaccggtggtgcttcagggtggacgaggtgaactggaccacctggaacaccaacgtgggcatcatcaacgaagacccgggcaactgtgagggcgtcaagcgcaccctgagcttctccctgcggtcaagcagagtttcaggcagacactggaagaactttgccctggtcccccttttaagagaggcaagtgctcgagataggcagtctgctcagcccgaggaagtttatctgcgacagttttcagggtctctgaagccagaggacgctgaggtcttcaagagtcctgccgcttccggggagaagtgaggacgtcacgcagacagcactgtcaacactgggccttaggagaccccgttgccacggggggctgctgagggaacaccagtgctctgtcagcagcctggcctggtctgtgcctgcccagcatgttcccaaatctgtgctggacaagctgtgggaagcgttcttggaagcatggggagtgatgtacatccaaccgtcactgtccccaagtgaatctcctaacagactttcaggtttttactcactttactaaacagtgtggatggtcagtctctactgggacatgttaggcccttgttttctttgattttattcttttttttgagacagaatttcactcttctcacccaggctggaatgcagtggcacaattttggctccctgcaacctccgcctcctggattccagcaattctcctgcctcggcttcccaagtagctgggattacaggcacgtgccaccatgtctggctaattttttgtatttttttaatagatatggggtttcgccatgttggccaggctggtctcgaactcctgacctcaggtgatccgcccacctcggcctcccaaagtgctgggattacaggtgtgagcctccacacctggctgttttctttgattttattctttttttttttttctgtgagacagagtttcactcttgttgcccaggctggagtgcagtggtgtgatcttggctcactgcaacctctgcctcccgggttcaagcgattcttctgcttcagtctcccaagtagcttggattacaggtgagcactaccacgcccggctaatttttgtatttttaatagagacggggtttcaccatgttggccaggctggtctcgaactcttgacctcaggtgatctgcccgccttggcctcccaaagtgctgggattacaggtgtgagccgctgcgctcggccttctttgattttatattattaggagcaaaagtaaatgaagcccaggaaaacacctttgggaacaaactcttcctttgatggaaaatgcagaggcccttcctctctgtgccgtgcttgctcctcttacctgcccgggtggtttgggggtgttggtgtttcctccctggagaagatgggggaggctgtcccactcccagctctggcagaatcaagctgttgcagcagtgccttcttcatccttccttacgatcaatcacagtctccagaagatcagctcaattgctgtgcaggttaaaactacagaaccacatcccaaaggtacctggtaagaatgtttgaaagatcttccatttctaggaaccccagtcctgcttctccgcaatggcacatgcttccactccatccatactggcatcctcaaataaacagatatgtatacatataaatcg

SEQ ID NO: 321365 - DNA, 3785 bp, Homo sapiens
gattggcaggcgactccccgcccctgccccgcccccctgggcgaagagcgcggacttgtggggccgctggctgcagactggagctgcgcgggtcagggagataatggctgcgcggccgatcaccctcggcattgacctgggcaccacatctgtgaaggcagctctgctgagggccgcgcccgacgacccatccgggttcgcagtgctggcgagctgtgcccgtgctgcgcgggcagaggcggcggtcgagagcgcggtggccgggccccaggggcgggagcaggatgtgagtagaatcctccaagccctacacgagtgccttgctgcccttccccgaccccagctccggagcgtcgtgggcatcggggtgtcgggccagatgcatggagtcgtgttttggaaaacaggccaaggctgtgaatggacagagggagggattaccccggtgttcgagccccgagctgttagccacctggtcacgtggcaggatggccgatgtagcagcgaattcctggcctctctgccccagccgaagtctcatctcagtgtggccacgggcttcggctgtgcaaccatcttctggcttttgaaatatcgcccagagttcctgaagtcctacgacgcagccggtaccatccacgactatgtggttgccatgctgtgtggcttgccaagacctctgatgtccgaccagaatgctgccagctggggctatttcaacacgcagagccaaagctggaacgtaaagacactgaggagctcgggttttcctgtccacctgctcccagacatcgccgagcctggcagtgtggcgggcagaacttcccacatgtggtttgaaatcccaaaggggacgcaggtgggagtggccttgggtgatttacaggcctctgtctattcctgcatggcccagaggacagatgcagttctcaacatcagcacctcggttcagctggcagcctccatgccttcaggattccagcctgcacagactccagaccctacggccccagtcgcctacttcccatacttcaacaggacctacctgggggtggccgcgtcactcaacgggggcaatgtgctggccacgttcgtccacatgctggttcagtggatggcagatctaggcctggaggttgaagaatccactgtgtattcacgcatgattcaggcagctgtgcagcagagagatacccacctgaccatcaccccgacagtgctgggggagaggcacctgccggaccagctggcctcagtgaccagaatctcctcctccgacctctccctggggcacgtgacccgggctctgtgccgaggcattgttcagaacctgcactccatgcttccgattcagcagctccaggagtggggcgtggagagggtgatgggcagtgggagtgcgctgtccaggaatgacgtgctgaagcaggaggtgcagagggctttccctttgcccatgtcctttgggcaggatgtggatgcagctgtcggggcagctctggtcatgctccggagacacctcaaccagaaggaatcttagacagcaaactctttcgccaaacgactgctgtgaattttacctgattaacattcctgacaccatctgtgggtcatcctttccctggaccgttcagtggacagctttcaagcagtgcttgttgtgaggtcccatctcggccaagaacttaccttcagaacatactctaataatgcagccaggagccgtcagccagatcccaaatgagtgccttccgaaattgacccacctgggagctatttacaaatgtccatgtgggagagagagagcatgagagcacagtagcccagcctgctggtcagcaggctcatctgtggttcacctgtagacagagagcagatcaatgtgtacttcagacaccagaaagtctggtggctttggtcccaagtgggaaaagagaactgccccatgcccagcttgtgattatcgtttttggagacctgaagcccacactcgggtcgtatggacttctggaaaagttcttgtctcctggactgaaccatgtgaccggaggcccctttcctagtctcatcctcccctggctgcagatgcttagctgggccagggattgacccaagcgcgatgcagcaggcaggctcagaagacgatgcggggctgtgtgccggccttcttgctgcatgtactcagcctcaggagagcttgctgcacccaggccgcccaggtcttcacagcacaactgcctggaaggcaggttgcgagaaggagaggtggatggcatgagcagcaagggggaccgatgctgtgcagctcacaccactccagaacctgacaaggcaccagcaggaccccttgccaggagcatgtctgtgcagcagtgtttttgcccctgcacattccagaagccctcatgggaagggatgcagccaggcagactcctgccagatggggcaggtagtttattcaaagagaactctgtatcccataggcccaggctctcctttcgcttggcgtgggctttgctggcccagtgtgtgctcctggctcagcagaaacatccatttgagttggcatccctgtagggatcccagagcgttgtaagccttcttgtgattggtagggatggctgtggggtggcttccaggagggggccaccattgccgcatctacttctagactcccaaaggagcccaggctcaggcaggcctggcccagagtcacgctggcaaccacgagtttgggaagcagtcgtattctctctctctctctctctctctctctcagtatccatgacaggtatgaaacatattgtctctttataaatgtcattttacaaattatgtgattatctggaagctctaagatgagagcaaatgcctgatcactctggccaaatgtcagatactaaagcccattcttggccgggcatgttggctcccgcctgtaatcccagcactttgggaagcccaagtgggtgaatcacctgaggtcaggagttcaagaccagcctgaccaacatggggataccccgtctctactaaaaatacaagccgggcgtggtggcgcatgcctgtaatcccagctactcaggaggctgaggcaggaaaatcacttgaactcgggaggcagaggttgcagtgagctgagatcgcgccattgcactccagcctgggtgacagagcaagactctgtctcataaataaatacaaagcccattcttccagagtcttgtgccttaaataaaacacacctctctgctgtgggaagactgtgcaatggcacagccgcagagcttggtttgggaggttgaagtgctctggggagaattcgtagatcatcctcagaaaagccttgccctggtgttctaccagaaaaacgtctcccaatcacccaggaaagctgtccacagtagtccccccttatccacggtgtcactttccatgggttcagttatctgcggtcaaccacggtctgacaatattaaatggaagctcttggatgagagcaatgcctgatcactctggccaaatgtcagatactaaagccattcttggcgggcatgtggctccgctgttatccaacacattgggaagccagtgggtgaatcaccgaggcggagtaaacccgcctgcaatgggattaccggtctataaataaacgggtggggctgcttaaccaaacaaggggaggaactagacggaggggggatagacccctcccggggaaacttttaatacgctctgtctgatacttacagagacatagggcatatcataccagcctgcgaaaa

SEQ ID NO: 321366 - DNA, 4585 bp, Homo sapiens
tctacaaaaaaaaaaagtttggaaattggccaggtatggtggtgtgtgcctgtggttcttagctgttcgggaggctgaggtggaaggatcgcttgagcccagaaatttgaggttgcagtgagctgagatcgcgccattgcactccagcctgggtgacagagcaagactctgtctcataaataaatacaaagcccattcttccagagtcttgtgccttaaataaaacacacctctctgctgtgggaagactgtgcaatggcacagccgcagagcttggtttgggaggttgaagtgctctggggagaattcgtagatcatcctcagaaaagccttgccctggtgttctaccagaaaaacgtctcccaatcacccaggaaagctgtccacagtagtccccccttatccacggtgtcactttccatgggttcagttatctgcggtcaaccacggtctgacaatattaaatggaaaattcttcaaacagttcccaagttttcccttgtgcattgttctgagcagtgtgatggagagtctctgccgtgccatctgggatgcaaaccgtccctgtgttccccacgtccaggccgtagatgctccccgccggtcagtcacttagtcgtcagatcgcccgtcctggtatcacagtgcttctgttcaggttgcacactgggccacagaggatccagcaaggatgaagaaatggagcagcacagacttgggggcagctgcggacccactccaaaaggacacctgcccagaccccctggatggagaccctaactccaggccacctccagccaagccccagctctccacggccaagagccgcacccggctctttgggaagggtgactcggaggaggctttcccggtggattgccctcacgaggaaggtgagctggactcctgcccgaccatcacagtcagccctgttatcaccatccagaggccaggagacggccccaccggtgccaggctgctgtcccaggactctgtcgccgccagcaccgagaagaccctcaggctctatgatcgcaggagtatctttgaagccgttgctcagaataactgccaggatctggagagcctgctgctcttcctgcagaagagcaagaagcacctcacagacaacgagttcaaagaccctgagacagggaagacctgtctgctgaaagccatgctcaacctgcacgacggacagaacaccaccatccccctgctcctggagatcgcgcggcaaacggacagcctgaaggagcttgtcaacgccagctacacggacagctactacaagggccagacagcactgcacatcgccatcgagagacgcaacatggccctggtgaccctcctggtggagaacggagcagacgtccaggctgcggcccatggggacttctttaagaaaaccaaagggcggcctggattctacttcggtgaactgcccctgtccctggccgcgtgcaccaaccagctgggcatcgtgaagttcctgctgcagaactcctggcagacggccgacatcagcgccagggactcggtgggcaacacggtgctgcacgccctggtggaggtggccgacaacacggccgacaacacgaagtttgtgacgagcatgtacaatgagattctgatcctgggggccaaactgcacccgacgctgaagctggaggagctcaccaacaagaagggaatgacgccgctggctctggcagctgggaccgggaagatcggggtcttggcctatattctccagcgggagatccaggagcccgagtgcaggcacctgtccaggaagttcaccgagtgggcctacgggcccgtgcactcctcgctgtacgacctgtcctgcatcgacacctgcgagaagaactcggtgctggaggtgatcgcctacagcagcagcgagacccctaatcgccacgacatgctcttggtggagccgctgaaccgactcctgcaggacaagtgggacagattcgtcaagcgcatcttctacttcaacttcctggtctactgcctgtacatgatcatcttcaccatggctgcctactacaggcccgtggatggcttgcctccctttaagatggaaaaaattggagactatttccgagttactggagagatcctgtctgtgttaggaggagtctacttctttttccgagggattcagtatttcctgcagaggcggccgtcgatgaagaccctgtttgtggacagctacagtgagatgcttttctttctgcagtcactgttcatgctggccaccgtggtgctgtacttcagccacctcaaggagtatgtggcttccatggtattctccctggccttgggctggaccaacatgctctactacacccgcggtttccagcagatgggcatctatgccgtcatgatagagaagatgatcctgagagacctgtgccgtttcatgtttgtctacatcgtcttcttgttcgggttttccacagcggtggtgacgctgattgaagacgggaagaatgactccctgccgtctgagtccacgtcgcacaggtggcgggggcctgcctgcaggccccccgatagctcctacaacagcctgtactccacctgcctggagctgttcaagttcaccatcggcatgggcgacctggagttcactgagaactatgacttcaaggctgtcttcatcatcctgctgctggcctatgtaattctcacctacatcctcctgctcaacatgctcatcgccctcatgggtgagactgtcaacaagatcgcacaggagagcaagaacatctggaagctgcagagagccatcaccatcctggacacggagaagagcttccttaagtgcatgaggaaggccttccgctcaggcaagctgctgcaggtggggtacacacctgatggcaaggacgactaccggtggtgcttcagggtggacgaggtgaactggaccacctggaacaccaacgtgggcatcatcaacgaagacccgggcaactgtgagggcgtcaagcgcaccctgagcttctccctgcggtcaagcagagtttcaggcagacactggaagaactttgccctggtcccccttttaagagaggcaagtgctcgagataggcagtctgctcagcccgaggaagtttatctgcgacagttttcagggtctctgaagccagaggacgctgaggtcttcaagagtcctgccgcttccggggagaagtgaggacgtcacgcagacagcactgtcaacactgggccttaggagaccccgttgccacggggggctgctgagggaacaccagtgctctgtcagcagcctggcctggtctgtgcctgcccagcatgttcccaaatctgtgctggacaagctgtgggaagcgttcttggaagcatggggagtgatgtacatccaaccgtcactgtccccaagtgaatctcctaacagactttcaggtttttactcactttactaaacagtgtggatggtcagtctctactgggacatgttaggcccttgttttctttgattttattcttttttttgagacagaatttcactcttctcacccaggctggaatgcagtggcacaattttggctccctgcaacctccgcctcctggattccagcaattctcctgcctcggcttcccaagtagctgggattacaggcacgtgccaccatgtctggctaattttttgtatttttttaatagatatggggtttcgccatgttggccaggctggtctcgaactcctgacctcaggtgatccgcccacctcggcctcccaaagtgctgggattacaggtgtgagcctccacacctggctgttttctttgattttattctttttttttttttctgtgagacagagtttcactcttgttgcccaggctggagtgcagtggtgtgatcttggctcactgcaacctctgcctcccgggttcaagcgattcttctgcttcagtctcccaagtagcttggattacaggtgagcactaccacgcccggctaatttttgtatttttaatagagacggggtttcaccatgttggccaggctggtctcgaactcttgacctcaggtgatctgcccgccttggcctcccaaagtgctgggattacaggtgtgagccgctgcgctcggccttctttgattttatattattaggagcaaaagtaaatgaagcccaggaaaacacctttgggaacaaactcttcctttgatggaaaatgcagaggcccttcctctctgtgccgtgcttgctcctcttacctgcccgggtggtttgggggtgttggtgtttcctccctggagaagatgggggaggctgtcccactcccagctctggcagaatcaagctgttgcagcagtgccttcttcatccttccttacgatcaatcacagtctccagaagatcagctcaattgctgtgcaggttaaaactacagaaccacatcccaaaggtacctggtaagaatgtttgaaagatcttccatttctaggaaccccagtcctgcttctccgcaatggcacatgcttccactccatccatactggcatcctcaaataaacagatatgtatacatataaatcg

SEQ ID NO: 321367 - DNA, 3838 bp, Homo sapiens
gattggcaggcgactccccgcccctgccccgcccccctgggcgaagagcgcggacttgtggggccgctggctgcagactggagctgcgcgggtcagggagataatggctgcgcggccgatcaccctcggcattgacctgggcaccacatctgtgaaggcagctctgctgagggccgcgcccgacgacccatccgggttcgcagtgctggcgagctgtgcccgtgctgcgcgggcagaggcggcggtcgagagcgcggtggccgggccccaggggcgggagcaggatgtgagtagaatcctccaagccctacacgagtgccttgctgcccttccccgaccccagctccggagcgtcgtgggcatcggggtgtcgggccagatgcatggagtcgtgttttggaaaacaggccaaggctgtgaatggacagagggagggattaccccggtgttcgagccccgagctgttagccacctggtcacgtggcaggatggccgatgtagcagcgaattcctggcctctctgccccagccgaagtctcatctcagtgtggccacgggcttcggctgtgcaaccatcttctggcttttgaaatatcgcccagagttcctgaagtcctacgacgcagccggtaccatccacgactatgtggttgccatgctgtgtggcttgccaagacctctgatgtccgaccagaatgctgccagctggggctatttcaacacgcagagccaaagctggaacgtaaagacactgaggagctcgggttttcctgtccacctgctcccagacatcgccgagcctggcagtgtggcgggcagaacttcccacatgtggtttgaaatcccaaaggggacgcaggtgggagtggccttgggtgatttacaggcctctgtctattcctgcatggcccagaggacagatgcagttctcaacatcagcacctcggttcagctggcagcctccatgccttcaggattccagcctgcacagactccagaccctacggccccagtcgcctacttcccatacttcaacaggacctacctgggggtggccgcgtcactcaacgggggcaatgtgctggccacgttcgtccacatgctggttcagtggatggcagatctaggcctggaggttgaagaatccactgtgtattcacgcatgattcaggcagctgtgcagcagagagatacccacctgaccatcaccccgacagtgctgggggagaggcacctgccggaccagctggcctcagtgaccagaatctcctcctccgacctctccctggggcacgtgacccgggctctgtgccgaggcattgttcagaacctgcactccatgcttccgattcagcagctccaggagtggggcgtggagagggtgatgggcagtgggagtgcgctgtccaggaatgacgtgctgaagcaggaggtgcagagggctttccctttgcccatgtcctttgggcaggatgtggatgcagctgtcggggcagctctggtcatgctccggagacacctcaaccagaaggaatcttagacagcaaactctttcgccaaacgactgctgtgaattttacctgattaacattcctgacaccatctgtgggtcatcctttccctggaccgttcagtggacagctttcaagcagtgcttgttgtgaggtcccatctcggccaagaacttaccttcagaacatactctaataatgcagccaggagccgtcagccagatcccaaatgagtgccttccgaaattgacccacctgggagctatttacaaatgtccatgtgggagagagagagcatgagagcacagtagcccagcctgctggtcagcaggctcatctgtggttcacctgtagacagagagcagatcaatgtgtacttcagacaccagaaagtctggtggctttggtcccaagtgggaaaagagaactgccccatgcccagcttgtgattatcgtttttggagacctgaagcccacactcgggtcgtatggacttctggaaaagttcttgtctcctggactgaaccatgtgaccggaggcccctttcctagtctcatcctcccctggctgcagatgcttagctgggccagggattgacccaagcgcgatgcagcaggcaggctcagaagacgatgcggggctgtgtgccggccttcttgctgcatgtactcagcctcaggagagcttgctgcacccaggccgcccaggtcttcacagcacaactgcctggaaggcaggttgcgagaaggagaggtggatggcatgagcagcaagggggaccgatgctgtgcagctcacaccactccagaacctgacaaggcaccagcaggaccccttgccaggagcatgtctgtgcagcagtgtttttgcccctgcacattccagaagccctcatgggaagggatgcagccaggcagactcctgccagatggggcaggtagtttattcaaagagaactctgtatcccataggcccaggctctcctttcgcttggcgtgggctttgctggcccagtgtgtgctcctggctcagcagaaacatccatttgagttggcatccctgtagggatcccagagcgttgtaagccttcttgtgattggtagggatggctgtggggtggcttccaggagggggccaccattgccgcatctacttctagactcccaaaggagcccaggctcaggcaggcctggcccagagtcacgctggcaaccacgagtttgggaagcagtcgtattctctctctctctctctctctctctctcagtatccatgacaggtatgaaacatattgtctctttataaatgtcattttacaaattatgtgattatctggaagctctaagatgagagcaaatgcctgatcactctggccaaatgtcagatactaaagcccattcttggccgggcatgttggctcccgcctgtaatcccagcactttgggaagcccaagtgggtgaatcacctgaggtcaggagttcaagaccagcctgaccaacatggggataccccgtctctactaaaaatacaagccgggcgtggtggcgcatgcctgtaatcccagctactcaggaggctgaggcaggaaaatcacttgaactcgggaggcagaggttgcagtgagctgagatcgcgccattgcactccagcctgggtgacagagcaagactctgtctcataaataaatacaaagcccattcttccagagtcttgtgccttaaataaaacacacctctctgctgtgggaagactgtgcaatggcacagccgcagagcttggtttgggaggttgaagtgctctggggagaattcgtagatcatcctcagaaaagccttgccctggtgttctaccagaaaaacgtctcccaatcacccaggaaagctgtccacagtagtccccccttatccacggtgtcactttccatgggttcagttatctgcggtcaaccacggtctgacaatattaaatggaaaattcttcaaacagttcccaagttttcccttgtgcattgttctgagcagtgtgatggagagtctctgccgtgccatctgggatgcaaaccgtccctgtgttccccacgtccaggccgtagatgctccccgccggtcagtcacttagtcgtcagatcgcccgtcctggtatcacagtgcttctgttcaggtcagtctttttttacttcattagggccccaaagcaccagagtagtgatgctggtagtgatgctggctgttcggatatgccaaagagaaaccgtaaggtgcttcctttaagtgaaaagatgggaagaaaacagtcatatgctgaatcttctatctgtgaaattct

SEQ ID NO: 321368 - DNA, 306 bp, Homo sapiens
ttgagattattcagctagcggacagtactacaagggccagacagcactgcacatcgccatcgagagacgcaacatggccctggtgaccctcctggtggagaacggagcagacgtccaggctgcggcccatggggacttctttaagaaaaccaaagggcggcctggattctacttcggtgaactgcccctgtccctggccgcgtgcaccaaccagctgggcatcgtgaagttcctgctgcagaactcctggctaatctggggtatttttttcctagataaggggagtgcgccatgtggccagccata

SEQ ID NO: 321369 - DNA, 4547 bp, Homo sapiens
ggatgcagccaggcagactcctgcacagacatgccccttgccaggagcatgtctgtgcagcagtgtttttgcccctgcacattccagaagccctcatgggaagggatgcagccaggcagactcctgccagatggggcaggtagtttattcaaagagaactctgtatcccataggcccaggctctcctttcgcttggcgtgggctttgctggcccagtgtgtgctcctggctcagcagaaacatccatttgagttggcatccctgtagggatcccagagcgttgtaagccttcttgtgattggtagggatggctgtggggtggcttccaggagggggccaccattgccgcatctacttctagactcccaaaggagcccaggctcaggcaggcctggcccagagtcacgctggcaaccacgagtttgggaagcagtcgtattctctctctctctctctctctctctctcagtatccatgacagtgtgatggagagtctctgccgtgccatctgggatgcaaaccgtccctgtgttccccacgtccaggccgtagatgctccccgccggtcagtcacttagtcgtcagatcgcccgtcctggtatcacagtgcttctgttcaggttgcacactgggccacagaggatccagcaaggatgaagaaatggagcagcacagacttgggggcagctgcggacccactccaaaaggacacctgcccagaccccctggatggagaccctaactccaggccacctccagccaagccccagctctccacggccaagagccgcacccggctctttgggaagggtgactcggaggaggctttcccggtggattgccctcacgaggaaggtgagctggactcctgcccgaccatcacagtcagccctgttatcaccatccagaggccaggagacggccccaccggtgccaggctgctgtcccaggactctgtcgccgccagcaccgagaagaccctcaggctctatgatcgcaggagtatctttgaagccgttgctcagaataactgccaggatctggagagcctgctgctcttcctgcagaagagcaagaagcacctcacagacaacgagttcaaagaccctgagacagggaagacctgtctgctgaaagccatgctcaacctgcacgacggacagaacaccaccatccccctgctcctggagatcgcgcggcaaacggacagcctgaaggagcttgtcaacgccagctacacggacagctactacaagggccagacagcactgcacatcgccatcgagagacgcaacatggccctggtgaccctcctggtggagaacggagcagacgtccaggctgcggcccatggggacttctttaagaaaaccaaagggcggcctggattctacttcggtgaactgcccctgtccctggccgcgtgcaccaaccagctgggcatcgtgaagttcctgctgcagaactcctggcagacggccgacatcagcgccagggactcggtgggcaacacggtgctgcacgccctggtggaggtggccgacaacacggccgacaacacgaagtttgtgacgagcatgtacaatgagattctgatcctgggggccaaactgcacccgacgctgaagctggaggagctcaccaacaagaagggaatgacgccgctggctctggcagctgggaccgggaagatcggggtcttggcctatattctccagcgggagatccaggagcccgagtgcaggcacctgtccaggaagttcaccgagtgggcctacgggcccgtgcactcctcgctgtacgacctgtcctgcatcgacacctgcgagaagaactcggtgctggaggtgatcgcctacagcagcagcgagacccctaatcgccacgacatgctcttggtggagccgctgaaccgactcctgcaggacaagtgggacagattcgtcaagcgcatcttctacttcaacttcctggtctactgcctgtacatgatcatcttcaccatggctgcctactacaggcccgtggatggcttgcctccctttaagatggaaaaaattggagactatttccgagttactggagagatcctgtctgtgttaggaggagtctacttctttttccgagggattcagtatttcctgcagaggcggccgtcgatgaagaccctgtttgtggacagctacagtgagatgcttttctttctgcagtcactgttcatgctggccaccgtggtgctgtacttcagccacctcaaggagtatgtggcttccatggtattctccctggccttgggctggaccaacatgctctactacacccgcggtttccagcagatgggcatctatgccgtcatgatagagaagatgatcctgagagacctgtgccgtttcatgtttgtctacatcgtcttcttgttcgggttttccacagcggtggtgacgctgattgaagacgggaagaatgactccctgccgtctgagtccacgtcgcacaggtggcgggggcctgcctgcaggccccccgatagctcctacaacagcctgtactccacctgcctggagctgttcaagttcaccatcggcatgggcgacctggagttcactgagaactatgacttcaaggctgtcttcatcatcctgctgctggcctatgtaattctcacctacatcctcctgctcaacatgctcatcgccctcatgggtgagactgtcaacaagatcgcacaggagagcaagaacatctggaagctgcagagagccatcaccatcctggacacggagaagagcttccttaagtgcatgaggaaggccttccgctcaggcaagctgctgcaggtggggtacacacctgatggcaaggacgactaccggtggtgcttcagggtggacgaggtgaactggaccacctggaacaccaacgtgggcatcatcaacgaagacccgggcaactgtgagggcgtcaagcgcaccctgagcttctccctgcggtcaagcagagtttcaggcagacactggaagaactttgccctggtcccccttttaagagaggcaagtgctcgagataggcagtctgctcagcccgaggaagtttatctgcgacagttttcagggtctctgaagccagaggacgctgaggtcttcaagagtcctgccgcttccggggagaagtgaggacgtcacgcagacagcactgtcaacactgggccttaggagaccccgttgccacggggggctgctgagggaacaccagtgctctgtcagcagcctggcctggtctgtgcctgcccagcatgttcccaaatctgtgctggacaagctgtgggaagcgttcttggaagcatggggagtgatgtacatccaaccgtcactgtccccaagtgaatctcctaacagactttcaggtttttactcactttactaaacagtgtggatggtcagtctctactgggacatgttaggcccttgttttctttgattttattcttttttttgagacagaatttcactcttctcacccaggctggaatgcagtggcacaattttggctccctgcaacctccgcctcctggattccagcaattctcctgcctcggcttcccaagtagctgggattacaggcacgtgccaccatgtctggctaattttttgtatttttttaatagatatggggtttcgccatgttggccaggctggtctcgaactcctgacctcaggtgatccgcccacctcggcctcccaaagtgctgggattacaggtgtgagcctccacacctggctgttttctttgattttattctttttttttttttctgtgagacagagtttcactcttgttgcccaggctggagtgcagtggtgtgatcttggctcactgcaacctctgcctcccgggttcaagcgattcttctgcttcagtctcccaagtagcttggattacaggtgagcactaccacgcccggctaatttttgtatttttaatagagacggggtttcaccatgttggccaggctggtctcgaactcttgacctcaggtgatctgcccgccttggcctcccaaagtgctgggattacaggtgtgagccgctgcgctcggccttctttgattttatattattaggagcaaaagtaaatgaagcccaggaaaacacctttgggaacaaactcttcctttgatggaaaatgcagaggcccttcctctctgtgccgtgcttgctcctcttacctgcccgggtggtttgggggtgttggtgtttcctccctggagaagatgggggaggctgtcccactcccagctctggcagaatcaagctgttgcagcagtgccttcttcatccttccttacgatcaatcacagtctccagaagatcagctcaattgctgtgcaggttaaaactacagaaccacatcccaaaggtacctggtaagaatgtttgaaagatcttccatttctaggaaccccagtcctgcttctccgcaatggcacatgcttccactccatccatactggcatcctcaaataaacagatatgtatacatataaatcg

SEQ ID NO: 321370 - DNA, 5290 bp, Homo sapiens
ggatgcagccaggcagactcctgcacagacatgccccttgccaggagcatgtctgtgcagcagtgtttttgcccctgcacattccagaagccctcatgggaagggatgcagccaggcagactcctgccagatggggcaggtagtttattcaaagagaactctgtatcccataggcccaggctctcctttcgcttggcgtgggctttgctggcccagtgtgtgctcctggctcagcagaaacatccatttgagttggcatccctgtagggatcccagagcgttgtaagccttcttgtgattggtagggatggctgtggggtggcttccaggagggggccaccattgccgcatctacttctagactcccaaaggagcccaggctcaggcaggcctggcccagagtcacgctggcaaccacgagtttgggaagcagtcgtattctctctctctctctctctctctctctcagtatccatgacaggtatgaaacatattgtctctttataaatgtcattttacaaattatgtgattatctggaagctctaagatgagagcaaatgcctgatcactctggccaaatgtcagatactaaagcccattcttggccgggcatgttggctcccgcctgtaatcccagcactttgggaagcccaagtgggtgaatcacctgaggtcaggagttcaagaccagcctgaccaacatggggataccccgtctctactaaaaatacaagccgggcgtggtggcgcatgcctgtaatcccagctactcaggaggctgaggcaggaaaatcacttgaactcgggaggcagaggttgcagtgagctgagatcgcgccattgcactccagcctgggtgacagagcaagactctgtctcataaataaatacaaagcccattcttccagagtcttgtgccttaaataaaacacacctctctgctgtgggaagactgtgcaatggcacagccgcagagcttggtttgggaggttgaagtgctctggggagaattcgtagatcatcctcagaaaagccttgccctggtgttctaccagaaaaacgtctcccaatcacccaggaaagctgtccacagtagtccccccttatccacggtgtcactttccatgggttcagttatctgcggtcaaccacggtctgacaatattaaatggaaaattcttcaaacagttcccaagttttcccttgtgcattgttctgagcagtgtgatggagagtctctgccgtgccatctgggatgcaaaccgtccctgtgttccccacgtccaggccgtagatgctccccgccggtcagtcacttagtcgtcagatcgcccgtcctggtatcacagtgcttctgttcaggttgcacactgggccacagaggatccagcaaggatgaagaaatggagcagcacagacttgggggcagctgcggacccactccaaaaggacacctgcccagaccccctggatggagaccctaactccaggccacctccagccaagccccagctctccacggccaagagccgcacccggctctttgggaagggtgactcggaggaggctttcccggtggattgccctcacgaggaaggtgagctggactcctgcccgaccatcacagtcagccctgttatcaccatccagaggccaggagacggccccaccggtgccaggctgctgtcccaggactctgtcgccgccagcaccgagaagaccctcaggctctatgatcgcaggagtatctttgaagccgttgctcagaataactgccaggatctggagagcctgctgctcttcctgcagaagagcaagaagcacctcacagacaacgagttcaaagaccctgagacagggaagacctgtctgctgaaagccatgctcaacctgcacgacggacagaacaccaccatccccctgctcctggagatcgcgcggcaaacggacagcctgaaggagcttgtcaacgccagctacacggacagctactacaagggccagacagcactgcacatcgccatcgagagacgcaacatggccctggtgaccctcctggtggagaacggagcagacgtccaggctgcggcccatggggacttctttaagaaaaccaaagggcggcctggattctacttcggtgaactgcccctgtccctggccgcgtgcaccaaccagctgggcatcgtgaagttcctgctgcagaactcctggcagacggccgacatcagcgccagggactcggtgggcaacacggtgctgcacgccctggtggaggtggccgacaacacggccgacaacacgaagtttgtgacgagcatgtacaatgagattctgatcctgggggccaaactgcacccgacgctgaagctggaggagctcaccaacaagaagggaatgacgccgctggctctggcagctgggaccgggaagatcggggtcttggcctatattctccagcgggagatccaggagcccgagtgcaggcacctgtccaggaagttcaccgagtgggcctacgggcccgtgcactcctcgctgtacgacctgtcctgcatcgacacctgcgagaagaactcggtgctggaggtgatcgcctacagcagcagcgagacccctaatcgccacgacatgctcttggtggagccgctgaaccgactcctgcaggacaagtgggacagattcgtcaagcgcatcttctacttcaacttcctggtctactgcctgtacatgatcatcttcaccatggctgcctactacaggcccgtggatggcttgcctccctttaagatggaaaaaattggagactatttccgagttactggagagatcctgtctgtgttaggaggagtctacttctttttccgagggattcagtatttcctgcagaggcggccgtcgatgaagaccctgtttgtggacagctacagtgagatgcttttctttctgcagtcactgttcatgctggccaccgtggtgctgtacttcagccacctcaaggagtatgtggcttccatggtattctccctggccttgggctggaccaacatgctctactacacccgcggtttccagcagatgggcatctatgccgtcatgatagagaagatgatcctgagagacctgtgccgtttcatgtttgtctacatcgtcttcttgttcgggttttccacagcggtggtgacgctgattgaagacgggaagaatgactccctgccgtctgagtccacgtcgcacaggtggcgggggcctgcctgcaggccccccgatagctcctacaacagcctgtactccacctgcctggagctgttcaagttcaccatcggcatgggcgacctggagttcactgagaactatgacttcaaggctgtcttcatcatcctgctgctggcctatgtaattctcacctacatcctcctgctcaacatgctcatcgccctcatgggtgagactgtcaacaagatcgcacaggagagcaagaacatctggaagctgcagagagccatcaccatcctggacacggagaagagcttccttaagtgcatgaggaaggccttccgctcaggcaagctgctgcaggtggggtacacacctgatggcaaggacgactaccggtggtgcttcagggtggacgaggtgaactggaccacctggaacaccaacgtgggcatcatcaacgaagacccgggcaactgtgagggcgtcaagcgcaccctgagcttctccctgcggtcaagcagagtttcaggcagacactggaagaactttgccctggtcccccttttaagagaggcaagtgctcgagataggcagtctgctcagcccgaggaagtttatctgcgacagttttcagggtctctgaagccagaggacgctgaggtcttcaagagtcctgccgcttccggggagaagtgaggacgtcacgcagacagcactgtcaacactgggccttaggagaccccgttgccacggggggctgctgagggaacaccagtgctctgtcagcagcctggcctggtctgtgcctgcccagcatgttcccaaatctgtgctggacaagctgtgggaagcgttcttggaagcatggggagtgatgtacatccaaccgtcactgtccccaagtgaatctcctaacagactttcaggtttttactcactttactaaacagtgtggatggtcagtctctactgggacatgttaggcccttgttttctttgattttattcttttttttgagacagaatttcactcttctcacccaggctggaatgcagtggcacaattttggctccctgcaacctccgcctcctggattccagcaattctcctgcctcggcttcccaagtagctgggattacaggcacgtgccaccatgtctggctaattttttgtatttttttaatagatatggggtttcgccatgttggccaggctggtctcgaactcctgacctcaggtgatccgcccacctcggcctcccaaagtgctgggattacaggtgtgagcctccacacctggctgttttctttgattttattctttttttttttttctgtgagacagagtttcactcttgttgcccaggctggagtgcagtggtgtgatcttggctcactgcaacctctgcctcccgggttcaagcgattcttctgcttcagtctcccaagtagcttggattacaggtgagcactaccacgcccggctaatttttgtatttttaatagagacggggtttcaccatgttggccaggctggtctcgaactcttgacctcaggtgatctgcccgccttggcctcccaaagtgctgggattacaggtgtgagccgctgcgctcggccttctttgattttatattattaggagcaaaagtaaatgaagcccaggaaaacacctttgggaacaaactcttcctttgatggaaaatgcagaggcccttcctctctgtgccgtgcttgctcctcttacctgcccgggtggtttgggggtgttggtgtttcctccctggagaagatgggggaggctgtcccactcccagctctggcagaatcaagctgttgcagcagtgccttcttcatccttccttacgatcaatcacagtctccagaagatcagctcaattgctgtgcaggttaaaactacagaaccacatcccaaaggtacctggtaagaatgtttgaaagatcttccatttctaggaaccccagtcctgcttctccgcaatggcacatgcttccactccatccatactggcatcctcaaataaacagatatgtatacatataaatcg

SEQ ID NO: 321371 - DNA, 3325 bp, Homo sapiens
ttgagattattcagctagcggacagtactacaagggccagacagcactgcacatcgccatcgagagacgcaacatggccctggtgaccctcctggtggagaacggagcagacgtccaggctgcggcccatggggacttctttaagaaaaccaaagggcggcctggattctacttcggtgaactgcccctgtccctggccgcgtgcaccaaccagctgggcatcgtgaagttcctgctgcagaactcctggcagacggccgacatcagcgccagggactcggtgggcaacacggtgctgcacgccctggtggaggtggccgacaacacggccgacaacacgaagtttgtgacgagcatgtacaatgagattctgatcctgggggccaaactgcacccgacgctgaagctggaggagctcaccaacaagaagggaatgacgccgctggctctggcagctgggaccgggaagatcggggtcttggcctatattctccagcgggagatccaggagcccgagtgcaggcacctgtccaggaagttcaccgagtgggcctacgggcccgtgcactcctcgctgtacgacctgtcctgcatcgacacctgcgagaagaactcggtgctggaggtgatcgcctacagcagcagcgagacccctaatcgccacgacatgctcttggtggagccgctgaaccgactcctgcaggacaagtgggacagattcgtcaagcgcatcttctacttcaacttcctggtctactgcctgtacatgatcatcttcaccatggctgcctactacaggcccgtggatggcttgcctccctttaagatggaaaaaattggagactatttccgagttactggagagatcctgtctgtgttaggaggagtctacttctttttccgagggattcagtatttcctgcagaggcggccgtcgatgaagaccctgtttgtggacagctacagtgagatgcttttctttctgcagtcactgttcatgctggccaccgtggtgctgtacttcagccacctcaaggagtatgtggcttccatggtattctccctggccttgggctggaccaacatgctctactacacccgcggtttccagcagatgggcatctatgccgtcatgatagagaagatgatcctgagagacctgtgccgtttcatgtttgtctacatcgtcttcttgttcgggttttccacagcggtggtgacgctgattgaagacgggaagaatgactccctgccgtctgagtccacgtcgcacaggtggcgggggcctgcctgcaggccccccgatagctcctacaacagcctgtactccacctgcctggagctgttcaagttcaccatcggcatgggcgacctggagttcactgagaactatgacttcaaggctgtcttcatcatcctgctgctggcctatgtaattctcacctacatcctcctgctcaacatgctcatcgccctcatgggtgagactgtcaacaagatcgcacaggagagcaagaacatctggaagctgcagagagccatcaccatcctggacacggagaagagcttccttaagtgcatgaggaaggccttccgctcaggcaagctgctgcaggtggggtacacacctgatggcaaggacgactaccggtggtgcttcagggtggacgaggtgaactggaccacctggaacaccaacgtgggcatcatcaacgaagacccgggcaactgtgagggcgtcaagcgcaccctgagcttctccctgcggtcaagcagagtttcaggcagacactggaagaactttgccctggtcccccttttaagagaggcaagtgctcgagataggcagtctgctcagcccgaggaagtttatctgcgacagttttcagggtctctgaagccagaggacgctgaggtcttcaagagtcctgccgcttccggggagaagtgaggacgtcacgcagacagcactgtcaacactgggccttaggagaccccgttgccacggggggctgctgagggaacaccagtgctctgtcagcagcctggcctggtctgtgcctgcccagcatgttcccaaatctgtgctggacaagctgtgggaagcgttcttggaagcatggggagtgatgtacatccaaccgtcactgtccccaagtgaatctcctaacagactttcaggtttttactcactttactaaacagtgtggatggtcagtctctactgggacatgttaggcccttgttttctttgattttattcttttttttgagacagaatttcactcttctcacccaggctggaatgcagtggcacaattttggctccctgcaacctccgcctcctggattccagcaattctcctgcctcggcttcccaagtagctgggattacaggcacgtgccaccatgtctggctaattttttgtatttttttaatagatatggggtttcgccatgttggccaggctggtctcgaactcctgacctcaggtgatccgcccacctcggcctcccaaagtgctgggattacaggtgtgagcctccacacctggctgttttctttgattttattctttttttttttttctgtgagacagagtttcactcttgttgcccaggctggagtgcagtggtgtgatcttggctcactgcaacctctgcctcccgggttcaagcgattcttctgcttcagtctcccaagtagcttggattacaggtgagcactaccacgcccggctaatttttgtatttttaatagagacggggtttcaccatgttggccaggctggtctcgaactcttgacctcaggtgatctgcccgccttggcctcccaaagtgctgggattacaggtgtgagccgctgcgctcggccttctttgattttatattattaggagcaaaagtaaatgaagcccaggaaaacacctttgggaacaaactcttcctttgatggaaaatgcagaggcccttcctctctgtgccgtgcttgctcctcttacctgcccgggtggtttgggggtgttggtgtttcctccctggagaagatgggggaggctgtcccactcccagctctggcagaatcaagctgttgcagcagtgccttcttcatccttccttacgatcaatcacagtctccagaagatcagctcaattgctgtgcaggttaaaactacagaaccacatcccaaaggtacctggtaagaatgtttgaaagatcttccatttctaggaaccccagtcctgcttctccgcaatggcacatgcttccactccatccatactggcatcctcaaataaacagatatgtatacatataaatcg

SEQ ID NO: 321372 - DNA, 367 bp, Homo sapiens
tacatgctcatcctaactctactgcctaaaacagagattgcatgaagaaaaaggtaataaagtccagcttctgccctgccttagagacccagggctactaccaatgaggaactgggctatgttgtgagtcaagaaagttttcacttcatgacttacattctcttccttgcccagaaaacatctatacacagcatagctacccaaggactagaaatggtgcaatgccttctgagaacctagaagtggtcctatgggaaaagcactctgtgagagggggtaaagacagtcatgacccagaagtggtgcatgcaggaaactgtatttttcacatattgcatcagaccagaagaactgaagaaccagatgc

SEQ ID NO: 321373 - DNA, 1875 bp, Homo sapiens
tacacacaaaagattttaagaaacagaagagaaaagaatccgaggcacagataaagataagttttactgtcatgctgcttttaacataacagagcaacatcacctaggaaaaaagtttgtaggaggatttttaatccatatatttgtcttatggctagataaagatttctctgaaaaaaagaagcatgtcaggaatctctgggtgcccctttttcctctggggacttctagcattgttgggcttggctttggttatatcactgatcttcaatatttcccactatgtggaaaagcaacgacaagataaaatgtacagctactccagtgaccacaccagggttgatgagtattatattgaagacacaccaatttatggtaacttagatgatatgatttcagaaccaatggatgaaaattgctatgaacaaatgaaagcccgaccagagaaatctgtaaataagatgcaggaagccaccccatctgcacaggcaaccaatgaaacacagatgtgctacgcctcacttgatcacagcgttaaggggaagcgtagaaagcccaggaaacagaatactcatttctcagacaaggatggagatgagcaactacatgcaatagatgccagcgtttctaagaccaccttagtagacagtttctccccagaaagccaggcagtagaggaaaacattcatgatgatcccatcagactgtttggattgatccgtgctaagagagaacctataaactagctggaccatgatctagttcaatgatttggctcctattgaagatggcttctaagaaaacaagatgcacagaggacacagaaggacttggcagcagggtgatgacctgatcatttgttgatgggatggtggcttacctcttattcacagcttacacttatgcatgccaaatgtaaggccatgaaaatcagtatttcaaataacttaaaaaatgctttactactaaaatgtaaaaaattaatgtgctcacctcggcagcacatatactaaaaattaataagacccagcttgaaaattgagcctgataacaagattacaaattcacaatacctaatacttagggaaatataaaaatttaagcatgaatgtgttctggaacacgttagaagaaaaataaaagccaatgagtttttttttaattctcctttctcaccaatgggcaatagcccataattgaaataaatttctgattgaaaggtataggaaacattaaaatgcattactaagagaagtaatataattttcttacaaagtatttttcccaaagatagctttactatttcaaaaattgtcaaattaatgcatgctccttacaacaaacaaatatcaaaaagagtttaggaattctactagccagagatagtcacttggagaaactttctatatatccttctaaatatttttctgggcatgcttatgtatgtacatcagttgtttctttttattttgaaccaaaaatgtggtttcttttgtacacattacttaaactttctttccagtcaacaatatattgtggatttattttcactgttatatttaactatatataaatacgcatatattgtaattttaatgtctgcttagcaccccactgataaccaaatcacagtttatttaaataattttaatgacttttcaaaaacaatttattgatgcaaaaagcaaggttgagatgacaatgtttctttcaataattaaaaaatactgcttcactgtcttctctctgtttcatcagaaacacatactataatacttgtctctgtccttaagtgtgatacacgctatttttctgattgttaagactttccttattactggttctaatttgattataatatgccaaggtatggtc

SEQ ID NO: 321374 - DNA, 1847 bp, Homo sapiens
cagatttttttccttcttcattaactggttatagggaactccttttgtgtgagaagtgaaagagaatgcataggctgaggagatgaagaactttgaagagtgagctcatcaaatacaattcagacatgaacagagatcacaaagagtgtcaccaacctgcacaggaatctctgggtgcccctttttcctctggggacttctagcattgttgggcttggctttggttatatcactgatcttcaatatttcccactatgtggaaaagcaacgacaagataaaatgtacagctactccagtgaccacaccagggttgatgagtattatattgaagacacaccaatttatggtaacttagatgatatgatttcagaaccaatggatgaaaattgctatgaacaaatgaaagcccgaccagagaaatctgtaaataagatgcaggaagccaccccatctgcacaggcaaccaatgaaacacagatgtgctacgcctcacttgatcacagcgttaaggggaagcgtagaaagcccaggaaacagaatactcatttctcagacaaggatggagatgagcaactacatgcaatagatgccagcgtttctaagaccaccttagtagacagtttctccccagaaagccaggcagtagaggaaaacattcatgatgatcccatcagactgtttggattgatccgtgctaagagagaacctataaactagctggaccatgatctagttcaatgatttggctcctattgaagatggcttctaagaaaacaagatgcacagaggacacagaaggacttggcagcagggtgatgacctgatcatttgttgatgggatggtggcttacctcttattcacagcttacacttatgcatgccaaatgtaaggccatgaaaatcagtatttcaaataacttaaaaaatgctttactactaaaatgtaaaaaattaatgtgctcacctcggcagcacatatactaaaaattaataagacccagcttgaaaattgagcctgataacaagattacaaattcacaatacctaatacttagggaaatataaaaatttaagcatgaatgtgttctggaacacgttagaagaaaaataaaagccaatgagtttttttttaattctcctttctcaccaatgggcaatagcccataattgaaataaatttctgattgaaaggtataggaaacattaaaatgcattactaagagaagtaatataattttcttacaaagtatttttcccaaagatagctttactatttcaaaaattgtcaaattaatgcatgctccttacaacaaacaaatatcaaaaagagtttaggaattctactagccagagatagtcacttggagaaactttctatatatccttctaaatatttttctgggcatgcttatgtatgtacatcagttgtttctttttattttgaaccaaaaatgtggtttcttttgtacacattacttaaactttctttccagtcaacaatatattgtggatttattttcactgttatatttaactatatataaatacgcatatattgtaattttaatgtctgcttagcaccccactgataaccaaatcacagtttatttaaataattttaatgacttttcaaaaacaatttattgatgcaaaaagcaaggttgagatgacaatgtttctttcaataattaaaaaatactgcttcactgtcttctctctgtttcatcagaaacacatactataatacttgtctctgtccttaagtgtgatacacgctatttttctgattgttaagactttccttattactggttctaatttgattataatatgccaaggtatggtc

SEQ ID NO: 321375 - DNA, 1764 bp, Homo sapiens
tacacacaaaagattttaagaaacagaagagaaaagaatccgaggcacagataaagataagttttactgtcatgctgcttttaacataacagagcaacatcacctaggaaaaaagtttgtaggaggatttttaatccatatatttgtcttatggctagataaagatttctctgaaaaaaagaagcatgtcagataaaatgtacagctactccagtgaccacaccagggttgatgagtattatattgaagacacaccaatttatggtaacttagatgatatgatttcagaaccaatggatgaaaattgctatgaacaaatgaaagcccgaccagagaaatctgtaaataagatgcaggaagccaccccatctgcacaggcaaccaatgaaacacagatgtgctacgcctcacttgatcacagcgttaaggggaagcgtagaaagcccaggaaacagaatactcatttctcagacaaggatggagatgagcaactacatgcaatagatgccagcgtttctaagaccaccttagtagacagtttctccccagaaagccaggcagtagaggaaaacattcatgatgatcccatcagactgtttggattgatccgtgctaagagagaacctataaactagctggaccatgatctagttcaatgatttggctcctattgaagatggcttctaagaaaacaagatgcacagaggacacagaaggacttggcagcagggtgatgacctgatcatttgttgatgggatggtggcttacctcttattcacagcttacacttatgcatgccaaatgtaaggccatgaaaatcagtatttcaaataacttaaaaaatgctttactactaaaatgtaaaaaattaatgtgctcacctcggcagcacatatactaaaaattaataagacccagcttgaaaattgagcctgataacaagattacaaattcacaatacctaatacttagggaaatataaaaatttaagcatgaatgtgttctggaacacgttagaagaaaaataaaagccaatgagtttttttttaattctcctttctcaccaatgggcaatagcccataattgaaataaatttctgattgaaaggtataggaaacattaaaatgcattactaagagaagtaatataattttcttacaaagtatttttcccaaagatagctttactatttcaaaaattgtcaaattaatgcatgctccttacaacaaacaaatatcaaaaagagtttaggaattctactagccagagatagtcacttggagaaactttctatatatccttctaaatatttttctgggcatgcttatgtatgtacatcagttgtttctttttattttgaaccaaaaatgtggtttcttttgtacacattacttaaactttctttccagtcaacaatatattgtggatttattttcactgttatatttaactatatataaatacgcatatattgtaattttaatgtctgcttagcaccccactgataaccaaatcacagtttatttaaataattttaatgacttttcaaaaacaatttattgatgcaaaaagcaaggttgagatgacaatgtttctttcaataattaaaaaatactgcttcactgtcttctctctgtttcatcagaaacacatactataatacttgtctctgtccttaagtgtgatacacgctatttttctgattgttaagactttccttattactggttctaatttgattataatatgccaaggtatggtc

SEQ ID NO: 321376 - DNA, 763 bp, Homo sapiens
  misc_feature (762)..(762): n is a, c, g, or t
ttttgagccttaaactgctgtcttgtttccctggctgagaaccctggaaacgagggtcctgtgcttagccattccccatccactcaggagagcctgcttcttaatacctgccccacaggtggggtcctgcttgccccagcagacggtctgcctgtcaccttcgatgtctgcaccattgcattcctggatgacccatttcgtggttcggtcatcatgtccaggctattctattttctgacttcatactacgttttgcctgcactaccacttgtatttttgctaccctaccttttgtgcttctggctaaaatagctaactagctagacaggagttgtctggagaagtacaaatgagtctttaaaacccatcctcagtgccccatcagtaagtacacattgtgaatttttacatctataaggttactctattttaaagtaattttaaaattttaaagtagttttgtctgtatttgcttctttgccttatgtattggcttagtacctaattctttttttgtttatttgtttgtttttgagacggagttccagcctgggcaacagagcaaaactatgtctcaaaaataaataaataaataaataaataaataaataacctagtgtctggtattctgttatagaagcacaaaacatacagtgactgtggttatccaatttcacactcccaaagtaaagtgctgggattgccggtgtgagccaccgaatctgtcctgttcgcataagttctgctacatcatgttatttnt

SEQ ID NO: 321377 - DNA, 495 bp, Homo sapiens
cttagagacagtaggaaaatggtatctcccggaagttacctcacgacctccaagagcggcttccaaccttgccggaaatgacgaacgagtcaaccggatcggtgactgtggagggcgagctgagccctggccgccgccacaatgggccgcgagtttgggaatctgacgcggatgcggcatgtgatcagctacagcttgtcaccgttcgagcagcgcgcctatccgcacgtcttcactaaaggaatccccaatgttctgcgccgcattcgggagtctttctttcgcgtggtgccgcagtttgtagtgttttatcttatctacacatgggggactgaagagttcgagagatccaagaggaagaatccagctgcctatgaaaatgacaaatgagcaacgcatccggatgacggttccctgtctctgaaagacctttctctggaagaggagtctgcattgtagtgtctcaaagacacaataaacttcctatggtctgca

SEQ ID NO: 321378 - DNA, 447 bp, Homo sapiens
  misc_feature (15)..(16): n is a, c, g, or t
aaggatctttaattnnattaatcccccccccccggaacgagtcaaccggatcggtgactgtggagggcgagctgagccctggccgccgccacaatgggccgcgagtttgggaatctgacgcggatgcggcatgtgatcagctacagcttgtcaccgttcgagcagcgcgcctatccgcacgtcttcactaaaggaatccccaatgttctgcgccgcattcgggagtctttctttcgcgtggtgccgcagtttgtagtgttttatcttatctacacatgggggactgaagagttcgagagatccaagaggaagaatccagctgcctatgaaaatgacaaatgagcaacgcatccggatgacggttccctgtctctgaaagacctttctctggaagaggagtctgcattgtagtgtctcaaagacacaataaacttcctatggtctgca

SEQ ID NO: 321379 - DNA, 366 bp, Homo sapiens
taaattcgcggccgcgtcgacgtcagattcccaaactcgcggatgcggcatgtgatcagctacagcttgtcaccgttcgagcagcgcgcctatccgcacgtcttcactaaaggaatccccaatgttctgcgccgcattcgggagtctttctttcgcgtggtgccgcagtttgtagtgttttatcttatctacacatgggggactgaagagttcgagagatccaagaggaagaatccagctgcctatgaaaatgacaaatgagcaacgcatccggatgacggttccctgtctctgaaagacctttctctggaagaggagtctgcattgtagtgtctcaaagacacaataaacttcctatggtctgca

SEQ ID NO: 321380 - DNA, 512 bp, Homo sapiens
  misc_feature (438)..(438): n is a, c, g, or t
aaaaataagtaggaagtgctcaattttaatttggttcagttttccggagggcgagctgagccctggccgccgccacaatgggccgcgagtttgggaatctgacgcggatgcggcatgtgatcagctacagcttgtcaccgttcgagcagcgcgcctatccgcacgtcttcactaaaggaatccccaatgttctgcgccgcattcgggagtctttctttcgcgtggtgccgcagtttgtagtgttttatcttatctacacatgggggactgaagagttcgagagatccaagaggaagaatccagctgcctatgaaaatgacaaatgagcaacgcatccggatgacggttccctgtctctgaaagacctttctctggaagaggagtctgcattgtagtgtctcaaagacacaataaacttcctatggtctgcacccccanaatcatatttctccttctcccactccagcgccctcttacctttcttttctcgtctcatattagccttccctctc

SEQ ID NO: 321381 - DNA, 1652 bp, Homo sapiens
cttagagacagtaggaaaatggtatctcccggaagttacctcacgacctccaagagcggcttccaaccttgccggaaatgacgaacgagtcaaccggatcggtgactgtggagggcgagctgagccctggccgccgccacaatgggccgcgagtttgggaatctgacgcggatgcggcatgtgatcagctacagcttgtcaccgttcgagcagcgcgcctatccgcacgtcttcactaaaggaatccccaatgttctgcgccgcattcgggagtctttctttcgcgtggtgccgcagtttgtagtgttttatcttatctacacatgggggactgaagagttcgagagatccaagaggaagaatccagctgcctatgaaaatgacaaatgagcaacgcatccggatgacggttccctgtctctgaaagacctttctctggaagaggagtctgcattgtagtgtctcaaagacacaataaacttcctatggtctgcaactgttgtgatattacatttttgtgagtagaatcctgtgtgaccactaatattcaagttcatgaagcgcccctcctcagcatgagtcttgaagttttgcctggtctcgggttttggtgaaagagcagggctccccctttgttccattatctacaagaaagtagctgcaggtactcctgcatctaaccatttgtgggtgacatgggctatggcgagtgctggttcttggccctctgctcccatagcaacaataaagtctactaactatattgtaattagtatgtgtcagggacgcttttattttttattttttgagatggagtcttgctctctcacccaggctggagtgcagtggtgtgatctcggctcactgccatctgtgcctcctgggttcaaacgattctcctgtctcagcctccgagtagctgggattacaggtgcaggacaccacacctggctaattttttgtatttttagtagagacaggtttcaccatgttggccaggctggtctggaactcctgacctcagatgatctgtgcgcctcagcctcccaaagtgctgggattacaggcgtaagccatggtgctctgggcctcaaatactcttcttagctacacaaatgaactgttaaacctcacaagcacctttaacgtatcctcatttggcagatgaggaaatgggcacagagagattaagtaatttgccagaaattatacagcagtgaatggtggagtcttgcactaaagtgatgctcttaaaactatgctctattgcaggggtgtccaatcttttagcttccctgggccacacataaaatacgctaacattacaatagctgataagctttaaaaaatggcaaaaaaaaccctcagcgttttagaaagtttacaaatttttgttgggtcggattcaaagccatcctgggctgcttgctgcccaggactgcggttggacaagcttgctctactgcctttcctcctaaggcaggccttagcctgaggggatatcagctataaaacggatgaggtgatctcttagcctccacagcagttttctgtttctgtgccagaggccaacaatgttttcgaccatatgtggttcataaagcctcaaagatttactctggccctttatgaataaagtttacccctgatct

SEQ ID NO: 321382 - DNA, 899 bp, Homo sapiens
  misc_feature (15)..(16): n is a, c, g, or t
aaggatctttaattnnattaatcccccccccccggaacgagtcaaccggatcggtgactgtggagggcgagctgagccctggccgccgccacaatgggccgcgagtttgggaatctgacgcggatgcggcatgtgatcagctacagcttgtcaccgttcgagcagcgcgcctatccgcacgtcttcactaaaggaatccccaatgttctgcgccgcattcgggagtctttctttcgcgtggtgccgcgtgagtgccttgggcccgcgggagcgggaggctggaccccagcagcagcagcagtcactgcgcctcccctctgagcgctggcggccgggcaggcgctctgtaacttgccgtacacacctttctcattgaatattcctgaccgcccttaagctggtcatattatcctccccatcttacacggggaaaactgagctacagaactgaaatgactggcccaaggtcactcgggtgattccagcatgttcctctgaggtcacctttatttagttcttaccagtggtgaaatgctttgtgttaaacgtgcagcagatagtgatgatagttgcatggccttggatatgctaagaactactgaagtgtatgctttaaagaagacaagaggactgagacctttttttttcttctatatgtcttatatgtgtgctctctgtttactctcttaatttttaaagagtttgtagtgttttatcttatctacacatgggggactgaagagttcgagagatccaagaggaagaatccagctgcctatgaaaatgacaaatgagcaacgcatccggatgacggttccctgtctctgaaagacctttctctggaagaggagtctgcattgtagtgtctcaaagacacaataaacttcctatggtctgca

SEQ ID NO: 321383 - DNA, 1204 bp, Homo sapiens
  misc_feature (15)..(16): n is a, c, g, or t
  misc_feature (955)..(955): n is a, c, g, or t
aaggatctttaattnnattaatcccccccccccggaacgagtcaaccggatcggtgactgtggagggcgagctgagccctggccgccgccacaatgggccgcgagtttgggaatctgacgcggatgcggcatgtgatcagctacagcttgtcaccgttcgagcagcgcgcctatccgcacgtcttcactaaaggaatccccaatgttctgcgccgcattcgggagtctttctttcgcgtggtgccgcgtgagtgccttgggcccgcgggagcgggaggctggaccccagcagcagcagcagtcactgcgcctcccctctgagcgctggcggccgggcaggcgctctgtaacttgccgtacacacctttctcattgaatattcctgaccgcccttaagctggtcatattatcctccccatcttacacggggaaaactgagctacagaactgaaatgactggcccaaggtcactcgggtgattccagcatgttcctctgaggtcacctttatttagttcttaccagtggtgaaatgctttgtgttaaacgtgcagcagatagtgatgatagttgcatggccttggatatgctaagaactactgaagtgtatgctttaaagaagacaagaggactgagacctttttttttcttctatatgtcttatatgtgtgctctctgtttactctcttaatttttaaagagtttgtagtgttttatcttatctacacatgggggactgaagagttcgagagatccaagaggaagaatccagctgcctatgaaaatgacaaatgagcaacgcatccggatgacggttccctgtctctgaaagacctttctctggaagaggagtctgcattgtagtgtctcaaagacacaataaacttcctatggtctgcaaaaaaaaaaaaaaaaaaaaaaaaaaaaaaaaaacaaaaaaaaaaaaaaggcccagngaattttaaattcgagcaagtttatgcttgcggccgaaattggagctaatttggccaatggccttttaggggggggtataaaataacgggccgggtttacacccgggggattggaaaccttgggttaccaattaatggttggagaaattccctttcccagtgggtaatacaaaaggcggcccgacgccttccacattgccccctaatgggaaggaatttgcgggtattttgtaaaacccgtaattttgt

SEQ ID NO: 321384 - DNA, 846 bp, Homo sapiens
  misc_feature (15)..(16): n is a, c, g, or t
aaggatctttaattnnattaatcccccccccccggaacgagtcaaccggatcggtgactgtggagggcgagctgagccctggccgccgccacaatgggccgcgagtttgggaatctgacgcggatgcggcatgtgatcagctacagcttgtcaccgttcgagcagcgcgcctatccgcacgtcttcactaaaggaatccccaatgttctgcgccgcattcgggagtctttctttcgcgtggtgccgcgtgagtgccttgggcccgcgggagcgggaggctggaccccagcagcagcagcagtcactgcgcctcccctctgagcgctggcggccgggcaggcgctctgtaacttgccgtacacacctttctcattgaatattcctgaccgcccttaagctggtcatattatcctccccatcttacacggggaaaactgagctacagaactgaaatgactggcccaaggtcactcgggtgattccagcatgttcctctgaggtcacctttatttagttcttaccagtggtgaaatgctttgtgttaaacgtgcagcagatagtgatgatagttgcatggccttggatatgctaagaactactgaagtgtatgctttaaagaagacaagaggactgagacctttttttttcttctatatgtcttatatgtgtgctctctgtttactctcttaatttttaaagagtttgtagtgttttatcttatctacacatgggggactgaagagttcgagagatccaagaggaagaatccagctgcctatgctttctctggaagaggagtctgcattgtagtgtctcaaagacacaataaacttcctatggtctgca

SEQ ID NO: 321385 - DNA, 280 bp, Homo sapiens
  misc_feature (15)..(16): n is a, c, g, or t
aaggatctttaattnnattaatcccccccccccggaacgagtcaaccggatcggtgactgtggagggcgagctgagccctagtttgtagtgttttatcttatctacacatgggggactgaagagttcgagagatccaagaggaagaatccagctgcctatgaaaatgacaaatgagcaacgcatccggatgacggttccctgtctctgaaagacctttctctggaagaggagtctgcattgtagtgtctcaaagacacaataaacttcctatggtctgca

SEQ ID NO: 321386 - DNA, 347 bp, Homo sapiens
ccggatcggtgactgtggagggcgagctgagccctgtgcgtgagtggggtctggttgtgcagtgttcgtggaccctgggaggctaggggcgccccgctgggctgggaaaggataaggagtgcaggggcaggagtctggggttggggatggacccccgcggggactgcggcgcttcgcgaaagcgagccaagcgcctgtccaccctcggtcctgcagggccgccgccacaatgggccgcgagtttgggaatctgacgcggatgcggcatgtgatcagctacagcttgtcaccgttcgagcagcgcgcctatccgcacgtcttcactaaaggaatccccaatgttctgc

SEQ ID NO: 321387 - DNA, 1146 bp, Homo sapiens
cttagagacagtaggaaaatggtatctcccggaagttacctcacgacctccaagagcggcttccaaccttgccggaaatgacgaacgagtcaaccggatcggtgactgtggagggcgagctgagccctggccgccgccacaatgggccgcgagtttgggaatctgacgcggatgcggcatgtgatcagctacagcttgtcaccgttcgagcagcgcgcctatccgcacgtcttcactaaaggaatccccaatgttctgcgccgcattcgggagtctttctttcgcgtggtgccgcagtttgtagtgttttatcttatctacacatgggggactgaagagttcgagagatccaagaggaagaatccagctgcctatgaaaatgacaaatgagcaacgcatccggatgacggttccctgtctctgaaagacctttctctggaagaggagtctgcattgtagtgtctcaaagacacaataaacttcctatggtctgcaaaaaaaaaaaaaaaaaaaaaaaaaaaaaaaaaacaaaaaaaaaaccccgggggttttttttggggggggggaaaaaggtagttgtaaagggggacgacgtgggttactaaaggtgtgttctatccgacaccccacttttttttgttgcaacgggtgggaaaatctagggggggccccccaataatggaggagggcagtataatatattaaaaaacagcccgggtacccgcggtttatatatagtcgtgtagtaacgcacagaaattacacgcacaacaaagagggcggagaagatgtgggagagcaaacaacgagattaataagtgcagaaacacacgattaaaaacagagagagaagaaaatcatcatgtcagtcagacagaaaaaaaaaaacaaccaactgaaaccacacaaagagaaggagtgttattgaagccgaagagagaaaaaaagaagcaccaccattatatttacccagaggaagtaaatcgtggcatcatagaagcgaagcaacaccaaaaaatgtgattatatataatagagcgcaagtatgaccgcccccaaaaaacacatatatggacacgcgaagacaccacgctggagaacctaaaccgaagtgtataccgcagaaggaaaaatttaacacggcag

SEQ ID NO: 321388 - DNA, 826 bp, Homo sapiens
  misc_feature (577)..(577): n is a, c, g, or t
cttagagacagtaggaaaatggtatctcccggaagttacctcacgacctccaagagcggcttccaaccttgccggaaatgacgaacgagtcaaccggatcggtgactgtggagggcgagctgagccctggccgccgccacaatgggccgcgagtttgggaatctgacgcggatgcggcatgtgatcagctacagcttgtcaccgttcgagcagcgcgcctatccgcacgtcttcactaaaggaatccccaatgttctgcgccgcattcgggagtctttctttcgcgtggtgccgcagtttgtagtgttttatcttatctacacatgggggactgaagagttcgagagatccaagaggaagaatccagctgcctatgaaaatgacaaatgagcaacgcatccggatgacggttccctgtctctgaaagacctttctctggaagaggagtctgcattgtagtgtctcaaagacacaataaacttcctatggtctgcaaaaaaaaaaaaaaaaaaaaaaaaaaaaaaaaaaaaaaaaaaaaaaaaaaaaaaaaaaaacaaaaaaaaaaaaaaggcccagngaattttaaattcgagcaagtttatgcttgcggccgaaattggagctaatttggccaatggccttttaggggggggtataaaataacgggccgggtttacacccgggggattggaaaccttgggttaccaattaatggttggagaaattccctttcccagtgggtaatacaaaaggcggcccgacgccttccacattgccccctaatgggaaggaatttgcgggtattttgtaaaacccgtaattttgt

SEQ ID NO: 321389 - DNA, 431 bp, Homo sapiens
aaaaataagtaggaagtgctcaattttaatttggttcagttttccggagggcgagctgagccctggccgccgccacaatgggccgcgagtttgggaatctgacgcggatgcggcatgtgatcagctacagcttgtcaccgttcgagcagcgcgcctatccgcacgtcttcactaaaggaatccccaatgttctgcgccgcattcgggagtctttctttcgcgtggtgccgcagtttgtagtgttttatcttatctacacatgggggactgaagagttcgagagatccaagaggaagaatccagctgcctatgaaaatgacaaatgagcaacgcatccggatgacggttccctgtctctgaaagacctttctctggaagaggagtctgcattgtagtgtctcaaagacacaataaacttcctatggtctgca

SEQ ID NO: 321390 - DNA, 675 bp, Homo sapiens
  misc_feature (15)..(16): n is a, c, g, or t
aaggatctttaattnnattaatcccccccccccggaacgagtcaaccggatcggtgactgtggagggcgagctgagccctggccgccgccacaatgggccgcgagtttgggaatctgacgcggatgcggcatgtgatcagctacagcttgtcaccgttcgagcagcgcgcctatccgcacgtcttcactaaaggaatccccaatgttctgcgccgcattcgggagtctttctttcgcgtggtgccgcagtttgtagtgttttatcttatctacacatgggggactgaagagttcgagagatccaagaggaagaatccagctgcctatgaaaatgacaaatgagcaacgcatccggatgacggttccctgtctctgaaagacctttctctggaagaggagtctgcattgtagtgtctcaaagacacaataaacttcctatggtctgcaaaaaaaaaaaaaaatattaaattaatattttaaggaattatataattattatgtaaaaaatatttatccatggcggccggaatttcgggcttacttggcccaattcgccctaatggggagtcgttttacaattaaatggccggcgttttaacaacgtacggaacttgggaaacacctggcggttaccacaattaaatcggctttggaagacatatccccttttggcca

SEQ ID NO: 321391 - DNA, 1364 bp, Homo sapiens
tggtgaacagtagcaaaatctggagtaactgtgcctggaattttttggccccaagtctaaacaaaggaatagtttccagataagcgctgtttgcataggtggtggtctgtcacgtggtgggccaggctattcagttcttggtcagcgagacgcctgccttgggtgctggatgccggctgtacgacatgcggctctcccctttccatttacagctggagttccacatgaaggagaagagagaggacctccagattagctggtctttcatcagtgtgccggaaatggccgttaatatccagcccaaagcactgggggaggaccaggtggctgagacaagtgcgatgtctgacgttctcaaggacatcttgaagcatttggctggttctgcctctccatcagtggttctgattaccaagcccacgactgtaaaggaagctcagaacttacagtgtgctgcatctactgctcaggaatcctgtcctcctaaacctccaagggctcacgagctgaagctactggtgaggaacatccacgtcttgctgctcagcgagcccggtgcctcaggccacattaatgcagtgtgcgtcgtgcagctgaacgatcctgttcagaggttctccagcaccctgacgaaaaacactccggacctcatgtgggaagaggaattcaccttgtgagtctggccgggttatgggcctgtgtgtccacggccgtgtctgttcaggagcgccaaatcctgaaatcattctgcagcaccgtttaggctaaaacactaaaccaaaacagttaacaacaaatgatgtcttaagcatcttaaaggtagctttaggtcaaacatgggttttgttgtaaaggcagctcttagagtcagttttctcctcctgccctgatatgatgagagggagccatcgtggggtctcttacagacacacatatcatccagggtgaaaagggagggagcctctgactgaatccagaacctaacgaagaaaatagaaaaaggcgctgggtgcagaggctcatgcctgtaatcccagctgtttgggtggcagagacgggagaatcgcttgagcccaggagtttaagaccagcctgagcaacatagcgagacctcttctctactaaaagttttaaaaaatttaaccgggcatggtggcccttgccttgcctgtagtactcctagctatttgggaggctgacgcaggaggattgcttgagtctgggagagcgaggcttcagtgagctgtgattgtgccactgtattccagcctgggtgacagagagataccctgtctcaaaaaaaaaagctgaggtgggtagaggtcaggagttcgagaccaacctggccaacatggtaaatgaaa

SEQ ID NO: 321392 - DNA, 1739 bp, Homo sapiens
ccacctgttgccatagcatccgggtcgggtgaaccaatccgggcgccctcgccgaacagaggcgggcagttcgcatcgccgaccaacctgaggcgtttttgttgtggcgcgtgaccggaggaggcgggagctcaggaccggcgccttctccttgcttctgggggtcgtggccttgctcccgctgtgcgggaaaagaatccaggcccttccacgcgcgtgtgggtgcgggggccccgaagtgctcgtggttccccgctaggtctccgctggggcaggaaccggaatcatgggtgggaccaccagcacccgccgggtcaccttcgaggcggacgagaatgagaacatcaccgtggtgaagggcatccggctttcggaaaatgtgattgatcgaatgaaggaatcctctccatctggttcgaagtctcagcggtattctggtgcttatggtgcctcagtttctgatgaagaattgaaaagaagagtagctgaggagctggcattggagcaagccaagaaagaatccgaagatcagaaacgactaaagcaagccaaagagctggaccgagagagggctgctgccaatgagcagttaaccagagccatccttcgggagaggatatgtagcgaggaggaacgcgctaaggcaaagcacctggctaggcagctggaagagaaagaccgagtgctaaagaagcaggatgcattctacaaagaacagctggctagactggaggagaggagctcagagttctacagagtcaccactgaacaatatcagaaagctgctgaagaggtggaagcaaagttcaagcgatatgagtctcatccagtctgtgctgatctgcaggccaaaattcttcagtgttaccgtgagaacacccaccagaccctcaaatgctccgctctggccacccagtatatgcactgtgtcaatcatgccaaacagagcatgcttgagaagggaggataaaaactttcagaatgagcaaaacaccatcaacgttaattccagagatggaacattttttttcctagtgagaaaacaacccatttgaagagaagaccactaatgagaagaccactaaagagagacatcaagaatggattcagcagaatcatttcacgttttgaacagcagcagtttgaagggccaaagccttgatcagggatcagtcattaaaggacactcttgagtattagtaaaccctcttatgatgattaaaagagaagggcagccctctccaccttttggtactttctattcaacttgcactgaccataaaatgtttctcttctgaacaagccccatcatttggtgaacctccaccctaacaaagtaggatggggttgggggctaaattaattggagtggggcgaggagagagccagaaaacatagatccgagggcagcagtgctgggtggagagagccagaaaacagatctggaggcagcagtgctggatggaattgtctaggctgtggcatgttggttttgtctttcttttctcctttgattatgtaagagctatttcattataacttattatggtgattatacaggcaagaagacaaaaaggagagaaaatgtacctcttctactggaataatgtttatgattacaagtgagataaggtatttttatcaatatgaaggcaaccttggctgataaaacctctatagtgaatactcacatctttacttcactcactatcaataataaatatattttctgacaaaga

SEQ ID NO: 321393 - DNA, 1768 bp, Homo sapiens
ccacctgttgccatagcatccgggtcgggtgaaccaatccgggcgccctcgccgaacagaggcgggcagttcgcatcgccgaccaacctgaggcgtttttgttgtggcgcgtgaccggaggaggcgggagctcaggaccggcgccttctccttgcttctgggggtcgtggccttgctcccgctgtgcgggaaaagaatccaggcccttccacgcgcgtgtgggtgcgggggccccgaagtgctcgtggttccccgctaggtctccgctggggcaggaaccggaatcatgggtgggaccaccagcacccgccgggtcaccttcgaggcggacgagaatgagaacatcaccgtggtgaagggcatccggctttcggaaaatgtgattgatcgaatgaaggaatcctctccatctggttcgaagtctcagcggtattctggtgcttatggtgcctcagtttctgatgaagaattgaaaagaagagtagctgaggagctggcattggagcaagccaagaaagaatccgaagatcagaaacgactaaagcaagccaaagagctggaccgagagagggctgctgccaatgagcagttaaccagagccatccttcgggagaggatatgtagcgaggaggaacgcgctaaggcaaagcacctgataaaagtggagctgctctgggtgaaacctggagtgttgactgcttagcctccacttcggccttcctagaaacccagatgttactcctcggaacctttagtcctcattggagcacagttgggaactcactggacagggaaaatgggaccatggaatggagaactttgaactgaagagtgagggggattttcctagttcactaggccattgggaaacactaaaactttctaagaagaaggtcatttctagtctctcccattctttaccttagtcacttctctgaaagaccaacccatgaccagctgcaaacagagaacatgaaaggaagtccatgcgtaatgaatcagtttcttcagtgacaaatctggggtcccggttgcatgggcaaatagtgaagccagaatagaggtggtagaccaagaaagaaatgtcagtggactgactggcagctgccctaagaacagtacatgtgttgagtggaacaaagggaataagagaggtggaagcaaagtcagtcattgtgaaaggggaataatttcagaattaaagacagtaagttttgagtaactcaactgaaaattaaatttgttgtacgtctaagctgaaggatttttttgaggaagctgaaaaaatatcaggtcagtgggttgaaaagtcatttctatgtatattaaagtctccaaatttggaagctaaggatgtagtggaggaggttaatagtgctcatgtttgaggaaggtacgagagcaaaactcttagtttccagcgggcagaagaataccttggttggcatttctctttgcctcccagcttttactcttttgaatcttatctttgaagcactctttctccacctctttttgcctgaatttggacatactgtcttactctcttagtttatggagaccagcaagattcaaaaactcaaaaaactcattaaatatatacacacactcagcaagacataaaaagagatttcacaaaaaaatgtgaaagtatcaaaagatttgttactcaacataactaaaatattaagcaacatgttttgattggaatagcatatctgcagtctgttctgttttacctaataaatcttgtctattgtctgtcttt

SEQ ID NO: 321394 - DNA, 1820 bp, Homo sapiens
  misc_feature (1772)..(1772): n is a, c, g, or t
  misc_feature (1820)..(1820): n is a, c, g, or t
ccacctgttgccatagcatccgggtcgggtgaaccaatccgggcgccctcgccgaacagaggcgggcagttcgcatcgccgaccaacctgaggcgtttttgttgtggcgcgtgaccggaggaggcgggagctcaggaccggcgccttctccttgcttctgggggtcgtggccttgctcccgctgtgcgggaaaagaatccaggcccttccacgcgcgtgtgggtgcgggggccccgaagtgctcgtggttccccgctaggtctccgctggggcaggaaccggaatcatgggtgggaccaccagcacccgccgggtcaccttcgaggcggacgagaatgagaacatcaccgtggtgaagggcatccggctttcggaaaatgtgattgatcgaatgaaggaatcctctccatctggttcgaagtctcagcggtattctggtgcttatggtgcctcagtttctgatgaagaattgaaaagaagagtagctgaggagctggcattggagcaagccaagaaagaatccgaagatcagaaacgactaaagcaagccaaagagctggaccgagagagggctgctgccaatgagcagttaaccagagccatccttcgggagaggatatgtagcgaggaggaacgcgctaaggcaaagcacctggctaggcagctggaagagaaagaccgagtgctaaagaagcaggatgcattctacaaagaacagctggctagactggaggagaggagctcagagttctacagagtcaccactgaacaatatcagaaagctgctgaagaggtggaagcaaagttcaagcgatatgagtctcatccagtctgtgctgatctgcaggccaaaattcttcagtgttaccgtgagaacacccaccagaccctcaaatgctccgctctggccacccagtatatgcactgtgtcaatcatgccaaacagagcatgcttgagaagggaggataaaaactttcagaatgagcaaaacaccatcaacgttaattccagagatggaacattttttttcctagtgagaaaacaacccatttgaagagaagaccactaatgagaagaccactaaagagagacatcaagaatggattcagcagaatcatttcacgttttgaacagcagcagtttgaagggccaaagccttgatcagggatcagtcattaaaggacactcttgagtattagtaaaccctcttatgatgattaaaagagaagggcagccctctccaccttttggtactttctattcaacttgcactgaccataaaatgtttctcttctgaacaagccccatcatttggtgaacctccaccctaacaaagtaggatggggttgggggctaaattaattggagtggggcgaggagagagccagaaaacatagatccgagggcagcagtgctgggtggagagagccagaaaacagatctggaggcagcagtgctggatggaattgtctaggctgtggcatgttggttttgtctttcttttctcctttgattatgtaagagctatttcattataacttattatggtgattatacaggcaagaagacaaaaaggagagaaaatgtacctcttctactggaataatgtttatgattacaagtgagataaggtatttttatcaatatgaaggcaaccttggctgataaaacctctatagtgaatactcacatctttacttcactcactatcaataataaatatattttctgacaaagaaaaaaaaaaatggctcgttggccttaacggggngaccctcggcccttccttagggagggtatttatgacctcctcactgcn

SEQ ID NO: 321395 - DNA, 1684 bp, Homo sapiens
ccacctgttgccatagcatccgggtcgggtgaaccaatccgggcgccctcgccgaacagaggcgggcagttcgcatcgccgaccaacctgaggcgtttttgttgtggcgcgtgaccggaggaggcgggagctcaggaccggcgccttctccttgcttctgggggtcgtggccttgctcccgctgtgcgggaaaagaatccaggcccttccacgcgcgtgtgggtgcgggggccccgaagtgctcgtggttccccgctaggtctccgctggggcaggaaccggaatcatgggtgggaccaccagcacccgccgggtcaccttcgaggcggacgagaatgagaacatcaccgtggtgaagggcatccggctttcggaaaatgtgattgatcgaatgaaggaatcctctccatctggttcgaagtctcagcggtattctggtgcttatggtgcctcagtttctgatgaagaattgaaaagaagagtagctgaggagctggcattggagcaagccaagaaagaatccgaagatcagaaacgactaaagcaagccaaagagctggaccgagagagggctgctgccaatgagcagttaaccagagccatccttcgggagaggatatgtagcgaggaggaacgcgctaaggcaaagcacctggctaggcagctggaagagaaagaccgagtgctaaagaagcaggatgcattctacaaagaacagctggctagactggaggagaggagctcagagttctacagagtcaccactgaacaatatcagaaagctgctgaagaggtggaagcaaagttcaagcgatatgagtctcatccagtctgtgctgatctgcaggccaaaattcttcagtgttaccgtgagaacacccaccagaccctcaaatgctccgctctggccacccagtatatgcactgtgtcaatcatgccaaacagagcatgcttgagaagggaggataaaaactttcagaatgagcaaaacaccatcaacgttaattccagagatggaacattttttttcctagtgagaaaacaacccatttgaagagaagaccactaatgagaagaccactaaagagagacatcaagaatggattcagcagaatcatttcacgttttgaacagcagcagtttgaagggccaaagccttgatcagggatcagtcattaaaggacactcttgagtattagtaaaccctcttatgatgattaaaagagaagggcagccctctccaccttttggtactttctattcaacttgcactgaccataaaatgtttctcttctgaacaagccccatcatttggtgaacctccaccctaacaaagtaggatggggttgggggctaaattaattggagtggggcgaggagagagccagaaaacatagatccgagggcagcagtgctgggtggagagagccagaaaacagatctggaggcagcagtgctggatggaattgtctaggctgtggcatgttggttttgtctttcttttctcctttgattatgtaagagctatttcattataacttattatggtgattatacaggcaagaagacaaaaaggagagttttatcaatatgaaggcaaccttggctgataaaacctctatagtgaatactcacatctttacttcactcactatcaataataaatatattttctgacaaaga

SEQ ID NO: 321396 - DNA, 1687 bp, Homo sapiens
ccacctgttgccatagcatccgggtcgggtgaaccaatccgggcgccctcgccgaacagaggcgggcagttcgcatcgccgaccaacctgaggcgtttttgttgtggcgcgtgaccggaggaggcgggagctcaggaccggcgccttctccttgcttctgggggtcgtggccttgctcccgctgtgcgggaaaagaatccaggcccttccacgcgcgtgtgggtgcgggggccccgaagtgctcgtggttccccgctaggtctccgctggggcaggaaccggaatcatgggtgggaccaccagcacccgccgggtcaccttcgaggcggacgagaatgagaacatcaccgtggtgaagggcatccggctattttatctccttctgctctttatcgattctagttttctgatgaagaattgaaaagaagagtagctgaggagctggcattggagcaagccaagaaagaatccgaagatcagaaacgactaaagcaagccaaagagctggaccgagagagggctgctgccaatgagcagttaaccagagccatccttcgggagaggatatgtagcgaggaggaacgcgctaaggcaaagcacctggctaggcagctggaagagaaagaccgagtgctaaagaagcaggatgcattctacaaagaacagctggctagactggaggagaggagctcagagttctacagagtcaccactgaacaatatcagaaagctgctgaagaggtggaagcaaagttcaagcgatatgagtctcatccagtctgtgctgatctgcaggccaaaattcttcagtgttaccgtgagaacacccaccagaccctcaaatgctccgctctggccacccagtatatgcactgtgtcaatcatgccaaacagagcatgcttgagaagggaggataaaaactttcagaatgagcaaaacaccatcaacgttaattccagagatggaacattttttttcctagtgagaaaacaacccatttgaagagaagaccactaatgagaagaccactaaagagagacatcaagaatggattcagcagaatcatttcacgttttgaacagcagcagtttgaagggccaaagccttgatcagggatcagtcattaaaggacactcttgagtattagtaaaccctcttatgatgattaaaagagaagggcagccctctccaccttttggtactttctattcaacttgcactgaccataaaatgtttctcttctgaacaagccccatcatttggtgaacctccaccctaacaaagtaggatggggttgggggctaaattaattggagtggggcgaggagagagccagaaaacatagatccgagggcagcagtgctgggtggagagagccagaaaacagatctggaggcagcagtgctggatggaattgtctaggctgtggcatgttggttttgtctttcttttctcctttgattatgtaagagctatttcattataacttattatggtgattatacaggcaagaagacaaaaaggagagaaaatgtacctcttctactggaataatgtttatgattacaagtgagataaggtatttttatcaatatgaaggcaaccttggctgataaaacctctatagtgaatactcacatctttacttcactcactatcaataataaatatattttctgacaaaga

SEQ ID NO: 321397 - DNA, 1363 bp, Homo sapiens
ctaaattggcatggtattggattgctgactagaaatacttctatctcaaccttataaccaactggctgttttaccttggtttctgatgaagaattgaaaagaagagtagctgaggagctggcattggagcaagccaagaaagaatccgaagatcagaaacgactaaagcaagccaaagagctggaccgagagagggctgctgccaatgagcagttaaccagagccatccttcgggagaggatatgtagcgaggaggaacgcgctaaggcaaagcacctggctaggcagctggaagagaaagaccgagtgctaaagaagcaggatgcattctacaaagaacagctggctagactggaggagaggagctcagagttctacagagtcaccactgaacaatatcagaaagctgctgaagaggtggaagcaaagttcaagcgatatgagtctcatccagtctgtgctgatctgcaggccaaaattcttcagtgttaccgtgagaacacccaccagaccctcaaatgctccgctctggccacccagtatatgcactgtgtcaatcatgccaaacagagcatgcttgagaagggaggataaaaactttcagaatgagcaaaacaccatcaacgttaattccagagatggaacattttttttcctagtgagaaaacaacccatttgaagagaagaccactaatgagaagaccactaaagagagacatcaagaatggattcagcagaatcatttcacgttttgaacagcagcagtttgaagggccaaagccttgatcagggatcagtcattaaaggacactcttgagtattagtaaaccctcttatgatgattaaaagagaagggcagccctctccaccttttggtactttctattcaacttgcactgaccataaaatgtttctcttctgaacaagccccatcatttggtgaacctccaccctaacaaagtaggatggggttgggggctaaattaattggagtggggcgaggagagagccagaaaacatagatccgagggcagcagtgctgggtggagagagccagaaaacagatctggaggcagcagtgctggatggaattgtctaggctgtggcatgttggttttgtctttcttttctcctttgattatgtaagagctatttcattataacttattatggtgattatacaggcaagaagacaaaaaggagagaaaatgtacctcttctactggaataatgtttatgattacaagtgagataaggtatttttatcaatatgaaggcaaccttggctgataaaacctctatagtgaatactcacatctttacttcactcactatcaataataaatatattttctgacaaaga

SEQ ID NO: 321398 - DNA, 1305 bp, Homo sapiens
ccacctgttgccatagcatccgggtcgggtgaaccaatccgggcgccctcgccgaacagaggcgggcagttcgcatcgccgaccaacctgaggcgtttttgttgtggcgcgtgaccggaggaggcgggagctcaggaccggcgccttctccttgcttctgggggtcgtggccttgctcccgctgtgcgggaaaagaggaacgcgctaaggcaaagcacctggctaggcagctggaagagaaagaccgagtgctaaagaagcaggatgcattctacaaagaacagctggctagactggaggagaggagctcagagttctacagagtcaccactgaacaatatcagaaagctgctgaagaggtggaagcaaagttcaagcgatatgagtctcatccagtctgtgctgatctgcaggccaaaattcttcagtgttaccgtgagaacacccaccagaccctcaaatgctccgctctggccacccagtatatgcactgtgtcaatcatgccaaacagagcatgcttgagaagggaggataaaaactttcagaatgagcaaaacaccatcaacgttaattccagagatggaacattttttttcctagtgagaaaacaacccatttgaagagaagaccactaatgagaagaccactaaagagagacatcaagaatggattcagcagaatcatttcacgttttgaacagcagcagtttgaagggccaaagccttgatcagggatcagtcattaaaggacactcttgagtattagtaaaccctcttatgatgattaaaagagaagggcagccctctccaccttttggtactttctattcaacttgcactgaccataaaatgtttctcttctgaacaagccccatcatttggtgaacctccaccctaacaaagtaggatggggttgggggctaaattaattggagtggggcgaggagagagccagaaaacatagatccgagggcagcagtgctgggtggagagagccagaaaacagatctggaggcagcagtgctggatggaattgtctaggctgtggcatgttggttttgtctttcttttctcctttgattatgtaagagctatttcattataacttattatggtgattatacaggcaagaagacaaaaaggagagaaaatgtacctcttctactggaataatgtttatgattacaagtgagataaggtatttttatcaatatgaaggcaaccttggctgataaaacctctatagtgaatactcacatctttacttcactcactatcaataataaatatattttctgacaaaga

SEQ ID NO: 321399 - DNA, 790 bp, Homo sapiens
ggctgatgtggagacacggtatcctctgtttgaagggccagagactggtaaaaagagaccatcgaggaatgaggaccattttgaccacttttgaccacttgcgctaattaaaaaaaaaaaactacgcttgagctaaagagagacatcaagaatggattcagcagaatcatttcacgttttgaacagcagcagtttgaagggccaaagccttgatcagggatcagtcattaaaggacactcttgagtattagtaaaccctcttatgatgattaaaagagaagggcagccctctccaccttttggtactttctattcaacttgcactgaccataaaatgtttctcttctgaacaagccccatcatttggtgaacctccaccctaacaaagtaggatggggttgggggctaaattaattggagtggggcgaggagagagccagaaaacatagatccgagggcagcagtgctgggtggagagagccagaaaacagatctggaggcagcagtgctggatggaattgtctaggctgtggcatgttggttttgtctttcttttctcctttgattatgtaagagctatttcattataacttattatggtgattatacaggcaagaagacaaaaaggagagaaaatgtacctcttctactggaataatgtttatgattacaagtgagataaggtatttttatcaatatgaaggcaaccttggctgataaaacctctatagtgaatactcacatctttacttcactcactatcaataataaatatattttctgacaaaga

SEQ ID NO: 321400 - DNA, 300 bp, Homo sapiens
gcccttccacgcgcgtgtgggtgcgggggccccgaagtgctcgtggttccccgctaggtctccgctggggcaggaaccggaatcatgggtgggaccaccagcacccgccgggtcaccttcgaggcggacgagaatgagaacatcaccgtggtgaagggcatccgggtgagtgcccgtggacgggcggagggccagtggttggactcggaccccaaggccccatcttctccggacccgctcagcctgggtttctcccgtcctggaccctagcgtattaaggccagaagcccaggtgtctgg

SEQ ID NO: 321401 - DNA, 1705 bp, Homo sapiens
ccacctgttgccatagcatccgggtcgggtgaaccaatccgggcgccctcgccgaacagaggcgggcagttcgcatcgccgaccaacctgaggcgtttttgttgtggcgcgtgaccggaggaggcgggagctcaggaccggcgccttctccttgcttctgggggtcgtggccttgctcccgctgtgcgggaaaagaatccaggcccttccacgcgcgtgtgggtgcgggggccccgaagtgctcgtggttccccgctaggtctccgctggggcaggaaccggaatcatgggtgggaccaccagcacccgccgggtcaccttcgaggcggacgagaatgagaacatcaccgtggtgaagggcatccggctttcggaaaatgtgattgatcgaatgaaggaatcctctccatctggttcgaagtctcagcggtattctggtgcttatggtgcctcagtttctgatgaagaattgaaaagaagagtagctgaggagctggcattggagcaagccaagaaagaatccgaagatcagaaacgactaaagcaagccaaagagctggaccgagagagggctgctgccaatgagcagttaaccagagccatccttcgggagaggatatgtagcgaggaggaacgcgctaaggcaaagcacctggctaggcagctggaagagaaagaccgagtgctaaagaagcaggatgcattctacaaagaacagctggctagactggaggagaggagctcagagttctacagagtcaccactgaacaatatcagaaagctgctgaagaggtggaagcaaagttcaagtaagtttttaatagtattataattatttactattcttaacaagatgaaagcacagttttagtgctttttgcacagatcatagtttgttatatagcactctagaatacttggaagagttttggggtggttgagatgggggccatgttatctgctatactggaattcagatgccaagacaaaggcatttgatgaaagcttgttacaaatccatgtattttatgaactagggggaaattgaaagcaatggtaatagtattatcatttgtaataatatataaaatagaatgctcttgattatgaaggtcatgttaaattgctactgtattaagggaaacatagaaaccattcacttttgtataataaaatgatgggcatgtccaaatttgggtatctgcctttctcgtggttaggctgttttcatttcttcacatgtaccttgaaaggctttaaatcatagactttacctggcccttgattatgaaggtgatgttaaattgctacctctcttaatccttggagtgtttaaatgaatgttctgtaattgatggatcaaagtgtccgtgtcccatagctttgtactttccctttgctgccagttctcacattaggttagaagacatcattcagaatttttctgagtatataaatagtcctattgtgtaacctctattagtagcacatgcgcaaattagtgaagcaaaaaaagttgttgtgacagctttagttgaaagattgcatcgggctctgacctccttccttgcacatgtttacaagcatttgataaaatgattaaaccctaaggtggaattactactttctgctacagtacaatttgtgtgttaatggatattagtgttattgtaatgtggattaaaataaaattttttaaaaatt

SEQ ID NO: 321402 - DNA, 1781 bp, Homo sapiens
ccacctgttgccatagcatccgggtcgggtgaaccaatccgggcgccctcgccgaacagaggcgggcagttcgcatcgccgaccaacctgaggcgtttttgttgtggcgcgtgaccggaggaggcgggagctcaggaccggcgccttctccttgcttctgggggtcgtggccttgctcccgctgtgcgggaaaagaatccaggcccttccacgcgcgtgtgggtgcgggggccccgaagtgctcgtggttccccgctaggtctccgctggggcaggaaccggaatcatgggtgggaccaccagcacccgccgggtcaccttcgaggcggacgagaatgagaacatcaccgtggtgaagggcatccggctttcggaaaatgtgattgatcgaatgaaggaatcctctccatctggttcgaagtctcagcggtattctggtgcttatggtgcctcagtttctgatgaagaattgaaaagaagagtagctgaggagctggcattggagcaagccaagaaagaatccgaagatcagaaacgactaaagcaagccaaagagctggaccgagagagggctgctgccaatgagcagttaaccagagccatccttcgggagaggatatgtagcgaggaggaacgcgctaaggcaaagcacctggctaggcagctggaagagaaagaccgagtgctaaagaagcaggatgcattctacaaagaacagctggctagactggaggagaggagctcagagttctacagagtcaccactgaacaatatcagaaagctgctgaagaggtggaagcaaagttcaagcgatatgagtctcatccagtctgtgctgatctgcaggccaaaattcttcagtgttaccgtgagaacacccaccagaccctcaaatgctccgctctggccacccagtatatgcactgtgtcaatcatgccaaacagagcatgcttgagaagggaggataaaaactttcagaatgagcaaaacaccatcaacgttaattccagagatggaacattttttttcctagtgagaaaacaacccatttgaagagaagaccactaatgagaagaccactaaagagagacatcaagaatggattcagcagaatcatttcacgttttgaacagcagcagtttgaagggccaaagccttgatcagggatcagtcattaaaggacactcttgagtattagtaaaccctcttatgatgattaaaagagaagggcagccctctccaccttttggtactttctattcaacttgcactgaccataaaatgtttctcttctgaacaagccccatcatttggtgaacctccaccctaacaaagtaggatggggttgggggctaaattaattggagtggggcgaggagagagccagaaaacatagatccgagggcagcagtgctgggtggagagagccagaaaacagatctggaggcagcagtgctggatggaattgtctaggctgtggcatgttggttttgtctttcttttctcctttgattatgtaagagctatttcattataacttattatggtgattatacaggcaagaagacaaaaaggagagaaaatgtacctcttctactggaataatgtttatgattacaagtgagataaggtatttttatcaatatgaaggcaaccttggctgataaaacctctatagtgaatactgctatctgtccttaacgcacgcgcgctaatcgatacgtggggtggggagagagacagcagccggcgcccgccgggctcaccgggggcggccgc

SEQ ID NO: 321403 - DNA, 1751 bp, Homo sapiens
  misc_feature (340)..(340): n is a, c, g, or t
  misc_feature (349)..(349): n is a, c, g, or t
  misc_feature (361)..(361): n is a, c, g, or t
  misc_feature (365)..(365): n is a, c, g, or t
  misc_feature (372)..(372): n is a, c, g, or t
  misc_feature (394)..(394): n is a, c, g, or t
  misc_feature (403)..(403): n is a, c, g, or t
  misc_feature (408)..(408): n is a, c, g, or t
  misc_feature (417)..(417): n is a, c, g, or t
  misc_feature (427)..(427): n is a, c, g, or t
  misc_feature (435)..(435): n is a, c, g, or t
  misc_feature (459)..(459): n is a, c, g, or t
ccacctgttgccatagcatccgggtcgggtgaaccaatccgggcgccctcgccgaacagaggcgggcagttcgcatcgccgaccaacctgaggcgtttttgttgtggcgcgtgaccggaggaggcgggagctcaggaccggcgccttctccttgcttctgggggtcgtggccttgctcccgctgtgcgggaaaagaatccaggcccttccacgcgcgtgtgggtgcgggggccccgaagtgctcgtggttccccgctaggtctccgctggggcaggaaccggaatcatgggtgggaccaccagcacccgccgggtcaccttcgaggcggacgagaaaaanaaaaaaaangaggagaagggnaaanggcaaanggaaaaagagaaaaaacgaaanaaggaaaanacaanaacaggaangaagaaaaanaggaaaanaggagcaaaaggagcaaaagaaanagaagaagtttctgatgaagaattgaaaagaagagtagctgaggagctggcattggagcaagccaagaaagaatccgaagatcagaaacgactaaagcaagccaaagagctggaccgagagagggctgctgccaatgagcagttaaccagagccatccttcgggagaggatatgtagcgaggaggaacgcgctaaggcaaagcacctggctaggcagctggaagagaaagaccgagtgctaaagaagcaggatgcattctacaaagaacagctggctagactggaggagaggagctcagagttctacagagtcaccactgaacaatatcagaaagctgctgaagaggtggaagcaaagttcaagcgatatgagtctcatccagtctgtgctgatctgcaggccaaaattcttcagtgttaccgtgagaacacccaccagaccctcaaatgctccgctctggccacccagtatatgcactgtgtcaatcatgccaaacagagcatgcttgagaagggaggataaaaactttcagaatgagcaaaacaccatcaacgttaattccagagatggaacattttttttcctagtgagaaaacaacccatttgaagagaagaccactaatgagaagaccactaaagagagacatcaagaatggattcagcagaatcatttcacgttttgaacagcagcagtttgaagggccaaagccttgatcagggatcagtcattaaaggacactcttgagtattagtaaaccctcttatgatgattaaaagagaagggcagccctctccaccttttggtactttctattcaacttgcactgaccataaaatgtttctcttctgaacaagccccatcatttggtgaacctccaccctaacaaagtaggatggggttgggggctaaattaattggagtggggcgaggagagagccagaaaacatagatccgagggcagcagtgctgggtggagagagccagaaaacagatctggaggcagcagtgctggatggaattgtctaggctgtggcatgttggttttgtctttcttttctcctttgattatgtaagagctatttcattataacttattatggtgattatacaggcaagaagacaaaaaggagagaaaatgtacctcttctactggaataatgtttatgattacaagtgagataaggtatttttatcaatatgaaggcaaccttggctgataaaacctctatagtgaatactcacatctttacttcactcactatcaataataaatatattttctgacaaaga

SEQ ID NO: 321404 - DNA, 1685 bp, Homo sapiens
ccacctgttgccatagcatccgggtcgggtgaaccaatccgggcgccctcgccgaacagaggcgggcagttcgcatcgccgaccaacctgaggcgtttttgttgtggcgcgtgaccggaggaggcgggagctcaggaccggcgccttctccttgcttctgggggtcgtggccttgctcccgctgtgcgggaaaagaatccaggcccttccacgcgcgtgtgggtgcgggggccccgaagtgctcgtggttccccgctaggtctccgctggggcaggaaccggaatcatgggtgggaccaccagcacccgccgggtcaccttcgaggcggacgagaatgagaacatcaccgtggtgaagggcatccggctttcggaaaatgtgattgatcgaatgaaggaatcctctccatctggttcgaagtctcagcggtattctggtgcttatggtgcctcagtttctgatgaagaattggatcagaaacgactaaagcaagccaaagagctggaccgagagagggctgctgccaatgagcagttaaccagagccatccttcgggagaggatatgtagcgaggaggaacgcgctaaggcaaagcacctggctaggcagctggaagagaaagaccgagtgctaaagaagcaggatgcattctacaaagaacagctggctagactggaggagaggagctcagagttctacagagtcaccactgaacaatatcagaaagctgctgaagaggtggaagcaaagttcaagcgatatgagtctcatccagtctgtgctgatctgcaggccaaaattcttcagtgttaccgtgagaacacccaccagaccctcaaatgctccgctctggccacccagtatatgcactgtgtcaatcatgccaaacagagcatgcttgagaagggaggataaaaactttcagaatgagcaaaacaccatcaacgttaattccagagatggaacattttttttcctagtgagaaaacaacccatttgaagagaagaccactaatgagaagaccactaaagagagacatcaagaatggattcagcagaatcatttcacgttttgaacagcagcagtttgaagggccaaagccttgatcagggatcagtcattaaaggacactcttgagtattagtaaaccctcttatgatgattaaaagagaagggcagccctctccaccttttggtactttctattcaacttgcactgaccataaaatgtttctcttctgaacaagccccatcatttggtgaacctccaccctaacaaagtaggatggggttgggggctaaattaattggagtggggcgaggagagagccagaaaacatagatccgagggcagcagtgctgggtggagagagccagaaaacagatctggaggcagcagtgctggatggaattgtctaggctgtggcatgttggttttgtctttcttttctcctttgattatgtaagagctatttcattataacttattatggtgattatacaggcaagaagacaaaaaggagagaaaatgtacctcttctactggaataatgtttatgattacaagtgagataaggtatttttatcaatatgaaggcaaccttggctgataaaacctctatagtgaatactcacatctttacttcactcactatcaataataaatatattttctgacaaaga

SEQ ID NO: 321405 - DNA, 1176 bp, Homo sapiens
attgtccagactaactcacagtagtgtcaattagtggaactaatttcttagaatttatttaccctttgtcatttttatcatgggaaaaatttagctatctttgaagtttaaggaaaattctttctcttaaacctttttctacatttgcaacatctgtgtcttactgtgcgttttatgtgttctttaaccttgatttttattctgaatgaagaccattggtctcagcggtccctgtgtttgttttcaggcgatatgagtctcatccagtctgtgctgatctgcaggccaaaattcttcagtgttaccgtgagaacacccaccagaccctcaaatgctccgctctggccacccagtatatgcactgtgtcaatcatgccaaacagagcatgcttgagaagggaggataaaaactttcagaatgagcaaaacaccatcaacgttaattccagagatggaacattttttttcctagtgagaaaacaacccatttgaagagaagaccactaatgagaagaccactaaagagagacatcaagaatggattcagcagaatcatttcacgttttgaacagcagcagtttgaagggccaaagccttgatcagggatcagtcattaaaggacactcttgagtattagtaaaccctcttatgatgattaaaagagaagggcagccctctccaccttttggtactttctattcaacttgcactgaccataaaatgtttctcttctgaacaagccccatcatttggtgaacctccaccctaacaaagtaggatggggttgggggctaaattaattggagtggggcgaggagagagccagaaaacatagatccgagggcagcagtgctgggtggagagagccagaaaacagatctggaggcagcagtgctggatggaattgtctaggctgtggcatgttggttttgtctttcttttctcctttgattatgtaagagctatttcattataacttattatggtgattatacaggcaagaagacaaaaaggagagaaaatgtacctcttctactggaataatgtttatgattacaagtgagataaggtatttttatcaatatgaaggcaaccttggctgataaaacctctatagtgaatactcacatctttacttcactcactatcaataataaatatattttctgacaaaga

SEQ ID NO: 321406 - DNA, 728 bp, Homo sapiens
ccacctgttgccatagcatccgggtcgggtgaaccaatccgggcgccctcgccgaacagaggcgggcagttcgcatcgccgaccaacctgaggcgtttttgttgtggcgcgtgaccggaggaggcgggagctcaggaccggcgccttctccttgcttctgggggtcgtggccttgctcccgctgtgcgggaaaagaatccaggcccttccacgcgcgtgtgggtgcgggggccccgaagtgctcgtggttccccgctaggtctccgctggggcaggaaccggaatcatgggtgggaccaccagcacccgccgggtcaccttcgaggcggacgagaatgagaacatcaccgtggtgaagggcatccggctttcggaaaatgtgattgatcgaatgaaggaatcctctccatctggttcgaagtctcagcggtattctggtgcttatggtgcctcagtttctgatgaagaattgaaaagaagagtagctgaggagctggcattggagcaagccaagaaagaatccgaagatcagaaacgacggactaaagcaagcccaaaagagctggaacccgaggagaggggcttgggtggccaaatggagccaggttaaacccaggaaggccatccctttcggggaggagggattatggtaggcggagggagggaaacggcggctaaaggggccaaaggcaccatgtggattattggaaggacaaaagcctagaggc

SEQ ID NO: 321407 - DNA, 2410 bp, Homo sapiens
  misc_feature (1782)..(1782): n is a, c, g, or t
gggaggaagcgctgcagggaccaccgccgtccccaccgccatccgccctcccggcctggcctgcccttgcgcccggctccccagtgcccgccgcccgcccgccgcgctcccgcgctccgttccgcccaggccgcgcccagctggaatgcagagatcgccgcccggctacggcgcacaggacgacccgcccgcccgccgcgactgtgcatgggccccgggacacggggccgccgctgacacgcgcggcctcgccgccggccccgccgccctcgccgcgcccgccgcgcccgcctcgccgcccagcccgcagcgcagtcccccgcgcagccccgagccggggcgctatggcctcagcccggccggccgcggggaacgccaggcggcagacgagtcgcgcatccggcggcccatgaacgccttcatggtgtgggcaaaggacgagcgcaagcggctggctcagcagaacccggacctgcacaacgcggtgctcagcaagatgctgggcaaagcgtggaaggagctgaacgcggcggagaagcggcccttcgtggaggaagccgaacggctgcgcgtgcagcacttgcgcgaccaccccaactacaagtaccggccgcgccgcaagaagcaggcgcgcaaggcccggcggctggagcccggcctcctgctcccgggattagcgcccccgcagccaccgcccgagcctttccccgcggcgtctggctcggctcgcgccttccgcgagctgcccccgctgggcgccgagttcgacggcctggggctgcccacgcccgagcgctcgcctctggacggcctggagcccggcgaggctgccttcttcccaccgcccgcggcgcccgaggactgcgcgctgcggcccttccgcgcgccctacgcgcccaccgagttgtcgcgggaccccggcggttgctacggggctcccctggcggaggcgctcaggaccgcgccccccgcggcgccgctcgctggcctgtactacggcaccctgggcacgcccggcccgtaccccggcccgctgtcgccgccgcccgaggccccgccgctggagagcgccgagccgctggggcccgccgccgatctgtgggccgacgtggacctcaccgagttcgaccagtacctcaactgcagccggactcggcccgacgcccccgggctcccgtaccacgtggcactggccaaactgggcccgcgcgccatgtcctgcccagaggagagcagcctgatctccgcgctgtcggacgccagcagcgcggtctattacagcgcgtgcatctccggctaggccgccggcgccgcccgggtccctgcagcgcttcctcccgcagcccccgcgaccgatccgaccgcgtcgctgccgctctgctctctcatacgcgtgtatgtttggttccatgtcacagccccctaggagccagtgatgctcggccttgcgcccgttccacctcccaggccacccttcctgggcttctgggccacctgccctcggggggcccctgcgagggtgcctggagttcccacgtgtcccggggcttttccaggaagcccgagcccaggacctgttggcagagttgccagggttacatttttgaagcacctgctccttttcttgcagtgtattttctacaaccagattgtattaatattttttactttgcccttttaaaaaatatacctaatacaatatatttaatttttaattaaactcttaaacttttcttccaaaaaaaaaaaaaaaaaaaaaaaaaaaaaaaaaaaaaaaaaaanaaaaaaaaaaaaaaaaaaaaaaaaaaaaaaaaaaaaaaagagaagaggaggcggcgcagcggaaaaaatctttcccctgcggggggccgcactattatcgcagcaccaccccgttagtttagatagaaagagggggccccacaaggaggagcgggtaatatattatatcacacagcgccgcagcggcgccggcgtgatgttatacaacaataactgctgtcgtgtgacaggtagagcacaactatgcgccgatctcaggtggactccctttttgttcaatagaaccacaaccctacttctttatgggcgggggaggtgcaaatcacgaatcgttgggagaacaaaacaaccccctactaacacacaaggagagatattaattaaagccgcctcccacctctggagagctggagacatcaaacaataacaaatcctatctagcataataggatgagtcataatctatgaggtgaatgacagacacacaaacccaaccccttgaatactattatacgcgattgcgagctagcgtgaactagcagaatatgaatatacttcgcccacgacacccgcggtgcgttatctgtatatcctaggaccaccaaccactttatcatctacaccgggg

SEQ ID NO: 321408 - DNA, 1780 bp, Homo sapiens
gggaggaagcgctgcagggaccaccgccgtccccaccgccatccgccctcccggcctggcctgcccttgcgcccggctccccagtgcccgccgcccgcccgccgcgctcccgcgctccgttccgcccaggccgcgcccagctggaatgcagagatcgccgcccggctacggcgcacaggacgacccgcccgcccgccgcgactgtgcatgggccccgggacacggggccgccgctgacacgcgcggcctcgccgccggccccgccgccctcgccgcgcccgccgcgcccgcctcgccgcccagcccgcagcgcagtcccccgcgcagccccgagccggggcgctatggcctcagcccggccggccgcggggaacgccaggcggcagacgagtcgcgcatccggcggcccatgaacgccttcatggtgtgggcaaaggacgagcgcaagcggctggctcagcagaacccggacctgcacaacgcggtgctcagcaagatgctgggcaaagcgtggaaggagctgaacgcggcggagaagcggcccttcgtggaggaagccgaacggctgcgcgtgcagcacttgcgcgaccaccccaactacaagtaccggccgcgccgcaagaagcaggcgcgcaaggcccggcggctggagcccggcctcctgctcccgggattagcgcccccgcagccaccgcccgagcctttccccgcggcgtctggctcggctcgcgccttccgcgagctgcccccgctgggcgccgagttcgacggcctggggctgcccacgcccgagcgctcgcctctggacggcctggagcccggcgaggctgccttcttcccaccgcccgcggcgcccgaggactgcgcgctgcggcccttccgcgcgccctacgcgcccaccgagttgtcgcgggaccccggcggttgctacggggctcccctggcggaggcgctcaggaccgcgccccccgcggcgccgctcgctggcctgtactacggcaccctgggcacgcccggcccgtaccccggcccgctgtcgccgccgcccgaggccccgccgctggagagcgccgagccgctggggcccgccgccgatctgtgggccgacgtggacctcaccgagttcgaccagtacctcaactgcagccggactcggcccgacgcccccgggctcccgtaccacgtggcactggccaaactgggcccgcgcgccatgtcctgcccagaggagagcagcctgatctccgcgctgtcggacgccagcagcgcggtctattacagcgcgtgcatctccggctaggccgccggcgccgcccgggtccctgcagcgcttcctcccgcagcccccgcgaccgatccgaccgcgtcgctgccgctctgctctctcatacgcgtgtatgtttggttccatgtcacagccccctaggagccagtgatgctcggccttgcgcccgttccacctcccaggccacccttcctgggcttctgggccacctgccctcggggggcccctgcgagggtgcctggagttcccacgtgtcccggggcttttccaggaagcccgagcccaggacctgttggcagagttgccagggttacatttttgaagcacctgctccttttcttgcagtgtattttctacaaccagattgtattaatattttttactttgcccttttaaaaaatatacctaatacaatatatttaatttttaattaaactcttaaacttttcttccaaaaaaaaacatacaccaaacataagcaaagaaacaaaaagg

SEQ ID NO: 321409 - DNA, 1558 bp, Homo sapiens
gggaggaagcgctgcagggaccaccgccgtccccaccgccatccgccctcccggcctggcctgcccttgcgcccggctccccagtgcccgccgcccgcccgccgccctcgccgcgcccgccgcgcccgcctcgccgcccagcccgcagcgcagtcccccgcgcagccccgagccggggcgctatggcctcagcccggccggccgcggggaacgccaggcggcagacgagtcgcgcatccggcggcccatgaacgccttcatggtgtgggcaaaggacgagcgcaagcggctggctcagcagaacccggacctgcacaacgcggtgctcagcaagatgctgggcaaagcgtggaaggagctgaacgcggcggagaagcggcccttcgtggaggaagccgaacggctgcgcgtgcagcacttgcgcgaccaccccaactacaagtaccggccgcgccgcaagaagcaggcgcgcaaggcccggcggctggagcccggcctcctgctcccgggattagcgcccccgcagccaccgcccgagcctttccccgcggcgtctggctcggctcgcgccttccgcgagctgcccccgctgggcgccgagttcgacggcctggggctgcccacgcccgagcgctcgcctctggacggcctggagcccggcgaggctgccttcttcccaccgcccgcggcgcccgaggactgcgcgctgcggcccttccgcgcgccctacgcgcccaccgagttgtcgcgggaccccggcggttgctacggggctcccctggcggaggcgctcaggaccgcgccccccgcggcgccgctcgctggcctgtactacggcaccctgggcacgcccggcccgtaccccggcccgctgtcgccgccgcccgaggccccgccgctggagagcgccgagccgctggggcccgccgccgatctgtgggccgacgtggacctcaccgagttcgaccagtacctcaactgcagccggactcggcccgacgcccccgggctcccgtaccacgtggcactggccaaactgggcccgcgcgccatgtcctgcccagaggagagcagcctgatctccgcgctgtcggacgccagcagcgcggtctattacagcgcgtgcatctccggctaggccgccggcgccgcccgggtccctgcagcgcttcctcccgcagcccccgcgaccgatccgaccgcgtcgctgccgctctgctctctcatacgcgtgtatgtttggttccatgtcacagccccctaggagccagtgatgctcggccttgcgcccgttccacctcccaggccacccttcctgggcttctgggccacctgccctcggggggcccctgcgagggtgcctggagttcccacgtgtcccggggcttttccaggaagcccgagcccaggacctgttggcagagttgccagggttacatttttgaagcacctgctccttttcttgcagtgtattttctacaaccagattgtattaatattttttactttgcccttttaaaaaatatacctaatacaatatatttaatttttaattaaa

SEQ ID NO: 321410 - DNA, 1720 bp, Homo sapiens
gggaggaagcgctgcagggaccaccgccgtccccaccgccatccgccctcccggcctggcctgcccttgcgcccggctccccagtgcccgccgcccgcccgccgcgctcccgcgctccgttccgcccaggccgcgcccagctggaatgcagagatcgccgcccggctacggcgcacaggacgacccgcccgcccgccgcgactgtgcatgggccccgggacacggggccgccgctgacacgcgcggcctcgccgccggccccgccgccctcgccgcgcccgccgcgcccgcctcgccgcccagcccgcagcgcagtcccccgcgcagccccgagccggggcgctatggcctcagcccggccggccgcggggaacgccaggcggcagacgagtcgcgcatccggcggcccatgaacgccttcatggtgtgggcaaaggacgagcgcaagcggctggctcagcagaacccggacctgcacaacgcggtgctcagcaagatgctgggcaaagcgtggaaggagctgaacgcggcggagaagcggcccttcgtggaggaagccgaacggctgcgcgtgcagcacttgcgcgaccaccccaactacaagtaccggccgcgccgcaagaagcaggcgcgcaaggcccggcggctggagcccggcctcctgctcccgggattagcgcccccgcagccaccgcccgagcctttccccgcggcgtctggctcggctcgcgccttccgcgagctgcccccgctgggcgccgagttcgacggcctggggctgcccacgcccgagcgctcgcctctggacggcctggagcccggcgaggctgccttcttcccaccgcccgcggcgcccgaggactgcgcgctgcggcccttccgcgcgccctacgcgcccaccgagttgtcgcgggaccccggcggttgctacggggctcccctggcggaggcgctcaggaccgcgccccccgcggcgccgctcgctggcctgtactacggcaccctgggcacgcccggcccgtaccccggcccgctgtcgccgccgcccgaggccccgccgctggagagcgccgagccgctggggcccgccgccgatctgtgggccgacgtggacctcaccgagttcgaccagtacctcaactgcagccggactcggcccgacgcccccgggctcccgtaccacgtggcactggccaaactgggcccgcgcgccatgtcctgcccagaggagagcagcctgatctccgcgctgtcggacgccagcagcgcggtctattacagcgcgtgcatctccggctaggccgccggcgccgcccgggtccctgcagcgcttcctcccgcagcccccgcgaccgatccgaccgcgtcgctgccgctctgctctctcatacgcgtgtatgtttggttccatgtcacagccccctaggagccagtgatgctcggccttgcgcccgttccacctcccaggccacccttcctgggcttctgggccacctgccctcggggggcccctgcgagggtgcctggagttcccacgtgtcccggggcttttccaggaagcccgagcccaggacctgttggcagagttgccagggttacatttttgaagcacctgctccttttcttgcagtgtattttctacaaccagattgtattaatattttttactttgcccttttaaaaaatatacctaatacaatatatttaatttttaattaaa

SEQ ID NO: 321411 - DNA, 2390 bp, Homo sapiens
  misc_feature (1762)..(1762): n is a, c, g, or t
gggaggaagcgctgcagggaccaccgccgtccccaccgccatccgccctcccggcctggcctgcccttgcgcccggctccccagtgcccgccgcccgcccgccgcgctcccgcgctccgttccgcccaggccgcgcccagctggaatgcagagatcgccgcccggctacggcgcacaggacgacccgcccgcccgccgcgactgtgcatgggccccgggacacggggccgccgctgacacgcgcggcctcgccgccggccccgccgccctcgccgcgcccgccgcgcccgcctcgccgcccagcccgcagcgcagtcccccgcgcagccccgagccggggcgctatggcctcagcccggccggccgcggggaacgccaggcggcagacgagtcgcgcatccggcggcccatgaacgccttcatggtgtgggcaaaggacgagcgcaagcggctggctcagcagaacccggacctgcacaacgcggtgctcagcaagatgctgggcaaagcgtggaaggagctgaacgcggcggagaagcggcccttcgtggaggaagccgaacggctgcgcgtgcagcacttgcgcgaccaccccaactacaagtaccggccgcgccgcaagaagcaggcgcgcaaggcccggcggctggagcccggcctcctgctcccgggattagcgcccccgcagccaccgcccgagcctttccccgcggcgtctggctcggctcgcgccttccgcgagctgcccccgctgggcgccgagttcgacggcctggggctgcccacgcccgagcgctcgcctctggacggcctggagcccggcgaggctgccttcttcccaccgcccgcggcgcccgaggactgcgcgctgcggcccttccgcgcgccctacgcgcccaccgagttgtcgcgggaccccggcggttgctacggggctcccctggcggaggcgctcaggaccgcgccccccgcggcgccgctcgctggcctgtactacggcaccctgggcacgcccggcccgtaccccggcccgctgtcgccgccgcccgaggccccgccgctggagagcgccgagccgctggggcccgccgccgatctgtgggccgacgtggacctcaccgagttcgaccagtacctcaactgcagccggactcggcccgacgcccccgggctcccgtaccacgtggcactggccaaactgggcccgcgcgccatgtcctgcccagaggagagcagcctgatctccgcgctgtcggacgccagcagcgcggtctattacagcgcgtgcatctccggctaggccgccggcgccgcccgggtccctgcagcgcttcctcccgcagcccccgcgaccgatccgaccgcgtcgctgccgctctgctctctcatacgcgtgtatgtttggttccatgtcacagccccctaggagccagtgatgctcggccttgcgcccgttccacctcccaggccacccttcctgggcttctgggccacctgccctcggggggcccctgcgagggtgcctggagttcccacgtgtcccggggcttttccaggaagcccgagcccaggacctgttggcagagttgccagggttacatttttgaagcacctgctccttttcttgcagtgtattttctacaaccagattgtattaatattttttactttgcccttttaaaaaatatacctaatacaatatatttaatttttaattaaaaaaaaaaaaaaaaaaaaaaaaaaaaaaaaaaaaaaaaaaaanaaaaaaaaaaaaaaaaaaaaaaaaaaaaaaaaaaaaaaagagaagaggaggcggcgcagcggaaaaaatctttcccctgcggggggccgcactattatcgcagcaccaccccgttagtttagatagaaagagggggccccacaaggaggagcgggtaatatattatatcacacagcgccgcagcggcgccggcgtgatgttatacaacaataactgctgtcgtgtgacaggtagagcacaactatgcgccgatctcaggtggactccctttttgttcaatagaaccacaaccctacttctttatgggcgggggaggtgcaaatcacgaatcgttgggagaacaaaacaaccccctactaacacacaaggagagatattaattaaagccgcctcccacctctggagagctggagacatcaaacaataacaaatcctatctagcataataggatgagtcataatctatgaggtgaatgacagacacacaaacccaaccccttgaatactattatacgcgattgcgagctagcgtgaactagcagaatatgaatatacttcgcccacgacacccgcggtgcgttatctgtatatcctaggaccaccaaccactttatcatctacaccgggg

SEQ ID NO: 321412 - DNA, 1459 bp, Homo sapiens
gggaggagagaggagggggaggtgcagagagctctatgccatcctgtttacagcgaggcaagatgaatcattatgtctgtgcattttgttttacttatctgtgtatatagtgtacataaaggacagacgagtcctaattgacaacatctagtctttctggatgttaaagaggttgccagtgtatgacaaaagtagagttagtaaactaatatattttgtacattttgttttacaagtcctaggaaagattgtcttctgaaaatttgatgtcttctgggttgatggagatgggaagggttctaggccagaatgttcacatttggaagactctttcaaattataactgttgttacatgtttgcagtttattcaagactgctgtatacatagtagacaaattaactccttacttgaaacatctagtctatctagatgtttagaagtgcccgatgtatgttaaatgtataggtagtaaaataccactttgtaaatatctttttgctaaaattcataggaaatgcttttggaaattgaattgtgaagccacctttgtgaacagtatagtaatgtctatacttgttcaatagtttagaggaggtaggagggaagaaattgcaaaaggtaatattactagtgtgttcatacttggacattttcagacaccatttttctatatgttttgtgcattttgttttgctctgtatatagtatatataatggacaaatagtcctaatttttcaacatctagtctctagatgttaaagaggttgccagtgtatgacaaaggagtaaaattagcatattttgtacactttgtgttgaaattcgtaggaaaacttgtcttctgtaaagacttttgcataggaatttgtttgaccatctctaagcattacacgtgcctgtacttgtccactggattgaaggcagagaaggaagggaggagggaatgattcaaggccaaaatggccacatttagaagatacctcagatgataaccattgttatgtgtgtgcaattttatttaacagtgctgtgtatgtggtggacaagttatatgaaatatctcatcaacaaccgataatcaccaccaacaatgactaatcaaactaactcaaaacaatgataaccatacacaacactaaaggacgaacctgatctcttatactagtatcctttaaatcattttattggcacaaataacctcctcggatcctgcctcactcatttacaccaaacaacccaatatctataaaacctagcatggcatccccttttgagcgggcagtgatttacggttcgtctaagattaaaaatgcctagcccctttctacccaggaactaaccctatccccattatttttcgaactccgcacttaccaatacggcggcgtaccgaatgggccattcgccatgggcccaataaacccgcagacatcttcgcaaggcacgctgccgcaaa

SEQ ID NO: 321413 - DNA, 242 bp, Homo sapiens
gcggccgcctactactactactgctcgaattcaagcttctaacgatgtacggggacatgatacatactgtacagtctcagtcccataaaattggatgttgtgcctacacacaggatctagaagaatatgtcaaactataaactgcttgtgattgtgaatgactttgttctttgcttgtgtttttcaatttcctataatgcacatactaacttttaaaaaataaaggttattttaaaagcctg

SEQ ID NO: 321414 - DNA, 3997 bp, Homo sapiens
gggaggagagaggagggggaggtgcagagagctctatgccatcctgtttacagcgaggcaagatgaatcattatgtctgtgcattttgttttacttatctgtgtatatagtgtacataaaggacagacgagtcctaattgacaacatctagtctttctggatgttaaagaggttgccagtgtatgacaaaagtagagttagtaaactaatatattttgtacattttgttttacaagtcctaggaaagattgtcttctgaaaatttgatgtcttctgggttgatggagatgggaagggttctaggccagaatgttcacatttggaagactctttcaaattataactgttgttacatgtttgcagtttattcaagactgctgtatacatagtagacaaattaactccttacttgaaacatctagtctatctagatgtttagaagtgcccgatgtatgttaaatgtataggtagtaaaataccactttgtaaatatctttttgctaaaattcataggaaatgcttttggaaattgaattgtgaagccacctttgtgaacagtatagtaatgtctatacttgttcaatagtttagaggaggtaggagggaagaaattgcaaaaggtaatattactagtgtgttcatacttggacattttcagacaccatttttctatatgttttgtgcattttgttttgctctgtatatagtatatataatggacaaatagtcctaatttttcaacatctagtctctagatgttaaagaggttgccagtgtatgacaaaggagtaaaattagcatattttgtacactttgtgttgaaattcgtaggaaaacttgtcttctgtaaagacttttgcataggaatttgtttgaccatctctaagcattacacgtgcctgtacttgtccactggattgaaggcagagaaggaagggaggagggaatgattcaaggccaaaatggccacatttagaagatacctcagatgataaccattgttatgtgtgtgcaattttatttaacagtgctgtgtatgtggtggacaagttatatgaaatatctagtctttctagatatttggaagtgcttgatgtatttaaaagtggtagtagaataacactttgtaaatagcttttaaaaactgatgggaaatgctgtttggaagtggaattgttgaaccacctgggaggtgggagggaagaaattgcaaatggtgttttgccattgtttattagaaaatttcagcttaatccattgtgtatatgttacatgcatttcatttaactttgctatactgtatatattgtatatataacggacaaattagtcccgattttataatatctagtctctagatattaaagaggttgccaatgtatgacagaagtagagttagtaaactaacacattttgtacactttgttaaaatttgtagaaaggctgtcttctgaaaaggacttttggaagtgagataacatcagctctaagtgacacgtgcctatatccatcaggttggtggtggagaggagttggaaggaatgaagggttctagaccagaatgttcgtatttagaagacactatcagatataaccattgttacatgtgtgtagtttattcaaccctactgtgtatatagcggacaaacttaagtccttatttgaaacatctagtctttctagatgtttagaagtgcacaaagtatgttaaaagtagaggtagtaaataacacattttgtagctatccttttgatatgaaatattgtcttggaaattgatcaattctctgagcagtacccattttgatatttgtgctggttcagggggaaggaggagcacaaagtgcaaagggctttctaccagtgtccagtgtgtttatgaggaggcacattgaccattgtcccttatgtctgcattttcatttactgtgctgtgtatatagtgtatataagcggacataggagtcctaatttacgtctagtcgatgttaaaaaggttgccagtatatgacaaaagtagaattagtaaactactacattgagtacactttgtgttaaaattcatagggaagacttcttaaaaacaagtgaaattgttaaacccccccctaagcattacagatggcttatagctgtccacggggttggtagaggtgggaaagggaagggttctaggccagaatgttcctatttagaagacactcaaattacagtctgtgttatgtatgtataccatttattcaatgctactgtgtatataatggaaaacttaagtccagtttgaaacatctagtctttctaggtgtttaaaagtgtacaacggcctgtcgcagtggcgcatgcctgtaatcccagcactttgggaggccgaggcaggcggatcacgaggtcaagagatcaggaccatcttggccaacatggtgaaaccccatctttactaaaaatacaaaaattagctggtcgtggtggtgcccacctgtagccccagttactcgagaggctgaggcaggagaatcgcttgaacttgggaggcggaagttgcagtgagccaagatcgcaccactgcactccagcctggcgacagagcgaggctccgtttcaaaaaaaaaagtgcacaatgtaggttaacagtagagggcttaagtaacacccctctaagcatttgttttcagtacttcctaggagtggttgcatttgggaatggaattgttaaaacttgatgcttaggagcgaatgcagactattcattgggtgtttggggtgggggaagggggggtgggcagaggaggtatgcagggagaggggttctgtgctcctgagattagttcagatggtctaaccattgttctatatgtgcattttagttaatattgtgtattaaaggataagtcttaatgctcaaagtatgttaaaaatagatgtagtaaatcagtccctttgtgaatgtccttttgttagtttttaggaaggcctgtcctctgggagtgacctttattagtccaccccttggagctagacatcctgtacttagtcacggggatggtggaagagggagaagaggaagggtgaagggaagggctctttgctagtatctccatatctagacgatggttttagatgataaccacaggtctacaagagcgtttttagtaaagtgcctgtgttcattgtggacaaagttattattttgcaacatctaagctttacgaatggggtgacaacttatgataaaaactagagctagtgaattagcctatttgtaaatacctttgttataattgataggatacatcttggacatggaattgttaagccacctctgagcagtgtatgtcaggacttgttcattaggttggcagcagaggggcagaaggaattatacaggtagagatgtatgcagatgtgtccatatatgtccatatttacattttgatagccattgatgtatgcatctcttggctgtactataagaacacattaattcaatggaaatacactttgctaatattttaatggtatagatctgctaatgaattctcttaaaaacatactgtattctgttgctgtgtgtttcattttaaattgagcattaagggaatgcagcatttaaatcagaactctgccaatgcttttatctagaggcgtgttgccatttttgtcttatatgaaatttctgtcccaagaaaggcaggattacatctttttttttttttttagcagtttgagttggtgtagtgtattcttggttatcagaatactcatatagctttgggattttgaattggtaaatattcatgatgtgtgaaaaatcatgatacatactgtacagtctcagtcccataaaattggatgttgtgcctacacacaggatctagaagaatatgtcaaactataaactgcttgtgattgtgaatgactttgttctttgcttgtgtttttcaatttcctataatgcacatactaacttttaaaaaataaaggttattttaaaagcctg

SEQ ID NO: 321415 - DNA, 4020 bp, Homo sapiens
gggaggagagaggagggggaggtgcagagagctctatgccatcctgtttacagcgaggcaagatgaatcattatgtctgtgcattttgttttacttatctgtgtatatagtgtacataaaggacagacgagtcctaattgacaacatctagtctttctggatgttaaagaggttgccagtgtatgacaaaagtagagttagtaaactaatatattttgtacattttgttttacaagtcctaggaaagattgtcttctgaaaatttgatgtcttctgggttgatggagatgggaagggttctaggccagaatgttcacatttggaagactctttcaaattataactgttgttacatgtttgcagtttattcaagactgctgtatacatagtagacaaattaactccttacttgaaacatctagtctatctagatgtttagaagtgcccgatgtatgttaaatgtataggtagtaaaataccactttgtaaatatctttttgctaaaattcataggaaatgcttttggaaattgaattgtgaagccacctttgtgaacagtatagtaatgtctatacttgttcaatagtttagaggaggtaggagggaagaaattgcaaaaggtaatattactagtgtgttcatacttggacattttcagacaccatttttctatatgttttgtgcattttgttttgctctgtatatagtatatataatggacaaatagtcctaatttttcaacatctagtctctagatgttaaagaggttgccagtgtatgacaaaggagtaaaattagcatattttgtacactttgtgttgaaattcgtaggaaaacttgtcttctgtaaagacttttgcataggaatttgtttgaccatctctaagcattacacgtgcctgtacttgtccactggattgaaggcagagaaggaagggaggagggaatgattcaaggccaaaatggccacatttagaagatacctcagatgataaccattgttatgtgtgtgcaattttatttaacagtgctgtgtatgtggtggacaagttatatgaaatatctagtctttctagatatttggaagtgcttgatgtatttaaaagtggtagtagaataacactttgtaaatagcttttaaaaactgatgggaaatgctgtttggaagtggaattgttgaaccacctgggaggtgggagggaagaaattgcaaatggtgttttgccattgtttattagaaaatttcagcttaatccattgtgtatatgttacatgcatttcatttaactttgctatactgtatatattgtatatataacggacaaattagtcccgattttataatatctagtctctagatattaaagaggttgccaatgtatgacagaagtagagttagtaaactaacacattttgtacactttgttaaaatttgtagaaaggctgtcttctgaaaaggacttttggaagtgagataacatcagctctaagtgacacgtgcctatatccatcaggttggtggtggagaggagttggaaggaatgaagggttctagaccagaatgttcgtatttagaagacactatcagatataaccattgttacatgtgtgtagtttattcaaccctactgtgtatatagcggacaaacttaagtccttatttgaaacatctagtctttctagatgtttagaagtgcacaaagtatgttaaaagtagaggtagtaaataacacattttgtagctatccttttgatatgaaatattgtcttggaaattgatcaattctctgagcagtacccattttgatatttgtgctggttcagggggaaggaggagcacaaagtgcaaagggctttctaccagtgtccagtgtgtttatgaggaggcacattgaccattgtcccttatgtctgcattttcatttactgtgctgtgtatatagtgtatataagcggacataggagtcctaatttacgtctagtcgatgttaaaaaggttgccagtatatgacaaaagtagaattagtaaactactacattgagtacactttgtgttaaaattcatagggaagacttcttaaaaacaagtgaaattgttaaacccccccctaagcattacagatggcttatagctgtccacggggttggtagaggtgggaaagggaagggttctaggccagaatgttcctatttagaagacactcaaattacagtctgtgttatgtatgtataccatttattcaatgctactgtgtatataatggaaaacttaagtccagtttgaaacatctagtctttctaggtgtttaaaagtgtacaacggcctgtcgcagtggcgcatgcctgtaatcccagcactttgggaggccgaggcaggcggatcacgaggtcaagagatcaggaccatcttggccaacatggtgaaaccccatctttactaaaaataaaaaaaaaaaaaaaaaaaaaaaacaaaaattagctggtcgtggtggtgcccacctgtagccccagttactcgagaggctgaggcaggagaatcgcttgaacttgggaggcggaagttgcagtgagccaagatcgcaccactgcactccagcctggcgacagagcgaggctccgtttcaaaaaaaaaagtgcacaatgtaggttaacagtagagggcttaagtaacacccctctaagcatttgttttcagtacttcctaggagtggttgcatttgggaatggaattgttaaaacttgatgcttaggagcgaatgcagactattcattgggtgtttggggtgggggaagggggggtgggcagaggaggtatgcagggagaggggttctgtgctcctgagattagttcagatggtctaaccattgttctatatgtgcattttagttaatattgtgtattaaaggataagtcttaatgctcaaagtatgttaaaaatagatgtagtaaatcagtccctttgtgaatgtccttttgttagtttttaggaaggcctgtcctctgggagtgacctttattagtccaccccttggagctagacatcctgtacttagtcacggggatggtggaagagggagaagaggaagggtgaagggaagggctctttgctagtatctccatatctagacgatggttttagatgataaccacaggtctacaagagcgtttttagtaaagtgcctgtgttcattgtggacaaagttattattttgcaacatctaagctttacgaatggggtgacaacttatgataaaaactagagctagtgaattagcctatttgtaaatacctttgttataattgataggatacatcttggacatggaattgttaagccacctctgagcagtgtatgtcaggacttgttcattaggttggcagcagaggggcagaaggaattatacaggtagagatgtatgcagatgtgtccatatatgtccatatttacattttgatagccattgatgtatgcatctcttggctgtactataagaacacattaattcaatggaaatacactttgctaatattttaatggtatagatctgctaatgaattctcttaaaaacatactgtattctgttgctgtgtgtttcattttaaattgagcattaagggaatgcagcatttaaatcagaactctgccaatgcttttatctagaggcgtgttgccatttttgtcttatatgaaatttctgtcccaagaaaggcaggattacatctttttttttttttttagcagtttgagttggtgtagtgtattcttggttatcagaatactcatatagctttgggattttgaattggtaaatattcatgatgtgtgaaaaatcatgatacatactgtacagtctcagtcccataaaattggatgttgtgcctacacacaggatctagaagaatatgtcaaactataaactgcttgtgattgtgaatgactttgttctttgcttgtgtttttcaatttcctataatgcacatactaacttttaaaaaataaaggttattttaaaagcctg

SEQ ID NO: 321416 - DNA, 4424 bp, Homo sapiens
gggaggagagaggagggggaggtgcagagagctctatgccatcctgtttacagcgaggcaagatgaatcattatgtctgtgcattttgttttacttatctgtgtatatagtgtacataaaggacagacgagtcctaattgacaacatctagtctttctggatgttaaagaggttgccagtgtatgacaaaagtagagttagtaaactaatatattttgtacattttgttttacaagtcctaggaaagattgtcttctgaaaatttgatgtcttctgggttgatggagatgggaagggttctaggccagaatgttcacatttggaagactctttcaaattataactgttgttacatgtttgcagtttattcaagactgctgtatacatagtagacaaattaactccttacttgaaacatctagtctatctagatgtttagaagtgcccgatgtatgttaaatgtataggtagtaaaataccactttgtaaatatctttttgctaaaattcataggaaatgcttttggaaattgaattgtgaagccacctttgtgaacagtatagtaatgtctatacttgttcaatagtttagaggaggtaggagggaagaaattgcaaaaggtaatattactagtgtgttcatacttggacattttcagacaccatttttctatatgttttgtgcattttgttttgctctgtatatagtatatataatggacaaatagtcctaatttttcaacatctagtctctagatgttaaagaggttgccagtgtatgacaaaggagtaaaattagcatattttgtacactttgtgttgaaattcgtaggaaaacttgtcttctgtaaagacttttgcataggaatttgtttgaccatctctaagcattacacgtgcctgtacttgtccactggattgaaggcagagaaggaagggaggagggaatgattcaaggccaaaatggccacatttagaagatacctcagatgataaccattgttatgtgtgtgcaattttatttaacagtgctgtgtatgtggtggacaagttatatgaaatatctagtctttctagatatttggaagtgcttgatgtatttaaaagtggtagtagaataacactttgtaaatagcttttaaaaactgatgggaaatgctgtttggaagtggaattgttgaaccacctgggaggtgggagggaagaaattgcaaatggtgttttgccattgtttattagaaaatttcagcttaatccattgtgtatatgttacatgcatttcatttaactttgctatactgtatatattgtatatataacggacaaattagtcccgattttataatatctagtctctagatattaaagaggttgccaatgtatgacagaagtagagttagtaaactaacacattttgtacactttgttaaaatttgtagaaaggctgtcttctgaaaaggacttttggaagtgagataacatcagctctaagtgacacgtgcctatatccatcaggttggtggtggagaggagttggaaggaatgaagggttctagaccagaatgttcgtatttagaagacactatcagatataaccattgttacatgtgtgtagtttattcaaccctactgtgtatatagcggacaaacttaagtccttatttgaaacatctagtctttctagatgtttagaagtgcacaaagtatgttaaaagtagaggtagtaaataacacattttgtagctatccttttgatatgaaatattgtcttggaaattgatcaattctctgagcagtacccattttgatatttgtgctggttcagggggaaggaggagcacaaagtgcaaagggctttctaccagtgtccagtgtgtttatgaggaggcacattgaccattgtcccttatgtctgcattttcatttactgtgctgtgtatatagtgtatataagcggacataggagtcctaatttacgtctagtcgatgttaaaaaggttgccagtatatgacaaaagtagaattagtaaactactacattgagtacactttgtgttaaaattcatagggaagacttcttaaaaacaagtgaaattgttaaacccccccctaagcattacagatggcttatagctgtccacggggttggtagaggtgggaaagggaagggttctaggccagaatgttcctatttagaagacactcaaattacagtctgtgttatgtatgtataccatttattcaatgctactgtgtatataatggaaaacttaagtccagtttgaaacatctagtctttctaggtgtttaaaagtgtacaacggcctgtcgcagtggcgcatgcctgtaatcccagcactttgggaggccgaggcaggcggatcacgaggtcaagagatcaggaccatcttggccaacatggtgaaaccccatctttactaaaaatacaaaaattagctggtcgtggtggtgcccacctgtagccccagttactcgagaggctgaggcaggagaatcgcttgaacttgggaggcggaagttgcagtgagccaagatcgcaccactgcactccagcctggcgacagagcgaggctccgtttcaaaaaaaaaagtgcacaatgtaggttaacagtagagggcttaagtaacacccctctaagcatttgttttcagtacttcctaggagtggttgcatttgggaatggaattgttaaaacttgatgcttaggagcgaatgcagactattcattgggtgtttggggtgggggaagggggggtgggcagaggaggtatgcagggagaggggttctgtgctcctgagattagttcagatggtctaaccattgttctatatgtgcattttagttaatattgtgtattaaaggataagtcttaatgctcaaagtatgttaaaaatagatgtagtaaatcagtccctttgtgaatgtccttttgttagtttttaggaaggcctgtcctctgggagtgacctttattagtccaccccttggagctagacatcctgtacttagtcacggggatggtggaagagggagaagaggaagggtgaagggaagggctctttgctagtatctccatatctagacgatggttttagatgataaccacaggtctacaagagcgtttttagtaaagtgcctgtgttcattgtggacaaagttattattttgcaacatctaagctttacgaatggggtgacaacttatgataaaaactagagctagtgaattagcctatttgtaaatacctttgttataattgataggatacatcttggacatggaattgttaagccacctctgagcagtgtatgtcaggacttgttcattaggttggcagcagaggggcagaaggaattatacaggtagagatgtatgcagatgtgtccatatatgtccatatttacattttgatagccattgatgtatgcatctcttggctgtactataagaacacattaattcaatggaaatacactttgctaatattttaatggtatagatctgctaatgaattctcttaaaaacatactgtattctgttgctgtgtgtttcattttaaattgagcattaagggaatgcagcatttaaatcagaactctgccaatgcttttatctagaggcgtgttgccatttttgtcttatatgaaatttctgtcccaagaaaggcaggattacatctttttttttttttttagcagtttgagttggtgtagtgtattcttggttatcagaatactcatatagctttgggattttgaattggtaaatattcatgatgtgtgaaaaatcatgatacatactgtacagtctcagtcccataaaattggatgttgtgcctacacacaggatctagaagaatatgtcaaactataaactgcttgtgattgtgaatgactttgttctttgcttgtgtttttcaatttcctataatgcacatactaacttttaaaaaataaaggttattttaaaagcctgaaaaaaaaaaaaaaaaaaaaaaaaaaaaaaaaaaaaaaaaaaaaaaaaaaaaaaaaaaaaaaaaaaaaaaaaaaaaaaaaaaaaaaaaaacaaaaaaaaaaaaaaaaaaaaaaaaaaaaaaaaaaaaaaaaaaaaaaagaaaaaaagagaacaaaaaaaaaaaaaaaaacattagacggggggggcgggagcaagaaaaaattcaacgcggggggagtgaagaagggacgagggatgacgaacatatattgaagagaggagagagggccagtagcgagagagagcacagagaaggggtaggggcggcagagtacagtataaaaagccaggagagtgggggggaaagagaggaatagaaagctactgggagagaggaagaacaaggatgtaggggcgagaagagctggagagaaaaaaaaaagaagag

SEQ ID NO: 321417 - DNA, 3943 bp, Homo sapiens
gggaggagagaggagggggaggtgcagagagctctatgccatcctgtttacagcgaggcaagatgaatcattatgtctgtgcattttgttttacttatctgtgtatatagtgtacataaaggacagacgagtcctaattgacaacatctagtctttctggatgttaaagaggttgccagtgtatgacaaaagtagagttagtaaactaatatattttgtacattttgttttacaagtcctaggaaagattgtcttctgaaaatttgatgtcttctgggttgatggagatgggaagggttctaggccagaatgttcacatttggaagactctttcaaattataactgttgttacatgtttgcagtttattcaagactgctgtatacatagtagacaaattaactccttacttgaaacatctagtctatctagatgtttagaagtgcccgatgtatgttaaatgtataggtagtaaaataccactttgtaaatatctttttgctaaaattcataggaaatgcttttggaaattgaattgtgaagccacctttgtgaacagtatagtaatgtctatacttgttcaatagtttagaggaggtaggagggaagaaattgcaaaaggtaatattactagtgtgttcatacttggacattttcagacaccatttttctatatgttttgtgcattttgttttgctctgtatatagtatatataatggacaaatagtcctaatttttcaacatctagtctctagatgttaaagaggttgccagtgtatgacaaaggagtaaaattagcatattttgtacactttgtgttgaaattcgtaggaaaacttgtcttctgtaaagacttttgcataggaatttgtttgaccatctctaagcattacacgtgcctgtacttgtccactggattgaaggcagagaaggaagggaggagggaatgattcaaggccaaaatggccacatttagaagatacctcagatgataaccattgttatgtgtgtgcaattttatttaacagtgctgtgtatgtggtggacaagttatatgaaatatctagtctttctagatatttggaagtgcttgatgtatttaaaagtggtagtagaataacactttgtaaatagcttttaaaaactgatgggaaatgctgtttggaagtggaattgttgaaccacctgggaggtgggagggaagaaattgcaaatggtgttttgccattgtttattagaaaatttcagcttaatccattgtgtatatgttacatgcatttcatttaactttgctatactgtatatattgtatatataacggacaaattagtcccgattttataatatctagtctctagatattaaagaggttgccaatgtatgacagaagtagagttagtaaactaacacattttgtacactttgttaaaatttgtagaaaggctgtcttctgaaaaggacttttggaagtgagataacatcagctctaagtgacacgtgcctatatccatcaggttggtggtggagaggagttggaaggaatgaagggttctagaccagaatgttcgtatttagaagacactatcagatataaccattgttacatgtgtgtagtttattcaaccctactgtgtatatagcggacaaacttaagtccttatttgaaacatctagtctttctagatgtttagaagtgcacaaagtatgttaaaagtagaggtagtaaataacacattttgtagctatccttttgatatgaaatattgtcttggaaattgatcaattctctgagcagtacccattttgatatttgtgctggttcagggggaaggaggagcacaaagtgcaaagggctttctaccagtgtccagtgtgtttatgaggaggcacattgaccattgtcccttatgtctgcattttcatttactgtgctgtgtatatagtgtatataagcggacataggagtcctaatttacgtctagtcgatgttaaaaaggttgccagtatatgacaaaagtagaattagtaaactactacattgagtacactttgtgttaaaattcatagggaagacttcttaaaaacaagtgaaattgttaaacccccccctaagcattacagatggcttatagctgtccacggggttggtagaggtgggaaagggaagggttctaggccagaatgttcctatttagaagacactcaaattacagtctgtgttatgtatgtataccatttattcaatgctactgtgtatataatggaaaacttaagtccagtttgaaacatctagtctttctaggtgtttaaaagtgtacaacggcctgtcgcagtggcgcatgcctgtaatcccagcactttgggaggccgaggcaggcggatcacgaggtcaagagatcaggaccatcttggccaacatggtgaaaccccatctttactaaaaatacaaaaattagctggtcgtggtggtgcccacctgtagccccagttactcgagaggctgaggcaggagaatcgcttgaacttgggaggcggaagttgcagtgagccaagatcgcaccactgcactccagcctggcgacagagcgaggctccgtttcaaaaaaaaaagtgcacaatgtaggttaacagtagagggcttaagtaacacccctctaagcatttgttttcagtacttcctaggagtggttgcatttgggaatggaattgttaaaacttgatgcttaggagcgaatgcagactattcattgggtgtttggggtgggggaagggggggtgggcagaggaggtatgcagggagaggggttctgtgctcctgagattagttcagatggtctaaccattgttctatatgtgcattttagttaatattgtgtattaaaggataagtcttaatgctcaaagtatgttagaaggcctgtcctctgggagtgacctttattagtccaccccttggagctagacatcctgtacttagtcacggggatggtggaagagggagaagaggaagggtgaagggaagggctctttgctagtatctccatatctagacgatggttttagatgataaccacaggtctacaagagcgtttttagtaaagtgcctgtgttcattgtggacaaagttattattttgcaacatctaagctttacgaatggggtgacaacttatgataaaaactagagctagtgaattagcctatttgtaaatacctttgttataattgataggatacatcttggacatggaattgttaagccacctctgagcagtgtatgtcaggacttgttcattaggttggcagcagaggggcagaaggaattatacaggtagagatgtatgcagatgtgtccatatatgtccatatttacattttgatagccattgatgtatgcatctcttggctgtactataagaacacattaattcaatggaaatacactttgctaatattttaatggtatagatctgctaatgaattctcttaaaaacatactgtattctgttgctgtgtgtttcattttaaattgagcattaagggaatgcagcatttaaatcagaactctgccaatgcttttatctagaggcgtgttgccatttttgtcttatatgaaatttctgtcccaagaaaggcaggattacatctttttttttttttttagcagtttgagttggtgtagtgtattcttggttatcagaatactcatatagctttgggattttgaattggtaaatattcatgatgtgtgaaaaatcatgatacatactgtacagtctcagtcccataaaattggatgttgtgcctacacacaggatctagaagaatatgtcaaactataaactgcttgtgattgtgaatgactttgttctttgcttgtgtttttcaatttcctataatgcacatactaacttttaaaaaataaaggttattttaaaagcctg

SEQ ID NO: 321418 - DNA, 4118 bp, Homo sapiens
  misc_feature (4027)..(4027): n is a, c, g, or t
  misc_feature (4044)..(4044): n is a, c, g, or t
  misc_feature (4092)..(4092): n is a, c, g, or t
gggaggagagaggagggggaggtgcagagagctctatgccatcctgtttacagcgaggcaagatgaatcattatgtctgtgcattttgttttacttatctgtgtatatagtgtacataaaggacagacgagtcctaattgacaacatctagtctttctggatgttaaagaggttgccagtgtatgacaaaagtagagttagtaaactaatatattttgtacattttgttttacaagtcctaggaaagattgtcttctgaaaatttgatgtcttctgggttgatggagatgggaagggttctaggccagaatgttcacatttggaagactctttcaaattataactgttgttacatgtttgcagtttattcaagactgctgtatacatagtagacaaattaactccttacttgaaacatctagtctatctagatgtttagaagtgcccgatgtatgttaaatgtataggtagtaaaataccactttgtaaatatctttttgctaaaattcataggaaatgcttttggaaattgaattgtgaagccacctttgtgaacagtatagtaatgtctatacttgttcaatagtttagaggaggtaggagggaagaaattgcaaaaggtaatattactagtgtgttcatacttggacattttcagacaccatttttctatatgttttgtgcattttgttttgctctgtatatagtatatataatggacaaatagtcctaatttttcaacatctagtctctagatgttaaagaggttgccagtgtatgacaaaggagtaaaattagcatattttgtacactttgtgttgaaattcgtaggaaaacttgtcttctgtaaagacttttgcataggaatttgtttgaccatctctaagcattacacgtgcctgtacttgtccactggattgaaggcagagaaggaagggaggagggaatgattcaaggccaaaatggccacatttagaagatacctcagatgataaccattgttatgtgtgtgcaattttatttaacagtgctgtgtatgtggtggacaagttatatgaaatatctagtctttctagatatttggaagtgcttgatgtatttaaaagtggtagtagaataacactttgtaaatagcttttaaaaactgatgggaaatgctgtttggaagtggaattgttgaaccacctgggaggtgggagggaagaaattgcaaatggtgttttgccattgtttattagaaaatttcagcttaatccattgtgtatatgttacatgcatttcatttaactttgctatactgtatatattgtatatataacggacaaattagtcccgattttataatatctagtctctagatattaaagaggttgccaatgtatgacagaagtagagttagtaaactaacacattttgtacactttgttaaaatttgtagaaaggctgtcttctgaaaaggacttttggaagtgagataacatcagctctaagtgacacgtgcctatatccatcaggttggtggtggagaggagttggaaggaatgaagggttctagaccagaatgttcgtatttagaagacactatcagatataaccattgttacatgtgtgtagtttattcaaccctactgtgtatatagcggacaaacttaagtccttatttgaaacatctagtctttctagatgtttagaagtgcacaaagtatgttaaaagtagaggtagtaaataacacattttgtagctatccttttgatatgaaatattgtcttggaaattgatcaattctctgagcagtacccattttgatatttgtgctggttcagggggaaggaggagcacaaagtgcaaagggctttctaccagtgtccagtgtgtttatgaggaggcacattgaccattgtcccttatgtctgcattttcatttactgtgctgtgtatatagtgtatataagcggacataggagtcctaatttacgtctagtcgatgttaaaaaggttgccagtatatgacaaaagtagaattagtaaactactacattgagtacactttgtgttaaaattcatagggaagacttcttaaaaacaagtgaaattgttaaacccccccctaagcattacagatggcttatagctgtccacggggttggtagaggtgggaaagggaagggttctaggccagaatgttcctatttagaagacactcaaattacagtctgtgttatgtatgtataccatttattcaatgctactgtgtatataatggaaaacttaagtccagtttgaaacatctagtctttctaggtgtttaaaagtgtacaacggcctgtcgcagtggcgcatgcctgtaatcccagcactttgggaggccgaggcaggcggatcacgaggtcaagagatcaggaccatcttggccaacatggtgaaaccccatctttactaaaaatacaaaaattagctggtcgtggtggtgcccacctgtagccccagttactcgagaggctgaggcaggagaatcgcttgaacttgggaggcggaagttgcagtgagccaagatcgcaccactgcactccagcctggcgacagagcgaggctccgtttcaaaaaaaaaagtgcacaatgtaggttaacagtagagggcttaagtaacacccctctaagcatttgttttcagtacttcctaggagtggttgcatttgggaatggaattgttaaaacttgatgcttaggagcgaatgcagactattcattgggtgtttggggtgggggaagggggggtgggcagaggaggtatgcagggagaggggttctgtgctcctgagattagttcagatggtctaaccattgttctatatgtgcattttagttaatattgtgtattaaaggataagtcttaatgctcaaagtatgttaaaaatagatgtagtaaatcagtccctttgtgaatgtccttttgttagtttttaggaaggcctgtcctctgggagtgacctttattagtccaccccttggagctagacatcctgtacttagtcacggggatggtggaagagggagaagaggaagggtgaagggaagggctctttgctagtatctccatatctagacgatggttttagatgataaccacaggtctacaagagcgtttttagtaaagtgcctgtgttcattgtggacaaagttattattttgcaacatctaagctttacgaatggggtgacaacttatgataaaaactagagctagtgaattagcctatttgtaaatacctttgttataattgataggatacatcttggacatggaattgttaagccacctctgagcagtgtatgtcaggacttgttcattaggttggcagcagaggggcagaaggaattatacaggtagagatgtatgcagatgtgtccatatatgtccatatttacattttgatagccattgatgtatgcatctcttggctgtactataagaacacattaattcaatggaaatacactttgctaatattttaatggtatagatctgctaatgaattctcttaaaaacatactgtattctgttgctgtgtgtttcattttaaattgagcattaagggaatgcagcatttaaatcagaactctgccaatgcttttatctagaggcgtgttgccatttttgtcttatatgaaatttctgtcccaagaaaggcaggattacatctttttttttttttttagcagtttgagttggtgtagtgtattcttggttatcagaatactcatatagctttgggattttgaattggtaaatattcatgatgtgtgaaaaatcatgatacatactgtacagtctcagtcccataaaattggatgttgtgcctacacacaggatctagaagaatatgtcaaactataaactgcttgtgattgtgaatgactttgttctttgcttgtgtttttcaatttcctataatgcacatactaacttttaaaaaataaaggttattttaaaagcctgaaaaaaaaaacactggccgcgtttacaacngcgtgactgggaaaccntggggtcccactttcgcttgagacatcccctttcgcagctggcgtacnggccgaccgacgccttccacagtgcc

SEQ ID NO: 321419 - DNA, 4049 bp, Homo sapiens
gggaggagagaggagggggaggtgcagagagctctatgccatcctgtttacagcgaggcaagatgaatcattatgtctgtgcattttgttttacttatctgtgtatatagtgtacataaaggacagacgagtcctaattgacaacatctagtctttctggatgttaaagaggttgccagtgtatgacaaaagtagagttagtaaactaatatattttgtacattttgttttacaagtcctaggaaagattgtcttctgaaaatttgatgtcttctgggttgatggagatgggaagggttctaggccagaatgttcacatttggaagactctttcaaattataactgttgttacatgtttgcagtttattcaagactgctgtatacatagtagacaaattaactccttacttgaaacatctagtctatctagatgtttagaagtgcccgatgtatgttaaatgtataggtagtaaaataccactttgtaaatatctttttgctaaaattcataggaaatgcttttggaaattgaattgtgaagccacctttgtgaacagtatagtaatgtctatacttgttcaatagtttagaggaggtaggagggaagaaattgcaaaaggtaatattactagtgtgttcatacttggacattttcagacaccatttttctatatgttttgtgcattttgttttgctctgtatatagtatatataatggacaaatagtcctaatttttcaacatctagtctctagatgttaaagaggttgccagtgtatgacaaaggagtaaaattagcatattttgtacactttgtgttgaaattcgtaggaaaacttgtcttctgtaaagacttttgcataggaatttgtttgaccatctctaagcattacacgtgcctgtacttgtccactggattgaaggcagagaaggaagggaggagggaatgattcaaggccaaaatggccacatttagaagatacctcagatgataaccattgttatgtgtgtgcaattttatttaacagtgctgtgtatgtggtggacaagttatatgaaatatctagtctttctagatatttggaagtgcttgatgtatttaaaagtggtagtagaataacactttgtaaatagcttttaaaaactgatgggaaatgctgtttggaagtggaattgttgaaccacctgggaggtgggagggaagaaattgcaaatggtgttttgccattgtttattagaaaatttcagcttaatccattgtgtatatgttacatgcatttcatttaactttgctatactgtatatattgtatatataacggacaaattagtcccgattttataatatctagtctctagatattaaagaggttgccaatgtatgacagaagtagagttagtaaactaacacattttgtacactttgttaaaatttgtagaaaggctgtcttctgaaaaggacttttggaagtgagataacatcagctctaagtgacacgtgcctatatccatcaggttggtggtggagaggagttggaaggaatgaagggttctagaccagaatgttcgtatttagaagacactatcagatataaccattgttacatgtgtgtagtttattcaaccctactgtgtatatagcggacaaacttaagtccttatttgaaacatctagtctttctagatgtttagaagtgcacaaagtatgttaaaagtagaggtagtaaataacacattttgtagctatccttttgatatgaaatattgtcttggaaattgatcaattctctgagcagtacccattttgatatttgtgctggttcagggggaaggaggagcacaaagtgcaaagggctttctaccagtgtccagtgtgtttatgaggaggcacattgaccattgtcccttatgtctgcattttcatttactgtgctgtgtatatagtgtatataagcggacataggagtcctaatttacgtctagtcgatgttaaaaaggttgccagtatatgacaaaagtagaattagtaaactactacattgagtacactttgtgttaaaattcatagggaagacttcttaaaaacaagtgaaattgttaaacccccccctaagcattacagatggcttatagctgtccacggggttggtagaggtgggaaagggaagggttctaggccagaatgttcctatttagaagacactcaaattacagtctgtgttatgtatgtataccatttattcaatgctactgtgtatataatggaaaacttaagtccagtttgaaacatctagtctttctaggtgtttaaaagtgtacaacggcctgtcgcagtggcgcatgcctgtaatcccagcactttgggaggccgaggcaggcggatcacgaggtcaagagatcaggaccatcttggccaacatggtgaaaccccatctttactaaaaatacaaaaattagctggtcgtggtggtgcccacctgtagccccagttactcgagaggctgaggcaggagaatcgcttgaacttgggaggcggaagttgcagtgagccaagatcgcaccactgcactccagcctggcgacagagcgaggctccgtttcaaaaaaaaaagtgcacaatgtaggttaacagtagagggcttaagtaacacccctctaagcatttgttttcagtacttcctaggagtggttgcatttgggaatggaattgttaaaacttgatgcttaggagcgaatgcagactattcattgggtgtttggggtgggggaagggggggtgggcagaggaggtatgcagggagaggggttctgtgctcctgagattagttcagatggtctaaccattgttctatatgtgcattttagttaatattgtgtattaaaggataagtcttaatgctcaaagtatgttaaaaatagatgtagtaaatcagtccctttgtgaatgtccttttgttagtttttaggaaggcctgtcctctgggagtgacctttattagtccaccccttggagctagacatcctgtacttagtcacggggatggtggaagagggagaagaggaagggtgaagggaagggctctttgctagtatctccatatctagacgatggttttagatgataaccacaggtctacaagagcgtttttagtaaagtgcctgtgttcattgtggacaaagttattattttgcaacatctaagctttacgaatggggtgacaacttatgataaaaactagagctagtgaattagcctatttgtaaatacctttgttataattgataggatacatcttggacatggaattgttaagccacctctgagcagtgtatgtcaggacttgttcattaggttggcagcagaggggcagaaggaattatacaggtagagatgtatgcagatgtgtccatatatgtccatatttacattttgatagccattgatgtatgcatctcttggctgtactataagaacacattaattcaatggaaatacactttgctaatattttaatggtatagatctgctaatgaattctcttaaaaacatactgtattctgttgctgtgtgtttcattttaaattgagcattaagggaatgcagcatttaaatcagaactctgccaatgcttttatctagaggcgtgttgccatttttgtcttatatgaaatttctgtcccaagaaaggcaggattacatctttttttttttttttagcagtttgagttggtgtagtgtattcttggttatcagaatactcatatagctttgggattttgaattggtaaatattcatgatgtgtgaaaaatcatgatacatactgtacagtctcagtcccataaaattggatgttgtgcctacacacaggatctagaagaatatgtcaaactataaactgcttgtgattgtgaatgactttgttctttgcttgtgtttttcaatttcctataatgcacatactaacttttaaaaaataaaggttattttaaaagcctgaaaaaaaaaagtcgacgcggccgcgaatttagtagtagtagtagtagtagta

SEQ ID NO: 321420 - DNA, 4206 bp, Homo sapiens
  misc_feature (4018)..(4018): n is a, c, g, or t
gggaggagagaggagggggaggtgcagagagctctatgccatcctgtttacagcgaggcaagatgaatcattatgtctgtgcattttgttttacttatctgtgtatatagtgtacataaaggacagacgagtcctaattgacaacatctagtctttctggatgttaaagaggttgccagtgtatgacaaaagtagagttagtaaactaatatattttgtacattttgttttacaagtcctaggaaagattgtcttctgaaaatttgatgtcttctgggttgatggagatgggaagggttctaggccagaatgttcacatttggaagactctttcaaattataactgttgttacatgtttgcagtttattcaagactgctgtatacatagtagacaaattaactccttacttgaaacatctagtctatctagatgtttagaagtgcccgatgtatgttaaatgtataggtagtaaaataccactttgtaaatatctttttgctaaaattcataggaaatgcttttggaaattgaattgtgaagccacctttgtgaacagtatagtaatgtctatacttgttcaatagtttagaggaggtaggagggaagaaattgcaaaaggtaatattactagtgtgttcatacttggacattttcagacaccatttttctatatgttttgtgcattttgttttgctctgtatatagtatatataatggacaaatagtcctaatttttcaacatctagtctctagatgttaaagaggttgccagtgtatgacaaaggagtaaaattagcatattttgtacactttgtgttgaaattcgtaggaaaacttgtcttctgtaaagacttttgcataggaatttgtttgaccatctctaagcattacacgtgcctgtacttgtccactggattgaaggcagagaaggaagggaggagggaatgattcaaggccaaaatggccacatttagaagatacctcagatgataaccattgttatgtgtgtgcaattttatttaacagtgctgtgtatgtggtggacaagttatatgaaatatctagtctttctagatatttggaagtgcttgatgtatttaaaagtggtagtagaataacactttgtaaatagcttttaaaaactgatgggaaatgctgtttggaagtggaattgttgaaccacctgggaggtgggagggaagaaattgcaaatggtgttttgccattgtttattagaaaatttcagcttaatccattgtgtatatgttacatgcatttcatttaactttgctatactgtatatattgtatatataacggacaaattagtcccgattttataatatctagtctctagatattaaagaggttgccaatgtatgacagaagtagagttagtaaactaacacattttgtacactttgttaaaatttgtagaaaggctgtcttctgaaaaggacttttggaagtgagataacatcagctctaagtgacacgtgcctatatccatcaggttggtggtggagaggagttggaaggaatgaagggttctagaccagaatgttcgtatttagaagacactatcagatataaccattgttacatgtgtgtagtttattcaaccctactgtgtatatagcggacaaacttaagtccttatttgaaacatctagtctttctagatgtttagaagtgcacaaagtatgttaaaagtagaggtagtaaataacacattttgtagctatccttttgatatgaaatattgtcttggaaattgatcaattctctgagcagtacccattttgatatttgtgctggttcagggggaaggaggagcacaaagtgcaaagggctttctaccagtgtccagtgtgtttatgaggaggcacattgaccattgtcccttatgtctgcattttcatttactgtgctgtgtatatagtgtatataagcggacataggagtcctaatttacgtctagtcgatgttaaaaaggttgccagtatatgacaaaagtagaattagtaaactactacattgagtacactttgtgttaaaattcatagggaagacttcttaaaaacaagtgaaattgttaaacccccccctaagcattacagatggcttatagctgtccacggggttggtagaggtgggaaagggaagggttctaggccagaatgttcctatttagaagacactcaaattacagtctgtgttatgtatgtataccatttattcaatgctactgtgtatataatggaaaacttaagtccagtttgaaacatctagtctttctaggtgtttaaaagtgtacaacggcctgtcgcagtggcgcatgcctgtaatcccagcactttgggaggccgaggcaggcggatcacgaggtcaagagatcaggaccatcttggccaacatggtgaaaccccatctttactaaaaatacaaaaattagctggtcgtggtggtgcccacctgtagccccagttactcgagaggctgaggcaggagaatcgcttgaacttgggaggcggaagttgcagtgagccaagatcgcaccactgcactccagcctggcgacagagcgaggctccgtttcaaaaaaaaaagtgcacaatgtaggttaacagtagagggcttaagtaacacccctctaagcatttgttttcagtacttcctaggagtggttgcatttgggaatggaattgttaaaacttgatgcttaggagcgaatgcagactattcattgggtgtttggggtgggggaagggggggtgggcagaggaggtatgcagggagaggggttctgtgctcctgagattagttcagatggtctaaccattgttctatatgtgcattttagttaatattgtgtattaaaggataagtcttaatgctcaaagtatgttaaaaatagatgtagtaaatcagtccctttgtgaatgtccttttgttagtttttaggaaggcctgtcctctgggagtgacctttattagtccaccccttggagctagacatcctgtacttagtcacggggatggtggaagagggagaagaggaagggtgaagggaagggctctttgctagtatctccatatctagacgatggttttagatgataaccacaggtctacaagagcgtttttagtaaagtgcctgtgttcattgtggacaaagttattattttgcaacatctaagctttacgaatggggtgacaacttatgataaaaactagagctagtgaattagcctatttgtaaatacctttgttataattgataggatacatcttggacatggaattgttaagccacctctgagcagtgtatgtcaggacttgttcattaggttggcagcagaggggcagaaggaattatacaggtagagatgtatgcagatgtgtccatatatgtccatatttacattttgatagccattgatgtatgcatctcttggctgtactataagaacacattaattcaatggaaatacactttgctaatattttaatggtatagatctgctaatgaattctcttaaaaacatactgtattctgttgctgtgtgtttcattttaaattgagcattaagggaatgcagcatttaaatcagaactctgccaatgcttttatctagaggcgtgttgccatttttgtcttatatgaaatttctgtcccaagaaaggcaggattacatctttttttttttttttagcagtttgagttggtgtagtgtattcttggttatcagaatactcatatagctttgggattttgaattggtaaatattcatgatgtgtgaaaaatcatgatacatactgtacagtctcagtcccataaaattggatgttgtgcctacacacaggatctagaagaatatgtcaaactataaactgcttgtgattgtgaatgactttgttctttgcttgtgtttttcaatttcctataatgcacatactaacttttaaaaaataaaggttattttaaaagcctgaaaaaaaaaaaaaaaaaaganagcgtccgaattcggcacgaggcgcgcgggaggccgcggaggatggaggagcggaaggaggagggcgaggccgagatccaggagcacgggcccgagcactggttctccaagtgggagcggcagtgcctggccgaggccgaacaggacgagcagctgccccccgagctgcaggaggaggcggcggccgc

SEQ ID NO: 321421 - DNA, 4173 bp, Homo sapiens
  misc_feature (4069)..(4069): n is a, c, g, or t
  misc_feature (4128)..(4128): n is a, c, g, or t
gggaggagagaggagggggaggtgcagagagctctatgccatcctgtttacagcgaggcaagatgaatcattatgtctgtgcattttgttttacttatctgtgtatatagtgtacataaaggacagacgagtcctaattgacaacatctagtctttctggatgttaaagaggttgccagtgtatgacaaaagtagagttagtaaactaatatattttgtacattttgttttacaagtcctaggaaagattgtcttctgaaaatttgatgtcttctgggttgatggagatgggaagggttctaggccagaatgttcacatttggaagactctttcaaattataactgttgttacatgtttgcagtttattcaagactgctgtatacatagtagacaaattaactccttacttgaaacatctagtctatctagatgtttagaagtgcccgatgtatgttaaatgtataggtagtaaaataccactttgtaaatatctttttgctaaaattcataggaaatgcttttggaaattgaattgtgaagccacctttgtgaacagtatagtaatgtctatacttgttcaatagtttagaggaggtaggagggaagaaattgcaaaaggtaatattactagtgtgttcatacttggacattttcagacaccatttttctatatgttttgtgcattttgttttgctctgtatatagtatatataatggacaaatagtcctaatttttcaacatctagtctctagatgttaaagaggttgccagtgtatgacaaaggagtaaaattagcatattttgtacactttgtgttgaaattcgtaggaaaacttgtcttctgtaaagacttttgcataggaatttgtttgaccatctctaagcattacacgtgcctgtacttgtccactggattgaaggcagagaaggaagggaggagggaatgattcaaggccaaaatggccacatttagaagatacctcagatgataaccattgttatgtgtgtgcaattttatttaacagtgctgtgtatgtggtggacaagttatatgaaatatctagtctttctagatatttggaagtgcttgatgtatttaaaagtggtagtagaataacactttgtaaatagcttttaaaaactgatgggaaatgctgtttggaagtggaattgttgaaccacctgggaggtgggagggaagaaattgcaaatggtgttttgccattgtttattagaaaatttcagcttaatccattgtgtatatgttacatgcatttcatttaactttgctatactgtatatattgtatatataacggacaaattagtcccgattttataatatctagtctctagatattaaagaggttgccaatgtatgacagaagtagagttagtaaactaacacattttgtacactttgttaaaatttgtagaaaggctgtcttctgaaaaggacttttggaagtgagataacatcagctctaagtgacacgtgcctatatccatcaggttggtggtggagaggagttggaaggaatgaagggttctagaccagaatgttcgtatttagaagacactatcagatataaccattgttacatgtgtgtagtttattcaaccctactgtgtatatagcggacaaacttaagtccttatttgaaacatctagtctttctagatgtttagaagtgcacaaagtatgttaaaagtagaggtagtaaataacacattttgtagctatccttttgatatgaaatattgtcttggaaattgatcaattctctgagcagtacccattttgatatttgtgctggttcagggggaaggaggagcacaaagtgcaaagggctttctaccagtgtccagtgtgtttatgaggaggcacattgaccattgtcccttatgtctgcattttcatttactgtgctgtgtatatagtgtatataagcggacataggagtcctaatttacgtctagtcgatgttaaaaaggttgccagtatatgacaaaagtagaattagtaaactactacattgagtacactttgtgttaaaattcatagggaagacttcttaaaaacaagtgaaattgttaaacccccccctaagcattacagatggcttatagctgtccacggggttggtagaggtgggaaagggaagggttctaggccagaatgttcctatttagaagacactcaaattacagtctgtgttatgtatgtataccatttattcaatgctactgtgtatataatggaaaacttaagtccagtttgaaacatctagtctttctaggtgtttaaaagtgtacaacggcctgtcgcagtggcgcatgcctgtaatcccagcactttgggaggccgaggcaggcggatcacgaggtcaagagatcaggaccatcttggccaacatggtgaaaccccatctttactaaaaatacaaaaattagctggtcgtggtggtgcccacctgtagccccagttactcgagaggctgaggcaggagaatcgcttgaacttgggaggcggaagttgcagtgagccaagatcgcaccactgcactccagcctggcgacagagcgaggctccgtttcaaaaaaaaaagtgcacaatgtaggttaacagtagagggcttaagtaacacccctctaagcatttgttttcagtacttcctaggagtggttgcatttgggaatggaattgttaaaacttgatgcttaggagcgaatgcagactattcattgggtgtttggggtgggggaagggggggtgggcagaggaggtatgcagggagaggggttctgtgctcctgagattagttcagatggtctaaccattgttctatatgtgcattttagttaatattgtgtattaaaggataagtcttaatgctcaaagtatgttaaaaatagatgtagtaaatcagtccctttgtgaatgtccttttgttagtttttaggaaggcctgtcctctgggagtgacctttattagtccaccccttggagctagacatcctgtacttagtcacggggatggtggaagagggagaagaggaagggtgaagggaagggctctttgctagtatctccatatctagacgatggttttagatgataaccacaggtctacaagagcgtttttagtaaagtgcctgtgttcattgtggacaaagttattattttgcaacatctaagctttacgaatggggtgacaacttatgataaaaactagagctagtgaattagcctatttgtaaatacctttgttataattgataggatacatcttggacatggaattgttaagccacctctgagcagtgtatgtcaggacttgttcattaggttggcagcagaggggcagaaggaattatacaggtagagatgtatgcagatgtgtccatatatgtccatatttacattttgatagccattgatgtatgcatctcttggctgtactataagaacacattaattcaatggaaatacactttgctaatattttaatggtatagatctgctaatgaattctcttaaaaacatactgtattctgttgctgtgtgtttcattttaaattgagcattaagggaatgcagcatttaaatcagaactctgccaatgcttttatctagaggcgtgttgccatttttgtcttatatgaaatttctgtcccaagaaaggcaggattacatctttttttttttttttagcagtttgagttggtgtagtgtattcttggttatcagaatactcatatagctttgggattttgaattggtaaatattcatgatgtgtgaaaaatcatgatacatactgtacagtctcagtcccataaaattggatgttgtgcctacacacaggatctagaagaatatgtcaaactataaactgcttgtgattgtgaatgactttgttctttgcttgtgtttttcaatttcctataatgcacattcttccaaattggagaatgtgcagctagctttgttttaatctgcttggcaaccagtgtagctgctgtaacaatctatcttattgttcaaatatataagagccaaactctnttccattccatctaaaatgttttcatttagtactcttctttcctcctactctagaactncaaaacaaaacaaaactttgagagcagcacattcttctatggtcc

SEQ ID NO: 321422 - DNA, 3937 bp, Homo sapiens
gggaggagagaggagggggaggtgcagagagctctatgccatcctgtttacagcgaggcaagatgaatcattatgtctgtgcattttgttttacttatctgtgtatatagtgtacataaaggacagacgagtcctaattgacaacatctagtctttctggatgttaaagaggttgccagtgtatgacaaaagtagagttagtaaactaatatattttgtacattttgttttacaagtcctaggaaagattgtcttctgaaaatttgatgtcttctgggttgatggagatgggaagggttctaggccagaatgttcacatttggaagactctttcaaattataactgttgttacatgtttgcagtttattcaagactgctgtatacatagtagacaaattaactccttacttgaaacatctagtctatctagatgtttagaagtgcccgatgtatgttaaatgtataggtagtaaaataccactttgtaaatatctttttgctaaaattcataggaaatgcttttggaaattgaattgtgaagccacctttgtgaacagtatagtaatgtctatacttgttcaatagtttagaggaggtaggagggaagaaattgcaaaaggtaatattactagtgtgttcatacttggacattttcagacaccatttttctatatgttttgtgcattttgttttgctctgtatatagtatatataatggacaaatagtcctaatttttcaacatctagtctctagatgttaaagaggttgccagtgtatgacaaaggagtaaaattagcatattttgtacactttgtgttgaaattcgtaggaaaacttgtcttctgtaaagacttttgcataggaatttgtttgaccatctctaagcattacacgtgcctgtacttgtccactggattgaaggcagagaaggaagggaggagggaatgattcaaggccaaaatggccacatttagaagatacctcagatgataaccattgttatgtgtgtgcaattttatttaacagtgctgtgtatgtggtggacaagttatatgaaatatctagtctttctagatatttggaagtgcttgatgtatttaaaagtggtagtagaataacactttgtaaatagcttttaaaaactgatgggaaatgctgtttggaagtggaattgttgaaccacctgggaggtgggagggaagaaattgcaaatggtgttttgccattgtttattagaaaatttcagcttaatccattgtgtatatgttacatgcatttcatttaactttgctatactgtatatattgtatatataacggacaaattagtcccgattttataatatctagtctctagatattaaagaggttgccaatgtatgacagaagtagagttagtaaactaacacattttgtacactttgttaaaatttgtagaaaggctgtcttctgaaaaggacttttggaagtgagataacatcagctctaagtgacacgtgcctatatccatcaggttggtggtggagaggagttggaaggaatgaagggttctagaccagaatgttcgtatttagaagacactatcagatataaccattgttacatgtgtgtagtttattcaaccctactgtgtatatagcggacaaacttaagtccttatttgaaacatctagtctttctagatgtttagaagtgcacaaagtatgttaaaagtagaggtagtaaataacacattttgtagctatccttttgatatgaaatattgtcttggaaattgatcaattctctgagcagtacccattttgatatttgtgctggttcagggggaaggaggagcacaaagtgcaaagggctttctaccagtgtccagtgtgtttatgaggaggcacattgaccattgtcccttatgtctgcattttcatttactgtgctgtgtatatagtgtatataagcggacataggagtcctaatttacgtctagtcgatgttaaaaaggttgccagtatatgacaaaagtagaattagtaaactactacattgagtacactttgtgttaaaattcatagggaagacttcttaaaaacaagtgaaattgttaaacccccccctaagcattacagatggcttatagctgtccacggggttggtagaggtgggaaagggaagggttctaggccagaatgttcctatttagaagacactcaaattacagtctgtgttatgtatgtataccatttattcaatgctactgtgtatataatggaaaacttaagtccagtttgaaacatctagtctttctaggtgtttaaaagtgtacaacggcctgtcgcagtggcgcatgcctgtaatcccagcactttgggaggccgaggcaggcggatcacgaggtcaagagatcaggaccatcttggccaacatggtgaaaccccatctttactaaaaatacaaaaattagctggtcgtggtggtgcccacctgtagccccagttactcgagaggctgaggcaggagaatcgcttgaacttgggaggcggaagttgcagtgagccaagatcgcaccactgcactccagcctggcgacagagcgaggctccgtttcaaaaaaaaaagtgcacaatgtaggttaacagtagagggcttaagtaacacccctctaagcatttgttttcagtacttcctaggagtggttgcatttgggaatggaattgttaaaacttgatgcttaggagcgaatgcagactattcattgggtgtttggggtgggggaagggggggtgggcagaggaggtatgcagggagaggggttctgtgctcctgagattagttcagatggtctaaccattgttctatatgtgcattttagttaatattgtgtattaaaggataagtcttaatgctcaaagtatgttaaaaatagatgtagtaaatcagtccctttgtgaatgtccttttgttagtttttaggaaggcctgtcctctgggagtgacctttattagtccaccccttggagctagacatcctgtacttagtcacggggatggtggaagagggagaagaggaagggtgaagggaagggctctttgctagtatctccatatctagacgatggttttagatgataaccacaggtctacaagagcgtttttagtaaagtgcctgtgttcattgtggacaaagttattattttgcaacatctaagctttacgaatggggtgacaacttatgataaaaactagagctagtgaattagcctatttgtaaatacctttgttataattgataggatacatcttggacatggaattgttaagccacctctgagcagtgtatgtcaggacttgttcattaggttggcagcagaggggcagaaggaattatacaggtagagatgtatgcagatgtgtccatatatgtccatatttacattttgatagccattgatgtatgcatctcttggctgtactataagaacacattaattcaatggaaatacactttgctaatattttaatggtatagatctgctaatgaattctcttaaaaacatactgtattctgttgctgtgtgtttcattttaaattgagcattaagggaatgcagcatttaaatcagaactctgccaatgcttttatctagaggcgtgttgccatttttgtcttatatgaaatttctgtcccaagaaaggcaggattacatctttttttttttttttagcagtttgagttggtgtagtgtattcttggttatcagaatactcatatagctttgggattttgaattggtaaatattcatgatgtgtgaaaaatcatgatacatactgtacagtctcagtctgcttgtgattgtgaatgactttgttctttgcttgtgtttttcaatttcctataatgcacatactaacttttaaaaaataaaggttattttaaaagcctg

SEQ ID NO: 321423 - DNA, 3943 bp, Homo sapiens
gggaggagagaggagggggaggtgcagagagctctatgccatcctgtttacagcgaggcaagatgaatcattatgtctgtgcattttgttttacttatctgtgtatatagtgtacataaaggacagacgagtcctaattgacaacatctagtctttctggatgttaaagaggttgccagtgtatgacaaaagtagagttagtaaactaatatattttgtacattttgttttacaagtcctaggaaagattgtcttctgaaaatttgatgtcttctgggttgatggagatgggaagggttctaggccagaatgttcacatttggaagactctttcaaattataactgttgttacatgtttgcagtttattcaagactgctgtatacatagtagacaaattaactccttacttgaaacatctagtctatctagatgtttagaagtgcccgatgtatgttaaatgtataggtagtaaaataccactttgtaaatatctttttgctaaaattcataggaaatgcttttggaaattgaattgtgaagccacctttgtgaacagtatagtaatgtctatacttgttcaatagtttagaggaggtaggagggaagaaattgcaaaaggtaatattactagtgtgttcatacttggacattttcagacaccatttttctatatgttttgtgcattttgttttgctctgtatatagtatatataatggacaaatagtcctaatttttcaacatctagtctctagatgttaaagaggttgccagtgtatgacaaaggagtaaaattagcatattttgtacactttgtgttgaaattcgtaggaaaacttgtcttctgtaaagacttttgcataggaatttgtttgaccatctctaagcattacacgtgcctgtacttgtccactggattgaaggcagagaaggaagggaggagggaatgattcaaggccaaaatggccacatttagaagatacctcagatgataaccattgttatgtgtgtgcaattttatttaacagtgctgtgtatgtggtggacaagttatatgaaatatctagtctttctagatatttggaagtgcttgatgtatttaaaagtggtagtagaataacactttgtaaatagcttttaaaaactgatgggaaatgctgtttggaagtggaattgttgaaccacctgggaggtgggagggaagaaattgcaaatggtgttttgccattgtttattagaaaatttcagcttaatccattgtgtatatgttacatgcatttcatttaactttgctatactgtatatattgtatatataacggacaaattagtcccgattttataatatctagtctctagatattaaagaggttgccaatgtatgacagaagtagagttagtaaactaacacattttgtacactttgttaaaatttgtagaaaggctgtcttctgaaaaggacttttggaagtgagataacatcagctctaagtgacacgtgcctatatccatcaggttggtggtggagaggagttggaaggaatgaagggttctagaccagaatgttcgtatttagaagacactatcagatataaccattgttacatgtgtgtagtttattcaaccctactgtgtatatagcggacaaacttaagtccttatttgaaacatctagtctttctagatgtttagaagtgcacaaagtatgttaaaagtagaggtagtaaataacacattttgtagctatccttttgatatgaaatattgtcttggaaattgatcaattctctgagcagtacccattttgatatttgtgctggttcagggggaaggaggagcacaaagtgcaaagggctttctaccagtgtccagtgtgtttatgaggaggcacattgaccattgtcccttatgtctgcattttcatttactgtgctgtgtatatagtgtatataagcggacataggagtcctaatttacgtctagtcgatgttaaaaaggttgccagtatatgacaaaagtagaattagtaaactactacattgagtacactttgtgttaaaattcatagggaagacttcttaaaaacaagtgaaattgttaaacccccccctaagcattacagatggcttatagctgtccacggggttggtagaggtgggaaagggaagggttctaggccagaatgttcctatttagaagacactcaaattacagtctgtgttatgtatgtataccatttattcaatgctactgtgtatataatggaaaacttaagtccagtttgaaacatctagtctttctaggtgtttaaaagtgtacaacggcctgtcgcagtggcgcatgcctgtaatcccagcactttgggaggccgaggcaggcggatcacgaggtcaagagatcaggaccatcttggccaacatggtgaaaccccatctttactaaaaatacaaaaattagctggtcgtggtggtgcccacctgtagccccagttactcgagaggctgaggcaggagaatcgcttgaacttgggaggcggaagttgcagtgagccaagatcgcaccactgcactccagcctggcgacagagcgaggctccgtttcaaaaaaaaaagtgcacaatgtaggttaacagtagagggcttaagtaacacccctctaagcatttgttttcagtacttcctaggagtggttgcatttgggaatggaattgttaaaacttgatgcttaggagcgaatgcagactattcattgggtgtttggggtgggggaagggggggtgggcagaggaggtatgcagggagaggggttctgtgctcctgagattagttcagatggtctaaccattgttctatatgtgcattttagttaatattgtgtattaaaggataagtcttaatgctcaaagtatgttaaaaatagatgtagtaaatcagtccctttgtgaatgtccttttgttagtttttaggaaggcctgtcctctgggagtgacctttattagtccaccccttggagctagacatcctgtacttagtcacggggatggtggaagagggagaagaggaagggtgaagggaagggctctttgctagtatctccatatctagacgatggttttagatgataaccacaggtctacaagagcgtttttagtaaagtgcctgtgttcattgtggacaaagttattattttgcaacatctaagctttacgaatggggtgacaacttatgataaaaactagagctagtgaattagcctatttgtaaatacctttgttataattgataggatacatcttggacatggaattgttaagccacctctgagcagtgtatgtcaggacttgttcattaggttggcagcagaggggcagaaggaattatacaggtagagatgtatgcagatgtgtccatatatgtccatatttacattttgatagccattgatgtatgcatctcttggctgtactataagaacacattaattcaatggaaatacactttgctaatattttaatggtatagatctgctaatgaattctcttaaatgcagcatttaaatcagaactctgccaatgcttttatctagaggcgtgttgccatttttgtcttatatgaaatttctgtcccaagaaaggcaggattacatctttttttttttttttagcagtttgagttggtgtagtgtattcttggttatcagaatactcatatagctttgggattttgaattggtaaatattcatgatgtgtgaaaaatcatgatacatactgtacagtctcagtcccataaaattggatgttgtgcctacacacaggatctagaagaatatgtcaaactataaactgcttgtgattgtgaatgactttgttctttgcttgtgtttttcaatttcctataatgcacatactaacttttaaaaaataaaggttattttaaaagcctg

SEQ ID NO: 321424 - DNA, 4294 bp, Homo sapiens
gggaggagagaggagggggaggtgcagagagctctatgccatcctgtttacagcgaggcaagatgaatcattatgtctgtgcattttgttttacttatctgtgtatatagtgtacataaaggacagacgagtcctaattgacaacatctagtctttctggatgttaaagaggttgccagtgtatgacaaaagtagagttagtaaactaatatattttgtacattttgttttacaagtcctaggaaagattgtcttctgaaaatttgatgtcttctgggttgatggagatgggaagggttctaggccagaatgttcacatttggaagactctttcaaattataactgttgttacatgtttgcagtttattcaagactgctgtatacatagtagacaaattaactccttacttgaaacatctagtctatctagatgtttagaagtgcccgatgtatgttaaatgtataggtagtaaaataccactttgtaaatatctttttgctaaaattcataggaaatgcttttggaaattgaattgtgaagccacctttgtgaacagtatagtaatgtctatacttgttcaatagtttagaggaggtaggagggaagaaattgcaaaaggtaatattactagtgtgttcatacttggacattttcagacaccatttttctatatgttttgtgcattttgttttgctctgtatatagtatatataatggacaaatagtcctaatttttcaacatctagtctctagatgttaaagaggttgccagtgtatgacaaaggagtaaaattagcatattttgtacactttgtgttgaaattcgtaggaaaacttgtcttctgtaaagacttttgcataggaatttgtttgaccatctctaagcattacacgtgcctgtacttgtccactggattgaaggcagagaaggaagggaggagggaatgattcaaggccaaaatggccacatttagaagatacctcagatgataaccattgttatgtgtgtgcaattttatttaacagtgctgtgtatgtggtggacaagttatatgaaatatctagtctttctagatatttggaagtgcttgatgtatttaaaagtggtagtagaataacactttgtaaatagcttttaaaaactgatgggaaatgctgtttggaagtggaattgttgaaccacctgggaggtgggagggaagaaattgcaaatggtgttttgccattgtttattagaaaatttcagcttaatccattgtgtatatgttacatgcatttcatttaactttgctatactgtatatattgtatatataacggacaaattagtcccgattttataatatctagtctctagatattaaagaggttgccaatgtatgacagaagtagagttagtaaactaacacattttgtacactttgttaaaatttgtagaaaggctgtcttctgaaaaggacttttggaagtgagataacatcagctctaagtgacacgtgcctatatccatcaggttggtggtggagaggagttggaaggaatgaagggttctagaccagaatgttcgtatttagaagacactatcagatataaccattgttacatgtgtgtagtttattcaaccctactgtgtatatagcggacaaacttaagtccttatttgaaacatctagtctttctagatgtttagaagtgcacaaagtatgttaaaagtagaggtagtaaataacacattttgtagctatccttttgatatgaaatattgtcttggaaattgatcaattctctgagcagtacccattttgatatttgtgctggttcagggggaaggaggagcacaaagtgcaaagggctttctaccagtgtccagtgtgtttatgaggaggcacattgaccattgtcccttatgtctgcattttcatttactgtgctgtgtatatagtgtatataagcggacataggagtcctaatttacgtctagtcgatgttaaaaaggttgccagtatatgacaaaagtagaattagtaaactactacattgagtacactttgtgttaaaattcatagggaagacttcttaaaaacaagtgaaattgttaaacccccccctaagcattacagatggcttatagctgtccacggggttggtagaggtgggaaagggaagggttctaggccagaatgttcctatttagaagacactcaaattacagtctgtgttatgtatgtataccatttattcaatgctactgtgtatataatggaaaacttaagtccagtttgaaacatctagtctttctaggtgtttaaaagtgtacaacggcctgtcgcagtggcgcatgcctgtaatcccagcactttgggaggccgaggcaggcggatcacgaggtcaagagatcaggaccatcttggccaacatggtgaaaccccatctttactaaaaatacaaaaattagctggtcgtggtggtgcccacctgtagccccagttactcgagaggctgaggcaggagaatcgcttgaacttgggaggcggaagttgcagtgagccaagatcgcaccactgcactccagcctggcgacagagcgaggctccgtttcaaaaaaaaaagtgcacaatgtaggttaacagtagagggcttaagtaacacccctctaagcatttgttttcagtacttcctaggagtggttgcatttgggaatggaattgttaaaacttgatgcttaggagcgaatgcagactattcattgggtgtttggggtgggggaagggggggtgggcagaggaggtatgcagggagaggggttctgtgctcctgagattagttcagatggtctaaccattgttctatatgtgcattttagttaatattgtgtattaaaggataagtcttaatgctcaaagtatgttaaaaatagatgtagtaaatcagtccctttgtgaatgtccttttgttagtttttaggaaggcctgtcctctgggagtgacctttattagtccaccccttggagctagacatcctgtacttagtcacggggatggtggaagagggagaagaggaagggtgaagggaagggctctttgctagtatctccatatctagacgatggttttagatgataaccacaggtctacaagagcgtttttagtaaagtgcctgtgttcattgtggacaaagttattattttgcaacatctaagctttacgaatggggtgacaacttatgataaaaactagagctagtgaattagcctatttgtaaatacctttgttataattgataggatacatcttggacatggaattgttaagccacctctgagcagtgtatgtcaggacttgttcattaggttggcagcagaggggcagaaggaattatacaggtagagatgtatgcagatgtgtccatatatgtccatatttacattttgatagccattgatgtatgcatctcttggctgtactataagaacacattaattcaatggaaatacactttgctaatattttaatggtatagatctgctaatgaattctcttaaaaacatactgtattctgttgctgtgtgtttcattttaaattgagcattaagggaatgcagcatttaaatcagaactctgccaatgcttttatctagaggcgtgttgccatttttgtcttatatgaaatttctgtcccaagaaaggcaggattacatctttttttttttttttagcagtttgagttggtgtagtgtattcttggttatcagaataccataaaattggatgttgtgcctacacacaggatctagaagaatatgtcaaactataaactgcttgtgattgtgaatgactttgttctttgcttgtgtttttcaatttcctataatgcacatactaacttttaaaaaataaaggttattttaaaagcctgaaaaaaaaaaaaaaaaaaaaaaaaaaaaaaaaaaaaaaaacaaaaaaaaaaaaaaaaaaaaaaaaaaaaaaaaaaaaaaaaaaaaaaagaaaaaaagagaacaaaaaaaaaaaaaaaaacattagacggggggggcgggagcaagaaaaaattcaacgcggggggagtgaagaagggacgagggatgacgaacatatattgaagagaggagagagggccagtagcgagagagagcacagagaaggggtaggggcggcagagtacagtataaaaagccaggagagtgggggggaaagagaggaatagaaagctactgggagagaggaagaacaaggatgtaggggcgagaagagctggagagaaaaaaaaaagaagag

SEQ ID NO: 321425 - DNA, 3295 bp, Homo sapiens
gggaggagagaggagggggaggtgcagagagctctatgccatcctgtttacagcgaggcaagatgaatcattatgtctgtgcattttgttttacttatctgtgtatatagtgtacataaaggacagacgagtcctaattgacaacatctagtctttctggatgttaaagaggttgccagtgtatgacaaaagtagagttagtaaactaatatattttgtacattttgttttacaagtcctaggaaagattgtcttctgaaaatttgatgtcttctgggttgatggagatgggaagggttctaggccagaatgttcacatttggaagactctttcaaattataactgttgttacatgtttgcagtttattcaagactgctgtatacatagtagacaaattaactccttacttgaaacatctagtctatctagatgtttagaagtgcccgatgtatgttaaatgtataggtagtaaaataccactttgtaaatatctttttgctaaaattcataggaaatgcttttggaaattgaattgtgaagccacctttgtgaacagtatagtaatgtctatacttgttcaatagtttagaggaggtaggagggaagaaattgcaaaaggtaatattactagtgtgttcatacttggacattttcagacaccatttttctatatgttttgtgcattttgttttgctctgtatatagtatatataatggacaaatagtcctaatttttcaacatctagtctctagatgttaaagaggttgccagtgtatgacaaaggagtaaaattagcatattttgtacactttgtgttgaaattcgtaggaaaacttgtcttctgtaaagacttttgcataggaatttgtttgaccatctctaagcattacacgtgcctgtacttgtccactggattgaaggcagagaaggaagggaggagggaatgattcaaggccaaaatggccacatttagaagatacctcagatgataaccattgttatgtgtgtgcaattttatttaacagtgctgtgtatgtggtggacaagttatatgaaatatctagtctttctagatatttggaagtgcttgatgtatttaaaagtggtagtagaataacactttgtaaatagcttttaaaaactgatgggaaatgctgtttggaagtggaattgttgaaccacctgggaggtgggagggaagaaattgcaaatggtgttttgccattgtttattagaaaatttcagcttaatccattgtgtatatgttacatgcatttcatttaactttgctatactgtatatattgtatatataacggacaaattagtcccgattttataatatctagtctctagatattaaagaggttgccaatgtatgacagaagtagagttagtaaactaacacattttgtacactttgttaaaatttgtagaaaggctgtcttctgaaaaggacttttggaagtgagataacatcagctctaagtgacacgtgcctatatccatcaggttggtggtggagaggagttggaaggaatgaagggttctagaccagaatgttcgtatttagaagacactatcagatataaccattgttacatgtgtgtagtttattcaaccctactgtgtatatagcggacaaacttaagtccttatttgaaacatctagtctttctagatgtttagaagtgcacaaagtatgttaaaagtagaggtagtaaataacacattttgtagctatccttttgatatgaaatattgtcttggaaattgatcaattctctgagcagtacccattttgatatttgtgctggttcagggggaaggaggagcacaaagtgcaaagggctttctaccagtgtccagtgtgtttatgaggaggcacattgaccattgtcccttatgtctgcattttcatttactgtgctgtgtatatagtgtatataagcggacataggagtcctaatttacgtctagtcgatgttaaaaaggttgccagtatatgacaaaagtagaattagtaaactactacattgagtacactttgtgttaaaattcatagggaagacttcttaaaaacaagtgaaattgttaaacccccccctaagcattacagatggcttatagctgtccacggggttggtagaggtgggaaagggaagggttctaggccagaatgttcctatttagaagacactcaaattacagtctgtgttatgtatgtataccatttattcaatgctactgtgtatataatggaaaacttaagtccagtttgaaacatctagtctttctaggtgtttaaaagtgtacaacggcctgtcgcagtggcgcatgcctgtaatcccagcactttgggaggccgaggcaggcggatcacgaggtcaagagatcaggaccatcttggccaacatggtgaaaccccatctttactaaaaatacaaaaattagctggtcgtggtggtgcccacctgtagccccagttactcgagaggctgaggcaggagaatcgcttgaacttgggaggcggaagttgcagtgagccaagatcgcaccactgcactccagcctggcgacagagcgaggctccgtttcaaaaaaaaaagtgcacaatgtaggttaacagtagagggcttaagtaacacccctctaagcatttgttttcagtacttcctaggagtggttgcatttgggaatggaattgttaaaacttgatgcttaggagcgaatgcagactattcattgggtgtttggggtgggggaagggggggtgggcagaggaggtatgcagggagaggggttctgtgctcctgagattagttcagatggtctaaccattgttctatatgtgcattttagttaatattgtgtattaaaggataagtcttaatgctcaaagtatgttaaaaatagatgtagtaaatcagtccctttgtgaatgtccttttgttagtttttaggaaggcctgtcctctgggagtgacctttattagtccaccccttggagctagacatcctgtacttagtcacggggatggtggaagagggagaagaggaagggtgaagggaagggctctttgctagtatctccatatctagacgatggttttagatgataaccacaggtctacaagagcgtttttagtaaagtgcctgtgttcattgtggacaaagttattattttgcaacatctatttttaacatactttgaggcattaagacttatcctttaatacacaatattaactaaaatgcccatatagaacaatggttagaccatctgaacgtcg

SEQ ID NO: 321426 - DNA, 3126 bp, Homo sapiens
gggaggagagaggagggggaggtgcagagagctctatgccatcctgtttacagcgaggcaagatgaatcattatgtctgtgcattttgttttacttatctgtgtatatagtgtacataaaggacagacgagtcctaattgacaacatctagtctttctggatgttaaagaggttgccagtgtatgacaaaagtagagttagtaaactaatatattttgtacattttgttttacaagtcctaggaaagattgtcttctgaaaatttgatgtcttctgggttgatggagatgggaagggttctaggccagaatgttcacatttggaagactctttcaaattataactgttgttacatgtttgcagtttattcaagactgctgtatacatagtagacaaattaactccttacttgaaacatctagtctatctagatgtttagaagtgcccgatgtatgttaaatgtataggtagtaaaataccactttgtaaatatctttttgctaaaattcataggaaatgcttttggaaattgaattgtgaagccacctttgtgaacagtatagtaatgtctatacttgttcaatagtttagaggaggtaggagggaagaaattgcaaaaggtaatattactagtgtgttcatacttggacattttcagacaccatttttctatatgttttgtgcattttgttttgctctgtatatagtatatataatggacaaatagtcctaatttttcaacatctagtctctagatgttaaagaggttgccagtgtatgacaaaggagtaaaattagcatattttgtacactttgtgttgaaattcgtaggaaaacttgtcttctgtaaagacttttgcataggaatttgtttgaccatctctaagcattacacgtgcctgtacttgtccactggattgaaggcagagaaggaagggaggagggaatgattcaaggccaaaatggccacatttagaagatacctcagatgataaccattgttatgtgtgtgcaattttatttaacagtgctgtgtatgtggtggacaagttatatgaaatatctagtctttctagatatttggaagtgcttgatgtatttaaaagtggtagtagaataacactttgtaaatagcttttaaaaactgatgggaaatgctgtttggaagtggaattgttgaaccacctgggaggtgggagggaagaaattgcaaatggtgttttgccattgtttattagaaaatttcagcttaatccattgtgtatatgttacatgcatttcatttaactttgctatactgtatatattgtatatataacggacaaattagtcccgattttataatatctagtctctagatattaaagaggttgccaatgtatgacagaagtagagttagtaaactaacacattttgtacactttgttaaaatttgtagaaaggctgtcttctgaaaaggacttttggaagtgagataacatcagctctaagtgacacgtgcctatatccatcaggttggtggtggagaggagttggaaggaatgaagggttctagaccagaatgttcgtatttagaagacactatcagatataaccattgttacatgtgtgtagtttattcaaccctactgtgtatatagcggacaaacttaagtccttatttgaaacatctagtctttctagatgtttagaagtgcacaaagtatgttaaaagtagaggtagtaaataacacattttgtagctatccttttgatatgaaatattgtcttggaaattgatcaattctctgagcagtacccattttgatatttgtgctggttcagggggaaggaggagcacaaagtgcaaagggctttctaccagtgtccagtgtgtttatgaggaggcacattgaccattgtcccttatgtctgcattttcatttactgtgctgtgtatatagtgtatataagcggacataggagtcctaatttacgtctagtcgatgttaaaaaggttgccagtatatgacaaaagtagaattagtaaactactacattgagtacactttgtgttaaaattcatagggaagacttcttaaaaacaagtgaaattgttaaacccccccctaagcattacagatggcttatagctgtccacggggttggtagaggtgggaaagggaagggttctaggccagaatgttcctatttagaagacactcaaattacagtctgtgttatgtatgtataccatttattcaatgctactgtgtatataatggaaaacttaagtccagtttgaaacatctagtctttctaggtgtttaaaagtgtacaacggcctgtcgcagtggcgcatgcctgtaatcccagcactttgggaggccgaggcaggcggatcacgaggtcaagagatcaggaccatcttggccaacatggtgaaaccccatctttactaaaaatacaaaaattagctggtcgtggtggtgcccacctgtagccccagttactcgagaggctgaggcaggagaatcgcttgaacttgggaggcggaagttgcagtgagccaagatcgcaccactgcactccagcctggcgacagagcgaggctccgtttcaaaaaaaaaagtgcacaatgtaggttaacagtagagggcttaagtaacacccctctaagcatttgttttcagtacttcctaggagtggttgcatttgggaatggaattgttaaaacttgatgcttaggagcgaatgcagactattcattgggtgtttggggtgggggaagggggggtgggcagaggaggtatgcagggagaggggttctgtgctcctgagattagttcagatggtctaaccattgttctatatgtgcattttagttaatattgtgtattaaaggataagtcttaatgctcaaagtatgttagaaggcctgtcctctgggagtgacctttattagtccaccccttggagctagacatcctgtacttagtcacggggatggtggaagagggagaagaggaagggtgggcaccgcctccctgctctcatcccatccctagcctcatgccctccgatgctcaccccccgtttatccgcagcgcccttagctctgcgccctctgcttcctgtcttcccccg

SEQ ID NO: 321427 - DNA, 3126 bp, Homo sapiens
gggaggagagaggagggggaggtgcagagagctctatgccatcctgtttacagcgaggcaagatgaatcattatgtctgtgcattttgttttacttatctgtgtatatagtgtacataaaggacagacgagtcctaattgacaacatctagtctttctggatgttaaagaggttgccagtgtatgacaaaagtagagttagtaaactaatatattttgtacattttgttttacaagtcctaggaaagattgtcttctgaaaatttgatgtcttctgggttgatggagatgggaagggttctaggccagaatgttcacatttggaagactctttcaaattataactgttgttacatgtttgcagtttattcaagactgctgtatacatagtagacaaattaactccttacttgaaacatctagtctatctagatgtttagaagtgcccgatgtatgttaaatgtataggtagtaaaataccactttgtaaatatctttttgctaaaattcataggaaatgcttttggaaattgaattgtgaagccacctttgtgaacagtatagtaatgtctatacttgttcaatagtttagaggaggtaggagggaagaaattgcaaaaggtaatattactagtgtgttcatacttggacattttcagacaccatttttctatatgttttgtgcattttgttttgctctgtatatagtatatataatggacaaatagtcctaatttttcaacatctagtctctagatgttaaagaggttgccagtgtatgacaaaggagtaaaattagcatattttgtacactttgtgttgaaattcgtaggaaaacttgtcttctgtaaagacttttgcataggaatttgtttgaccatctctaagcattacacgtgcctgtacttgtccactggattgaaggcagagaaggaagggaggagggaatgattcaaggccaaaatggccacatttagaagatacctcagatgataaccattgttatgtgtgtgcaattttatttaacagtgctgtgtatgtggtggacaagttatatgaaatatctagtctttctagatatttggaagtgcttgatgtatttaaaagtggtagtagaataacactttgtaaatagcttttaaaaactgatgggaaatgctgtttggaagtggaattgttgaaccacctgggaggtgggagggaagaaattgcaaatggtgttttgccattgtttattagaaaatttcagcttaatccattgtgtatatgttacatgcatttcatttaactttgctatactgtatatattgtatatataacggacaaattagtcccgattttataatatctagtctctagatattaaagaggttgccaatgtatgacagaagtagagttagtaaactaacacattttgtacactttgttaaaatttgtagaaaggctgtcttctgaaaaggacttttggaagtgagataacatcagctctaagtgacacgtgcctatatccatcaggttggtggtggagaggagttggaaggaatgaagggttctagaccagaatgttcgtatttagaagacactatcagatataaccattgttacatgtgtgtagtttattcaaccctactgtgtatatagcggacaaacttaagtccttatttgaaacatctagtctttctagatgtttagaagtgcacaaagtatgttaaaagtagaggtagtaaataacacattttgtagctatccttttgatatgaaatattgtcttggaaattgatcaattctctgagcagtacccattttgatatttgtgctggttcagggggaaggaggagcacaaagtgcaaagggctttctaccagtgtccagtgtgtttatgaggaggcacattgaccattgtcccttatgtctgcattttcatttactgtgctgtgtatatagtgtatataagcggacataggagtcctaatttacgtctagtcgatgttaaaaaggttgccagtatatgacaaaagtagaattagtaaactactacattgagtacactttgtgttaaaattcatagggaagacttcttaaaaacaagtgaaattgttaaacccccccctaagcattacagatggcttatagctgtccacggggttggtagaggtgggaaagggaagggttctaggccagaatgttcctatttagaagacactcaaattacagtctgtgttatgtatgtataccatttattcaatgctactgtgtatataatggaaaacttaagtccagtttgaaacatctagtctttctaggtgtttaaaagtgtacaacggcctgtcgcagtggcgcatgcctgtaatcccagcactttgggaggccgaggcaggcggatcacgaggtcaagagatcaggaccatcttggccaacatggtgaaaccccatctttactaaaaatacaaaaattagctggtcgtggtggtgcccacctgtagccccagttactcgagaggctgaggcaggagaatcgcttgaacttgggaggcggaagttgcagtgagccaagatcgcaccactgcactccagcctggcgacagagcgaggctccgtttcaaaaaaaaaagtgcacaatgtaggttaacagtagagggcttaagtaacacccctctaagcatttgttttcagtacttcctaggagtggttgcatttgggaatggaattgttaaaacttgatgcttaggagcgaatgcagactattcattgggtgtttggggtgggggaagggggggtgggcagaggaggtatgcagggagaggggttctgtgctcctgagattagttcagatggtctaaccattgttctatatgtgcattttagttaatattgtgtattaaaggataagtcttaatgctcaaagtatgttagaaggcctgtcctctgggagtgacctttattagtccaccccttggagctagacatcctgtacttagtcacggggatggtgggagccagatgacccagttcgccttctctccatcctcccatctcctctcattccccactcctctcagccctcgcccccccccccctctacctccctccctcccttcccctcccttcttcgcctccctctcccccg

SEQ ID NO: 321428 - DNA, 764 bp, Homo sapiens
gttcaacaacaacaaactgaagggggagaaaaatacaccattaccacagcaacaaattagtttatgctagacaacttgtaaagaataaattaacttccaaatgcctatagacatggatattagtgacacaagagattttagacttttggagggttcttaaaaaattgtgctttaaaggaagagactctacattggatgcagccagtttttaaaaatgtgtctgaagcatttggtgatggtttctgcctgttcagtaaagaagcaccggctcagaacctcaacttctggacttactcaagtttgcagaactcctccaaagcagtcgagtgctctgttctctctgcttggatgttcttgttgtgaatgaacctttatgtcttgtagagcataaggaaacccagcccagagccacgagctcagatgaggagggctgctagcagcgatcaacttagggacaatagcccgcccccagcattcaagccagagccgcccaaggtacgtggctgggaagccccaggatgggaaggaagaggaagcagatgccctctgaagcctccctggacggcccagggaggagcatgcacactgagatggtgtttaattacggttctgactcactgtgttctctattagagcctatcttttggcctgttgggtgaactcccaaattagggaagggcaaaaaggaaggaaaggcaatattaggagagcatatgattttaggactgttagtgtttatttaatttactcttcttgtaaaaaaa

SEQ ID NO: 321429 - DNA, 1306 bp, Homo sapiens
cctcgctgctgggtgagactagccagggagcttaggggtaaggagggcaccccctgtccaacagggagattcttaggtcagggagcacctggctggcttcctcactcaccgccgaagtgggcattggatttgacctattacgaacctggagcaggaccagggatgccctggttgctctgcagaatgtggctcagaggtaagtgatctgctcgggatacccagtcactgtgctcagagccatgcctccccgggcagccggaggacatggatgtgctctggaatgtctttaacaccctttttttgttagttcttccagaccccctgagccacagaaagctccttccagaccttatcaggataccagaggaagttatggcagtgatgccgaggaggaggagtaccgccagcagctgtcagaacactccaagcgcggttactatggccagtctgcccgataccgggacacagaattatagatgtctgagcacggactctcccaggcctgcctgcatggcatcagactagccactcctgccaggccgccgggatggttcttctccagttagaatgcaccatggagacgtggtgggactccagctcgtgtgtcctcatggagaacccaggggacagctggtgcaaattcagaactgagggctctatttgtgggactgggttagaggagtctgtggctttttgttcagaattaagcagaacactgcagtcagatcctgttacttgcttcagtggaccgaaatctgtattctgtttgcgtacttgtaatatgtatattaagaagcaataactatttttcctcattaatagctgccttcaaggactgtttcagtgtgagtcagaatgtgaaaaaggaataaaaaatactgttgggctcaaactaaattcaaagaagtactttattgcaactcttttaagtgccttggatgagaagtgtcttaaattttcttcctttgaagctttaggcagagccataatggactaaaacattttgactaagtttttataccagcttaatagctgtagttttccctgcactgtgtcatcttttcaaggcatttgtctttgtaatattttccataaatttggactgtctatatcataactatacttgatagtttggctataagtgctcaatagcttgaagcccaagaagttggtatcgaaatttgttgtttgtttaaacccaagtgctgcacaaaagcagatacttgaggaaaacactatttccaaaagcacatgtattgacaacagttttataatttaataaaaaggaatacattgcaatccgtaa

SEQ ID NO: 321430 - DNA, 5052 bp, Homo sapiens
ggaagctcagctgcagttctacgtagaagaaaagaggcggcaaagtaggcgcgcgggctccagtgacaaaggtctcccaggcagccgcggcccctgccccaccgctgagtggcgtgcgtgcaggcccaccctctccgcctttcccgacaccccaaagtagcgctgcgagcagctgcgtctccctcccggggctcgcgcgcccagaaccctccggtctcaaggaagcaggtgacagccgccgcccacccccttcccctccccgccgctgctctctggctcgccaccgcccaactccccctgcccccaccctggattttttttccccttctctcaaacctctaaacaggaaatagcccgaatcacaataatatacgggagcagccgcggaggccgctggcgccctcccattcccggggagcttcccgcactccggcttgggtgaagtgcagccagcgacgcgcgcagggagcgcagggggacaccagcccagcagctagcgccgcgccgcccagcgccccggagagccgccttcgccctcgcccagcgcccgacaccgccggccgcggcggcggccgccaccggctctagggtgcgaagtaccacattactgtcatctccctgtgagtgggattggcaccccggctgcagctccaggagcaagtactccaggaagcacagagctgtaccagtacacggcccacgttgccaggccccaggcatggaagagctgatatgggaacagtacactgtgaccctacaaaaggattccaaaagaggatttggaattgcagtgtccggaggcagagacaacccccactttgaaaatggagaaacgtcaattgtcatttctgatgtgctcccgggtgggcctgctgatgggctgctccaagaaaatgacagagtggtcatggtcaatggcacccccatggaggatgtgcttcattcgtttgcagttcagcagctcagaaaaagtgggaaggtcgctgctattgtggtcaagaggccccggaaggtccaggtggccgcacttcaggccagccctcccctggatcaggatgaccgggcttttgaggtgatggacgagtttgatggcagaagtttccggagtggctacagcgagaggagccggctgaacagccatggggggcgcagccgcagctgggaggacagcccggaaagggggcgtccccatgagcgggcccggagccgggagcgggacctcagccgggaccggagccgtggccggagcctggagcggggcctggaccaagaccatgcgcgcacccgagaccgcagccgtggccggagcctggagcggggcctggaccacgactttgggccatcccgggaccgggaccgtgaccgcagccgcggccggagcattgaccaggactacgagcgagcctatcaccgggcctacgacccagactacgagcgggcctacagcccggagtacaggcgcggggcccgccacgatgcccgctctcggggaccccgaagccgcagccgcgagcacccgcactcacggagccccagccccgagcctagggggcggccggggcccatcggggtcctcctgatgaaaagcagagcgaacgaagagtatggtctccggcttgggagtcagatcttcgtaaaggaaatgacccgaacgggtctggcaactaaagatggcaaccttcacgaaggagacataattctcaagatcaatgggactgtaactgagaacatgtctttaacggatgctcgaaaattgatagaaaagtcaagaggaaaactacagctagtggtgttgagagacagccagcagaccctcatcaacatcccgtcattaaatgacagtgactcagaaatagaagatatttcagaaatagagtcaaaccgatcattttctccagaggagagacgtcatcagtattctgattatgattatcattcctcaagtgagaagctgaaggaaaggccaagttccagagaggacacgccgagcagattgtccaggatgggtgcgacacccactccctttaagtccacaggggatattgcaggcacagttgtcccagagaccaacaaggaacccagataccaagaggaacccccagctcctcaaccaaaagcagccccgagaacttttcttcgtcctagtcctgaagatgaagcaatatatggccctaataccaaaatggtaaggttcaagaagggagacagcgtgggcctccggttggctggtggcaatgatgtcgggatatttgttgctggcattcaagaagggacctcggcggagcaggagggccttcaagaaggagaccagattctgaaggtgaacacacaggatttcagaggattagtgcgggaggatgccgttctctacctgttagaaatccctaaaggtgaaatggtgaccattttagctcagagccgagccgatgtgtatagagacatcctggcttgtggcagaggggattcgttttttataagaagccactttgaatgtgagaaggaaactccacagagcctggccttcaccagaggggaggtcttccgagtggtagacacactgtatgacggcaagctgggcaactggctggctgtgaggattgggaacgagttggagaaaggcttaatccccaacaagagcagagctgaacaaatggccagtgttcaaaatgcccagagagacaacgctggggaccgggcagatttctggagaatgcgtggccagaggtctggggtgaagaagaacctgaggaaaagtcgggaagacctcacagctgttgtgtctgtcagcaccaagttcccagcttatgagagggttttgctgcgagaagctggtttcaagagacctgtggtcttattcggccccatagctgatatagcaatggaaaaattggctaatgagttacctgactggtttcaaactgctaaaacggaaccaaaagatgcaggatctgagaaatccactggagtggtccggttaaataccgtgaggcaaattattgaacaggataagcatgcactactggatgtgactccgaaagctgtggacctgttgaattacacccagtggttcccaattgtgatttttttcaacccagactccagacaaggtgtcaaaaccatgagacaaaggttaaatccaacgtccaacaaaagttctcgaaagttatttgatcaagccaacaagcttaaaaaaacgtgtgcacacctttttacagctacaatcaacctaaattcagccaatgatagctggtttggcagcttaaaggacactattcagcatcagcaaggagaagcggtttgggtctctgaaggaaagatggaagggatggatgatgaccccgaagaccgcatgtcctacttaaccgccatgggcgcggactatctgagttgcgacagccgcctcatcagtgactttgaagacacggacggtgaaggaggcgcctacactgacaatgagctggatgagccagccgaggagccgctggtgtcgtccatcacccgctcctcggagccggtgcagcacgaggagagcataaggaaacccagcccagagccacgagctcagatgaggagggctgctagcagcgatcaacttagggacaatagcccgcccccagcattcaagccagagccgcccaaggccaaaacccagaacaaagaagaatcctatgacttctccaaatcctatgaatataagtcaaacccctctgccgttgctggtaatgaaactcctggggcatctaccaaaggttatcctcctcctgttgcagcaaaacctacctttgggcggtctatactgaagccctccactcccatccctcctcaagagggtgaggaggtgggagagagcagtgaggagcaagataatgctcccaaatcagtcctgggcaaagtcaaaatatttgagaagatggatcacaaggccaggttacagagaatgcaggagctccaggaagcacagaatgcaaggatcgaaattgcccagaagcatcctgatatctatgcagttccaatcaaaacgcacaagccagaccctggcacgccccagcacacgagttccagaccccctgagccacagaaagctccttccagaccttatcaggataccagaggaagttatggcagtgatgccgaggaggaggagtaccgccagcagctgtcagaacactccaagcgcggttactatggccagtctgcccgataccgggacacagaattatagatgtctgagcacggactctcccaggcctgcctgcatggcatcagactagccactcctgccaggccgccgggatggttcttctccagttagaatgcaccatggagacgtggtgggactccagctcgtgtgtcctcatggagaacccaggggacagctggtgcaaattcagaactgagggctctatttgtgggactgggttagaggagtctgtggctttttgttcagaattaagcagaacactgcagtcagatcctgttacttgcttcagtggaccgaaatctgtattctgtttgcgtacttgtaatatgtatattaagaagcaataactatttttcctcattaatagctgccttcaaggactgtttcagtgtgagtcagaatgtgaaaaaggaataaaaaatactgttgggctcaaactaaattcaaagaagtactttattgcaactcttttaagtgccttggatgagaagtgtcttaaattttcttcctttgaagctttaggcagagccataatggactaaaacattttgactaagtttttataccagcttaatagctgtagttttccctgcactgtgtcatcttttcaaggcatttgtctttgtaatattttccataaatttggactgtctatatcataactatacttgatagtttggctataagtgctcaatagcttgaagcccaagaagttggtatcgaaatttgttgtttgtttaaacccaagtgctgcacaaaagcagatacttgaggaaaacactatttccaaaagcacatgtattgacaacagttttataatttaataaaaaggaatacattgcaatccgtaa

SEQ ID NO: 321431 - DNA, 4934 bp, Homo sapiens
ggaagctcagctgcagttctacgtagaagaaaagaggcggcaaagtaggcgcgcgggctccagtgacaaaggtctcccaggcagccgcggcccctgccccaccgctgagtggcgtgcgtgcaggcccaccctctccgcctttcccgacaccccaaagtagcgctgcgagcagctgcgtctccctcccggggctcgcgcgcccagaaccctccggtctcaaggaagcaggaaatagcccgaatcacaataatatacgggagcagccgcggaggccgctggcgccctcccattcccggggagcttcccgcactccggcttgggtgaagtgcagccagcgacgcgcgcagggagcgcagggggacaccagcccagcagctagcgccgcgccgcccagcgccccggagagccgccttcgccctcgcccagcgcccgacaccgccggccgcggcggcggccgccaccggctctagggtgcgaagtaccacattactgtcatctccctgtgagtgggattggcaccccggctgcagctccaggagcaagtactccaggaagcacagagctgtaccagtacacggcccacgttgccaggccccaggcatggaagagctgatatgggaacagtacactgtgaccctacaaaaggattccaaaagaggatttggaattgcagtgtccggaggcagagacaacccccactttgaaaatggagaaacgtcaattgtcatttctgatgtgctcccgggtgggcctgctgatgggctgctccaagaaaatgacagagtggtcatggtcaatggcacccccatggaggatgtgcttcattcgtttgcagttcagcagctcagaaaaagtgggaaggtcgctgctattgtggtcaagaggccccggaaggtccaggtggccgcacttcaggccagccctcccctggatcaggatgaccgggcttttgaggtgatggacgagtttgatggcagaagtttccggagtggctacagcgagaggagccggctgaacagccatggggggcgcagccgcagctgggaggacagcccggaaagggggcgtccccatgagcgggcccggagccgggagcgggacctcagccgggaccggagccgtggccggagcctggagcggggcctggaccaagaccatgcgcgcacccgagaccgcagccgtggccggagcctggagcggggcctggaccacgactttgggccatcccgggaccgggaccgtgaccgcagccgcggccggagcattgaccaggactacgagcgagcctatcaccgggcctacgacccagactacgagcgggcctacagcccggagtacaggcgcggggcccgccacgatgcccgctctcggggaccccgaagccgcagccgcgagcacccgcactcacggagccccagccccgagcctagggggcggccggggcccatcggggtcctcctgatgaaaagcagagcgaacgaagagtatggtctccggcttgggagtcagatcttcgtaaaggaaatgacccgaacgggtctggcaactaaagatggcaaccttcacgaaggagacataattctcaagatcaatgggactgtaactgagaacatgtctttaacggatgctcgaaaattgatagaaaagtcaagaggaaaactacagctagtggtgttgagagacagccagcagaccctcatcaacatcccgtcattaaatgacagtgactcagaaatagaagatatttcagaaatagagtcaaaccgatcattttctccagaggagagacgtcatcagtattctgattatgattatcattcctcaagtgagaagctgaaggaaaggccaagttccagagaggacacgccgagcagattgtccaggatgggtgcgacacccactccctttaagtccacaggggatattgcaggcacagttgtcccagagaccaacaaggaacccagataccaagaggaacccccagctcctcaaccaaaagcagccccgagaacttttcttcgtcctagtcctgaagatgaagcaatatatggccctaataccaaaatggtaaggttcaagaagggagacagcgtgggcctccggttggctggtggcaatgatgtcgggatatttgttgctggcattcaagaagggacctcggcggagcaggagggccttcaagaaggagaccagattctgaaggtgaacacacaggatttcagaggattagtgcgggaggatgccgttctctacctgttagaaatccctaaaggtgaaatggtgaccattttagctcagagccgagccgatgtgtatagagacatcctggcttgtggcagaggggattcgttttttataagaagccactttgaatgtgagaaggaaactccacagagcctggccttcaccagaggggaggtcttccgagtggtagacacactgtatgacggcaagctgggcaactggctggctgtgaggattgggaacgagttggagaaaggcttaatccccaacaagagcagagctgaacaaatggccagtgttcaaaatgcccagagagacaacgctggggaccgggcagatttctggagaatgcgtggccagaggtctggggtgaagaagaacctgaggaaaagtcgggaagacctcacagctgttgtgtctgtcagcaccaagttcccagcttatgagagggttttgctgcgagaagctggtttcaagagacctgtggtcttattcggccccatagctgatatagcaatggaaaaattggctaatgagttacctgactggtttcaaactgctaaaacggaaccaaaagatgcaggatctgagaaatccactggagtggtccggttaaataccgtgaggcaaattattgaacaggataagcatgcactactggatgtgactccgaaagctgtggacctgttgaattacacccagtggttcccaattgtgatttttttcaacccagactccagacaaggtgtcaaaaccatgagacaaaggttaaatccaacgtccaacaaaagttctcgaaagttatttgatcaagccaacaagcttaaaaaaacgtgtgcacacctttttacagctacaatcaacctaaattcagccaatgatagctggtttggcagcttaaaggacactattcagcatcagcaaggagaagcggtttgggtctctgaaggaaagatggaagggatggatgatgaccccgaagaccgcatgtcctacttaaccgccatgggcgcggactatctgagttgcgacagccgcctcatcagtgactttgaagacacggacggtgaaggaggcgcctacactgacaatgagctggatgagccagccgaggagccgctggtgtcgtccatcacccgctcctcggagccggtgcagcacgaggagagcataaggaaacccagcccagagccacgagctcagatgaggagggctgctagcagcgatcaacttagggacaatagcccgcccccagcattcaagccagagccgcccaaggccaaaacccagaacaaagaagaatcctatgacttctccaaatcctatgaatataagtcaaacccctctgccgttgctggtaatgaaactcctggggcatctaccaaaggttatcctcctcctgttgcagcaaaacctacctttgggcggtctatactgaagccctccactcccatccctcctcaagagggtgaggaggtgggagagagcagtgaggagcaagataatgctcccaaatcagtcctgggcaaagtcaaaatatttgagaagatggatcacaaggccaggttacagagaatgcaggagctccaggaagcacagaatgcaaggatcgaaattgcccagaagcatcctgatatctatgcagttccaatcaaaacgcacaagccagaccctggcacgccccagcacacgagttccagaccccctgagccacagaaagctccttccagaccttatcaggataccagaggaagttatggcagtgatgccgaggaggaggagtaccgccagcagctgtcagaacactccaagcgcggttactatggccagtctgcccgataccgggacacagaattatagatgtctgagcacggactctcccaggcctgcctgcatggcatcagactagccactcctgccaggccgccgggatggttcttctccagttagaatgcaccatggagacgtggtgggactccagctcgtgtgtcctcatggagaacccaggggacagctggtgcaaattcagaactgagggctctatttgtgggactgggttagaggagtctgtggctttttgttcagaattaagcagaacactgcagtcagatcctgttacttgcttcagtggaccgaaatctgtattctgtttgcgtacttgtaatatgtatattaagaagcaataactatttttcctcattaatagctgccttcaaggactgtttcagtgtgagtcagaatgtgaaaaaggaataaaaaatactgttgggctcaaactaaattcaaagaagtactttattgcaactcttttaagtgccttggatgagaagtgtcttaaattttcttcctttgaagctttaggcagagccataatggactaaaacattttgactaagtttttataccagcttaatagctgtagttttccctgcactgtgtcatcttttcaaggcatttgtctttgtaatattttccataaatttggactgtctatatcataactatacttgatagtttggctataagtgctcaatagcttgaagcccaagaagttggtatcgaaatttgttgtttgtttaaacccaagtgctgcacaaaagcagatacttgaggaaaacactatttccaaaagcacatgtattgacaacagttttataatttaataaaaaggaatacattgcaatccgtaa

SEQ ID NO: 321432 - DNA, 6273 bp, Homo sapiens
  misc_feature (3739)..(3739): n is a, c, g, or t
ggaagctcagctgcagttctacgtagaagaaaagaggcggcaaagtaggcgcgcgggctccagtgacaaaggtctcccaggcagccgcggcccctgccccaccgctgagtggcgtgcgtgcaggcccaccctctccgcctttcccgacaccccaaagtagcgctgcgagcagctgcgtctccctcccggggctcgcgcgcccagaaccctccggtctcaaggaagcaggtgacagccgccgcccacccccttcccctccccgccgctgctctctggctcgccaccgcccaactccccctgcccccaccctggattttttttccccttctctcaaacctctaaacaggaaatagcccgaatcacaataatatacgggagcagccgcggaggccgctggcgccctcccattcccggggagcttcccgcactccggcttgggtgaagtgcagccagcgacgcgcgcagggagcgcagggggacaccagcccagcagctagcgccgcgccgcccagcgccccggagagccgccttcgccctcgcccagcgcccgacaccgccggccgcggcggcggccgccaccggctctagggtgcgaagtaccacattactgtcatctccctgtgagtgggattggcaccccggctgcagctccaggagcaagtactccaggaagcacagagctgtaccagtacacggcccacgttgccaggccccaggcatggaagagctgatatgggaacagtacactgtgaccctacaaaaggattccaaaagaggatttggaattgcagtgtccggaggcagagacaacccccactttgaaaatggagaaacgtcaattgtcatttctgatgtgctcccgggtgggcctgctgatgggctgctccaagaaaatgacagagtggtcatggtcaatggcacccccatggaggatgtgcttcattcgtttgcagttcagcagctcagaaaaagtgggaaggtcgctgctattgtggtcaagaggccccggaaggtccaggtggccgcacttcaggccagccctcccctggatcaggatgaccgggcttttgaggtgatggacgagtttgatggcagaagtttccggagtggctacagcgagaggagccggctgaacagccatggggggcgcagccgcagctgggaggacagcccggaaagggggcgtccccatgagcgggcccggagccgggagcgggacctcagccgggaccggagccgtggccggagcctggagcggggcctggaccaagaccatgcgcgcacccgagaccgcagccgtggccggagcctggagcggggcctggaccacgactttgggccatcccgggaccgggaccgtgaccgcagccgcggccggagcattgaccaggactacgagcgagcctatcaccgggcctacgacccagactacgagcgggcctacagcccggagtacaggcgcggggcccgccacgatgcccgctctcggggaccccgaagccgcagccgcgagcacccgcactcacggagccccagccccgagcctagggggcggccggggcccatcggggtcctcctgatgaaaagcagagcgaacgaagagtatggtctccggcttgggagtcagatcttcgtaaaggaaatgacccgaacgggtctggcaactaaagatggcaaccttcacgaaggagacataattctcaagatcaatgggactgtaactgagaacatgtctttaacggatgctcgaaaattgatagaaaagtcaagaggaaaactacagctagtggtgttgagagacagccagcagaccctcatcaacatcccgtcattaaatgacagtgactcagaaatagaagatatttcagaaatagagtcaaaccgatcattttctccagaggagagacgtcatcagtattctgattatgattatcattcctcaagtgagaagctgaaggaaaggccaagttccagagaggacacgccgagcagattgtccaggatgggtgcgacacccactccctttaagtccacaggggatattgcaggcacagttgtcccagagaccaacaaggaacccagataccaagaggaacccccagctcctcaaccaaaagcagccccgagaacttttcttcgtcctagtcctgaagatgaagcaatatatggccctaataccaaaatggtaaggttcaagaagggagacagcgtgggcctccggttggctggtggcaatgatgtcgggatatttgttgctggcattcaagaagggacctcggcggagcaggagggccttcaagaaggagaccagattctgaaggtgaacacacaggatttcagaggattagtgcgggaggatgccgttctctacctgttagaaatccctaaaggtgaaatggtgaccattttagctcagagccgagccgatgtgtatagagacatcctggcttgtggcagaggggattcgttttttataagaagccactttgaatgtgagaaggaaactccacagagcctggccttcaccagaggggaggtcttccgagtggtagacacactgtatgacggcaagctgggcaactggctggctgtgaggattgggaacgagttggagaaaggcttaatccccaacaagagcagagctgaacaaatggccagtgttcaaaatgcccagagagacaacgctggggaccgggcagatttctggagaatgcgtggccagaggtctggggtgaagaagaacctgaggaaaagtcgggaagacctcacagctgttgtgtctgtcagcaccaagttcccagcttatgagagggttttgctgcgagaagctggtttcaagagacctgtggtcttattcggccccatagctgatatagcaatggaaaaattggctaatgagttacctgactggtttcaaactgctaaaacggaaccaaaagatgcaggatctgagaaatccactggagtggtccggttaaataccgtgaggcaaattattgaacaggataagcatgcactactggatgtgactccgaaagctgtggacctgttgaattacacccagtggttcccaattgtgatttttttcaacccagactccagacaaggtgtcaaaaccatgagacaaaggttaaatccaacgtccaacaaaagttctcgaaagttatttgatcaagccaacaagcttaaaaaaacgtgtgcacacctttttacagctacaatcaacctaaattcagccaatgatagctggtttggcagcttaaaggacactattcagcatcagcaaggagaagcggtttgggtctctgaaggaaaggtatgtggcatagatatgctgctatgaggtgagagtccctgttctgaaacttttctcaagagggcagtgaatgtagtcaagccatgcccatttgaagtgatgctcacatgtgtgctaatcaagtttgaaatttcgtaaattctctgaccaagtaataaaaatgaagggacttttaaaagaagagcagaatgtgacatgtgcagccctacattcacttccctttcacttttaatgtagtaactagtgttatattccaagtacactaatcagagcttacaagatctcatgctgagctccacagcttactaaggacgtgggaaacttagagtgcagatgagaggtgaggttgagcaacttggagaatacggctaaacattaataaaaagaaaagctaatggagttagaattacttagaaaataagnttggttgagaatgtgccatcgttctgggagtttgaatgggtgatatgagaacgttagggaatttgtctaggcctctagaattggatcgcttctccctcggggagatagctcacacacagctgtgctgcagggaggagagagggagattctattacctgtggccgcttttattttagaagcttttggtgttagtatcctgttcaccagctgaactgaggtagttttgtgagacttgacagtgactattttgttgcagaattgactaagttttgctctttgagaactagatgtgtagtcaaagtatctggcatctatggagtgcttccagtttggaagggggatgcaagcttccctggggaggacaggttgaacaggacatagcttctgcctttgagggtctgagaatcttgtagaggcatggatgtgagtgtagcacaaggcagcgtgcaatgtgttgatattactaggagagtggtaccaggagaacaggctgcagaggagctggattcagaagaaaagcaagacagactgagaaagtgtggcttagccgcggtatggaggatggatggtagcacagataggctgcagggcccctaatttgagttcctgcacaaaaacgaccataatatcaacattgtaccaaagccaagtgatctcagggagaaaaataaaagatgccttccctggcgagcacatcaaggtttcagtcgcttggctgtgtccttgggaattttcttgagtccccactcccaggagccacatcagaccccactgaccgtccaacacaaattcctctagatggaagggatggatgatgaccccgaagaccgcatgtcctacttaaccgccatgggcgcggactatctgagttgcgacagccgcctcatcagtgactttgaagacacggacggtgaaggaggcgcctacactgacaatgagctggatgagccagccgaggagccgctggtgtcgtccatcacccgctcctcggagccggtgcagcacgaggagagcataaggaaacccagcccagagccacgagctcagatgaggagggctgctagcagcgatcaacttagggacaatagcccgcccccagcattcaagccagagccgcccaaggccaaaacccagaacaaagaagaatcctatgacttctccaaatcctatgaatataagtcaaacccctctgccgttgctggtaatgaaactcctggggcatctaccaaaggttatcctcctcctgttgcagcaaaacctacctttgggcggtctatactgaagccctccactcccatccctcctcaagagggtgaggaggtgggagagagcagtgaggagcaagataatgctcccaaatcagtcctgggcaaagtcaaaatatttgagaagatggatcacaaggccaggttacagagaatgcaggagctccaggaagcacagaatgcaaggatcgaaattgcccagaagcatcctgatatctatgcagttccaatcaaaacgcacaagccagaccctggcacgccccagcacacgagttccagaccccctgagccacagaaagctccttccagaccttatcaggataccagaggaagttatggcagtgatgccgaggaggaggagtaccgccagcagctgtcagaacactccaagcgcggttactatggccagtctgcccgataccgggacacagaattatagatgtctgagcacggactctcccaggcctgcctgcatggcatcagactagccactcctgccaggccgccgggatggttcttctccagttagaatgcaccatggagacgtggtgggactccagctcgtgtgtcctcatggagaacccaggggacagctggtgcaaattcagaactgagggctctatttgtgggactgggttagaggagtctgtggctttttgttcagaattaagcagaacactgcagtcagatcctgttacttgcttcagtggaccgaaatctgtattctgtttgcgtacttgtaatatgtatattaagaagcaataactatttttcctcattaatagctgccttcaaggactgtttcagtgtgagtcagaatgtgaaaaaggaataaaaaatactgttgggctcaaactaaattcaaagaagtactttattgcaactcttttaagtgccttggatgagaagtgtcttaaattttcttcctttgaagctttaggcagagccataatggactaaaacattttgactaagtttttataccagcttaatagctgtagttttccctgcactgtgtcatcttttcaaggcatttgtctttgtaatattttccataaatttggactgtctatatcataactatacttgatagtttggctataagtgctcaatagcttgaagcccaagaagttggtatcgaaatttgttgtttgtttaaacccaagtgctgcacaaaagcagatacttgaggaaaacactatttccaaaagcacatgtattgacaacagttttataatttaataaaaaggaatacattgcaatccgtaa

SEQ ID NO: 321433 - DNA, 4941 bp, Homo sapiens
ggaagctcagctgcagttctacgtagaagaaaagaggcggcaaagtaggcgcgcgggctccagtgacaaaggtctcccaggcagccgcggcccctgccccaccgctgagtggcgtgcgtgcaggcccaccctctccgcctttcccgacaccccaaagtagcgctgcgagcagctgcgtctccctcccggggctcgcgcgcccagaaccctccggtctcaaggaagcaggtgacagccgccgcccacccccttcccctccccgccgctgctctctggctcgccaccgcccaactccccctgcccccaccctggattttttttccccttctctcaaacctctaaacaggaaatagcccgaatcacaataatatacgggagcagccgcggaggccgctggcgccctcccattcccggggagcttcccgcactccggcttgggtgaagtgcagccagcgacgcgcgcagggagcgcagggggacaccagcccagcagctagcgccgcgccgcccagcgccccggagagccgccttcgccctcgcccagcgcccgacaccgccggccgcggcggcggccgccaccggctctagggtgcgaagtaccacattactgtcatctccctgtgagtgggattggcaccccggctgcagctccaggagcaagtactccaggaagcacagagctgtaccagtacacggcccacgttgccaggccccaggcatggaagagctgatatgggaacagtacactgtgaccctacaaaaggattccaaaagaggatttggaattgcagtgtccggaggcagagacaacccccactttgaaaatggagaaacgtcaattgtcatttctgatgtgctcccgggtgggcctgctgatgggctgctccaagaaaatgacagagtggtcatggtcaatggcacccccatggaggatgtgcttcattcgtttgcagttcagcagctcagaaaaagtgggaaggtcgctgctattgtggtcaagaggccccggaaggtccaggtggccgcacttcaggccagccctcccctggatcaggatgaccgggcttttgaggtgatggacgagtttgatggcagaagtttccggagtggctacagcgagaggagccggctgaacagccatggggggcgcagccgcagctgggaggacagcccggaaagggggcgtccccatgagcgggcccggagccgggagcgggacctcagccgggaccggagccgtggccggagcctggagcggggcctggaccaagaccatgcgcgcacccgagaccgcagccgtggccggagcctggagcggggcctggaccacgactttgggccatcccgggaccgggaccgtgaccgcagccgcggccggagcattgaccaggactacgagcgagcctatcaccgggcctacgacccagactacgagcgggcctacagcccggagtacaggcgcggggcccgccacgatgcccgctctcggggaccccgaagccgcagccgcgagcacccgcactcacggagccccagccccgagcctagggggcggccggggcccatcggggtcctcctgatgaaaagcagagcgaacgaagagtatggtctccggcttgggagtcagatcttcgtaaaggaaatgacccgaacgggtctggcaactaaagatggcaaccttcacgaaggagacataattctcaagatcaatgggactgtaactgagaacatgtctttaacggatgctcgaaaattgatagaaaagtcaagaggaaaactacagctagtggtgttgagagacagccagcagaccctcatcaacatcccgtcattaaatgacagtgactcagaaatagaagatatttcagaaatagagtcaaaccgatcattttctccagaggagagacgtcatcagtattctgattatgattatcattcctcaagtgagaagctgaaggaaaggccaagttccagagaggacacgccgagcagattgtccaggatgggtgcgacacccactccctttaagtccacaggggatattgcaggcacagttgtcccagagaccaacaaggaacccagataccaagaggaacccccagctcctcaaccaaaagcagccccgagaacttttcttcgtcctagtcctgaagatgaagcaatatatggccctaataccaaaatggtaaggttcaagaagggagacagcgtgggcctccggttggctggtggcaatgatgtcgggatatttgttgctggcattcaagaagggacctcggcggagcaggagggccttcaagaaggagaccagattctgaaggtgaacacacaggatttcagaggattagtgcgggaggatgccgttctctacctgttagaaatccctaaaggtgaaatggtgaccattttagctcagagccgagccgatgtgtatagagacatcctggcttgtggcagaggggattcgttttttataagaagccactttgaatgtgagaaggaaactccacagagcctggccttcaccagaggggaggtcttccgagtggtagacacactgtatgacggcaagctgggcaactggctggctgtgaggattgggaacgagttggagaaaggcttaatccccaacaagagcagagctgaacaaatggccagtgttcaaaatgcccagagagacaacgctggggaccgggcagatttctggagaatgcgtggccagaggtctggggtgaagaagaacctgaggaaaagtcgggaagacctcacagctgttgtgtctgtcagcaccaagttcccagcttatgagagggttttgctgcgagaagctggtttcaagagacctgtggtcttattcggccccatagctgatatagcaatggaaaaattggctaatgagttacctgactggtttcaaactgctaaaacggaaccaaaagatgcaggatctgagaaatccactggagtggtccggttaaataccgtgaggcaaattattgaacaggataagcatgcactactggatgtgactccgaaagctgtggacctgttgaattacacccagtggttcccaattgtgatttttttcaacccagactccagacaaggtgtcaaaaccatgagacaaaggttaaatccaacgtccaacaaaagttctcgaaagttatttgatcaagccaacaagcttaaaaaaacgtgtgcacacctttttacagctacaatcaacctaaattcagccaatgatagctggtttggcagcttaaaggacactattcagcatcagcaaggagaagcggtttgggtctctgaaggaaagatggaagggatggatgatgaccccgaagaccgcatgtcctacttaaccgccatgggcgcggactatctgagttgcgacagccgcctcatcagtgactttgaagacacggacggtgaaggaggcgcctacactgacaatgagctggatgagccagccgaggagccgctggtgtcgtccatcacccgctcctcggagccggtgcagcacgaggaggccaaaacccagaacaaagaagaatcctatgacttctccaaatcctatgaatataagtcaaacccctctgccgttgctggtaatgaaactcctggggcatctaccaaaggttatcctcctcctgttgcagcaaaacctacctttgggcggtctatactgaagccctccactcccatccctcctcaagagggtgaggaggtgggagagagcagtgaggagcaagataatgctcccaaatcagtcctgggcaaagtcaaaatatttgagaagatggatcacaaggccaggttacagagaatgcaggagctccaggaagcacagaatgcaaggatcgaaattgcccagaagcatcctgatatctatgcagttccaatcaaaacgcacaagccagaccctggcacgccccagcacacgagttccagaccccctgagccacagaaagctccttccagaccttatcaggataccagaggaagttatggcagtgatgccgaggaggaggagtaccgccagcagctgtcagaacactccaagcgcggttactatggccagtctgcccgataccgggacacagaattatagatgtctgagcacggactctcccaggcctgcctgcatggcatcagactagccactcctgccaggccgccgggatggttcttctccagttagaatgcaccatggagacgtggtgggactccagctcgtgtgtcctcatggagaacccaggggacagctggtgcaaattcagaactgagggctctatttgtgggactgggttagaggagtctgtggctttttgttcagaattaagcagaacactgcagtcagatcctgttacttgcttcagtggaccgaaatctgtattctgtttgcgtacttgtaatatgtatattaagaagcaataactatttttcctcattaatagctgccttcaaggactgtttcagtgtgagtcagaatgtgaaaaaggaataaaaaatactgttgggctcaaactaaattcaaagaagtactttattgcaactcttttaagtgccttggatgagaagtgtcttaaattttcttcctttgaagctttaggcagagccataatggactaaaacattttgactaagtttttataccagcttaatagctgtagttttccctgcactgtgtcatcttttcaaggcatttgtctttgtaatattttccataaatttggactgtctatatcataactatacttgatagtttggctataagtgctcaatagcttgaagcccaagaagttggtatcgaaatttgttgtttgtttaaacccaagtgctgcacaaaagcagatacttgaggaaaacactatttccaaaagcacatgtattgacaacagttttataatttaataaaaaggaatacattgcaatccgtaa

SEQ ID NO: 321434 - DNA, 4728 bp, Homo sapiens
ggaagctcagctgcagttctacgtagaagaaaagaggcggcaaagtaggcgcgcgggctccagtgacaaaggtctcccaggcagccgcggcccctgccccaccgctgagtggcgtgcgtgcaggcccaccctctccgcctttcccgacaccccaaagtagcgctgcgagcagctgcgtctccctcccggggctcgcgcgcccagaaccctccggtctcaaggaagcaggtgacagccgccgcccacccccttcccctccccgccgctgctctctggctcgccaccgcccaactccccctgcccccaccctggattttttttccccttctctcaaacctctaaacaggaaatagcccgaatcacaataatatacgggagcagccgcggaggccgctggcgccctcccattcccggggagcttcccgcactccggcttgggtgaagtgcagccagcgacgcgcgcagggagcgcagggggacaccagcccagcagctagcgccgcgccgcccagcgccccggagagccgccttcgccctcgcccagcgcccgacaccgccggccgcggcggcggccgccaccggctctagggtgcgaagtaccacattactgtcatctccctgtgagtgggattggcaccccggctgcagctccaggagcaagtactccaggaagcacagagctgtaccagtacacggcccacgttgccaggccccaggcatggaagagctgatatgggaacagtacactgtgaccctacaaaaggattccaaaagaggatttggaattgcagtgtccggaggcagagacaacccccactttgaaaatggagaaacgtcaattgtcatttctgatgtgctcccgggtgggcctgctgatgggctgctccaagaaaatgacagagtggtcatggtcaatggcacccccatggaggatgtgcttcattcgtttgcagttcagcagctcagaaaaagtgggaaggtcgctgctattgtggtcaagaggccccggaaggtccaggtggccgcacttcaggccagccctcccctggatcaggatgaccgggcttttgaggtgatggacgagtttgatggcagaagtttccggagtggctacagcgagaggagccggctgaacagccatggggggcgcagccgcagctgggaggacagcccggaaagggggcgtccccatgagcgggcccggagccgggagcgggacctcagccgggaccggagccgtggccggagcctggagcggggcctggaccaagaccatgcgcgcacccgagaccgcagccgtggccggagcctggagcggggcctggaccacgactttgggccatcccgggaccgggaccgtgaccgcagccgcggccggagcattgaccaggactacgagcgagcctatcaccgggcctacgacccagactacgagcgggcctacagcccggagtacaggcgcggggcccgccacgatgcccgctctcggggaccccgaagccgcagccgcgagcacccgcactcacggagccccagccccgagcctagggggcggccggggcccatcggggtcctcctgatgaaaagcagagcgaacgaagagtatggtctccggcttgggagtcagatcttcgtaaaggaaatgacccgaacgggtctggcaactaaagatggcaaccttcacgaaggagacataattctcaagatcaatgggactgtaactgagaacatgtctttaacggatgctcgaaaattgatagaaaagtcaagaggaaaactacagctagtggtgttgagagacagccagcagaccctcatcaacatcccgtcattaaatgacagtgactcagaaatagaagatatttcagaaatagagtcaaaccgatcattttctccagaggagagacgtcatcagtattctgattatgattatcattcctcaagtgagaagctgaaggaaaggccaagttccagagaggacacgccgagcagattgtccaggatgggtgcgacacccactccctttaagtccacaggggatattgcaggcacagttgtcccagagaccaacaaggaacccagataccaagaggaacccccagctcctcaaccaaaagcagccccgagaacttttcttcgtcctagtcctgaagatgaagcaatatatggccctaataccaaaatggtaaggttcaagaagggagacagcgtgggcctccggttggctggtggcaatgatgtcgggatatttgttgctggcattcaagaagggacctcggcggagcaggagggccttcaagaaggagaccagattctgaaggtgaacacacaggatttcagaggattagtgcgggaggatgccgttctctacctgttagaaatccctaaaggtgaaatggtgaccattttagctcagagccgagccgatgtgtatagagacatcctggcttgtggcagaggggattcgttttttataagaagccactttgaatgtgagaaggaaactccacagagcctggccttcaccagaggggaggtcttccgagtggtagacacactgtatgacggcaagctgggcaactggctggctgtgaggattgggaacgagttggagaaaggcttaatccccaacaagagcagagctgaacaaatggccagtgttcaaaatgcccagagagacaacgctggggaccgggcagatttctggagaatgcgtggccagaggtctggggtgaagaagaacctgaggaaaagtcgggaagacctcacagctgttgtgtctgtcagcaccaagttcccagcttatgagagggttttgctgcgagaagctggtttcaagagacctgtggtcttattcggccccatagctgatatagcaatggaaaaattggctaatgagttacctgactggtttcaaactgctaaaacggaaccaaaagatgcaggatctgagaaatccactggagtggtccggttaaataccgtgaggcaaattattgaacaggataagcatgcactactggatgtgactccgaaagctgtggacctgttgaattacacccagtggttcccaattgtgatttttttcaacccagactccagacaaggtgtcaaaaccatgagacaaaggttaaatccaacgtccaacaaaagttctcgaaagttatttgatcaagccaacaagcttaaaaaaacgtgtgcacacctttttacagctacaatcaacctaaattcagccaatgatagctggtttggcagcttaaaggacactattcagcatcagcaaggagaagcggtttgggtctctgaaggaaaggccaaaacccagaacaaagaagaatcctatgacttctccaaatcctatgaatataagtcaaacccctctgccgttgctggtaatgaaactcctggggcatctaccaaaggttatcctcctcctgttgcagcaaaacctacctttgggcggtctatactgaagccctccactcccatccctcctcaagagggtgaggaggtgggagagagcagtgaggagcaagataatgctcccaaatcagtcctgggcaaagtcaaaatatttgagaagatggatcacaaggccaggttacagagaatgcaggagctccaggaagcacagaatgcaaggatcgaaattgcccagaagcatcctgatatctatgcagttccaatcaaaacgcacaagccagaccctggcacgccccagcacacgagttccagaccccctgagccacagaaagctccttccagaccttatcaggataccagaggaagttatggcagtgatgccgaggaggaggagtaccgccagcagctgtcagaacactccaagcgcggttactatggccagtctgcccgataccgggacacagaattatagatgtctgagcacggactctcccaggcctgcctgcatggcatcagactagccactcctgccaggccgccgggatggttcttctccagttagaatgcaccatggagacgtggtgggactccagctcgtgtgtcctcatggagaacccaggggacagctggtgcaaattcagaactgagggctctatttgtgggactgggttagaggagtctgtggctttttgttcagaattaagcagaacactgcagtcagatcctgttacttgcttcagtggaccgaaatctgtattctgtttgcgtacttgtaatatgtatattaagaagcaataactatttttcctcattaatagctgccttcaaggactgtttcagtgtgagtcagaatgtgaaaaaggaataaaaaatactgttgggctcaaactaaattcaaagaagtactttattgcaactcttttaagtgccttggatgagaagtgtcttaaattttcttcctttgaagctttaggcagagccataatggactaaaacattttgactaagtttttataccagcttaatagctgtagttttccctgcactgtgtcatcttttcaaggcatttgtctttgtaatattttccataaatttggactgtctatatcataactatacttgatagtttggctataagtgctcaatagcttgaagcccaagaagttggtatcgaaatttgttgtttgtttaaacccaagtgctgcacaaaagcagatacttgaggaaaacactatttccaaaagcacatgtattgacaacagttttataatttaataaaaaggaatacattgcaatccgtaa

SEQ ID NO: 321435 - DNA, 2364 bp, Homo sapiens
gaaaaaagcagctggaagatggccgtactactttctagactacaacatcagaaggagtacgaactgcatctatgacctgagtctagagaggtggtatgcagatcttcgtgaagaccctgaccggcaagaccatcaccctggaagtggagcccagtgacaccatcgaaaatgtgaaggccaagatccaggataaagaaagcatccctcccgaccagcagaggctcatctttgcaggcaagcagctggaagatggacgcactcattctgactacaacatcctgttggctggcgacacagccaacaggatagccaacaggataagcatgcactactggatgtgactccgaaagctgtggacctgttgaattacacccagtggttcccaattgtgatttttttcaacccagactccagacaaggtgtcaaaaccatgagacaaaggttaaatccaacgtccaacaaaagttctcgaaagttatttgatcaagccaacaagcttaaaaaaacgtgtgcacacctttttacagctacaatcaacctaaattcagccaatgatagctggtttggcagcttaaaggacactattcagcatcagcaaggagaagcggtttgggtctctgaaggaaagatggaagggatggatgatgaccccgaagaccgcatgtcctacttaaccgccatgggcgcggactatctgagttgcgacagccgcctcatcagtgactttgaagacacggacggtgaaggaggcgcctacactgacaatgagctggatgagccagccgaggagccgctggtgtcgtccatcacccgctcctcggagccggtgcagcacgaggagagcataaggaaacccagcccagagccacgagctcagatgaggagggctgctagcagcgatcaacttagggacaatagcccgcccccagcattcaagccagagccgcccaaggccaaaacccagaacaaagaagaatcctatgacttctccaaatcctatgaatataagtcaaacccctctgccgttgctggtaatgaaactcctggggcatctaccaaaggttatcctcctcctgttgcagcaaaacctacctttgggcggtctatactgaagccctccactcccatccctcctcaagagggtgaggaggtgggagagagcagtgaggagcaagataatgctcccaaatcagtcctgggcaaagtcaaaatatttgagaagatggatcacaaggccaggttacagagaatgcaggagctccaggaagcacagaatgcaaggatcgaaattgcccagaagcatcctgatatctatgcagttccaatcaaaacgcacaagccagaccctggcacgccccagcacacgagttccagaccccctgagccacagaaagctccttccagaccttatcaggataccagaggaagttatggcagtgatgccgaggaggaggagtaccgccagcagctgtcagaacactccaagcgcggttactatggccagtctgcccgataccgggacacagaattatagatgtctgagcacggactctcccaggcctgcctgcatggcatcagactagccactcctgccaggccgccgggatggttcttctccagttagaatgcaccatggagacgtggtgggactccagctcgtgtgtcctcatggagaacccaggggacagctggtgcaaattcagaactgagggctctatttgtgggactgggttagaggagtctgtggctttttgttcagaattaagcagaacactgcagtcagatcctgttacttgcttcagtggaccgaaatctgtattctgtttgcgtacttgtaatatgtatattaagaagcaataactatttttcctcattaatagctgccttcaaggactgtttcagtgtgagtcagaatgtgaaaaaggaataaaaaatactgttgggctcaaactaaattcaaagaagtactttattgcaactcttttaagtgccttggatgagaagtgtcttaaattttcttcctttgaagctttaggcagagccataatggactaaaacattttgactaagtttttataccagcttaatagctgtagttttccctgcactgtgtcatcttttcaaggcatttgtctttgtaatattttccataaatttggactgtctatatcataactatacttgatagtttggctataagtgctcaatagcttgaagcccaagaagttggtatcgaaatttgttgtttgtttaaacccaagtgctgcacaaaagcagatacttgaggaaaacactatttccaaaagcacatgtattgacaacagttttataatttaataaaaaggaatacattgcaatccgtaa

SEQ ID NO: 321436 - DNA, 2304 bp, Homo sapiens
gtcccggaaccaatcctctacagataccaagggacaactttatgtttaagtgttacttttagtattttattggaggtagccaatacagtatattagtgtatactaattagtgtatacacctcagcctcccagagtgctgagattacaggcatgagccaccacacctggccgaaaacacatgttcttaaaaacatttttaaaagttagcctttctgaaaataaacattctaaaaatctatttttagctttatcacatccacctataatgtgaactcaaacagctacatgattagtagttttaattgcattcattaaaagggttttaatattcaaagatgtgcaaacatcttcttgcgtctgccatagtcttaaatatcacagaaatgagtgtaaattatgtcaaatagcatccttaataaacatgcctctggaaattaatgcagacctttttgtttatatttctatagctacaatcaacctaaattcagccaatgatagctggtttggcagcttaaaggacactattcagcatcagcaaggagaagcggtttgggtctctgaaggaaagatggaagggatggatgatgaccccgaagaccgcatgtcctacttaaccgccatgggcgcggactatctgagttgcgacagccgcctcatcagtgactttgaagacacggacggtgaaggaggcgcctacactgacaatgagctggatgagccagccgaggagccgctggtgtcgtccatcacccgctcctcggagccggtgcagcacgaggagagcataaggaaacccagcccagagccacgagctcagatgaggagggctgctagcagcgatcaacttagggacaatagcccgcccccagcattcaagccagagccgcccaaggccaaaacccagaacaaagaagaatcctatgacttctccaaatcctatgaatataagtcaaacccctctgccgttgctggtaatgaaactcctggggcatctaccaaaggttatcctcctcctgttgcagcaaaacctacctttgggcggtctatactgaagccctccactcccatccctcctcaagagggtgaggaggtgggagagagcagtgaggagcaagataatgctcccaaatcagtcctgggcaaagtcaaaatatttgagaagatggatcacaaggccaggttacagagaatgcaggagctccaggaagcacagaatgcaaggatcgaaattgcccagaagcatcctgatatctatgcagttccaatcaaaacgcacaagccagaccctggcacgccccagcacacgagttccagaccccctgagccacagaaagctccttccagaccttatcaggataccagaggaagttatggcagtgatgccgaggaggaggagtaccgccagcagctgtcagaacactccaagcgcggttactatggccagtctgcccgataccgggacacagaattatagatgtctgagcacggactctcccaggcctgcctgcatggcatcagactagccactcctgccaggccgccgggatggttcttctccagttagaatgcaccatggagacgtggtgggactccagctcgtgtgtcctcatggagaacccaggggacagctggtgcaaattcagaactgagggctctatttgtgggactgggttagaggagtctgtggctttttgttcagaattaagcagaacactgcagtcagatcctgttacttgcttcagtggaccgaaatctgtattctgtttgcgtacttgtaatatgtatattaagaagcaataactatttttcctcattaatagctgccttcaaggactgtttcagtgtgagtcagaatgtgaaaaaggaataaaaaatactgttgggctcaaactaaattcaaagaagtactttattgcaactcttttaagtgccttggatgagaagtgtcttaaattttcttcctttgaagctttaggcagagccataatggactaaaacattttgactaagtttttataccagcttaatagctgtagttttccctgcactgtgtcatcttttcaaggcatttgtctttgtaatattttccataaatttggactgtctatatcataactatacttgatagtttggctataagtgctcaatagcttgaagcccaagaagttggtatcgaaatttgttgtttgtttaaacccaagtgctgcacaaaagcagatacttgaggaaaacactatttccaaaagcacatgtattgacaacagttttataatttaataaaaaggaatacattgcaatccgtaa

SEQ ID NO: 321437 - DNA, 1625 bp, Homo sapiens
tgacattcctaatagactagtataggaagggaggtagggctcaggaagcctggccagtggttgtttgccctgctgtattacattccttgtcagaatggtatttgtggaccacctttggaaactgatcaggaaatggagtgtattaaatcactaatatagatttgaaaataaacttaaaagcccagggtgaaaacgtgtcattgctctccgcaggccaaaacccagaacaaagaagaatcctatgacttctccaaatcctatgaatataagtcaaacccctctgccgttgctggtaatgaaactcctggggcatctaccaaaggttatcctcctcctgttgcagcaaaacctacctttgggcggtctatactgaagccctccactcccatccctcctcaagagggtgaggaggtgggagagagcagtgaggagcaagataatgctcccaaatcagtcctgggcaaagtcaaaatatttgagaagatggatcacaaggccaggttacagagaatgcaggagctccaggaagcacagaatgcaaggatcgaaattgcccagaagcatcctgatatctatgcagttccaatcaaaacgcacaagccagaccctggcacgccccagcacacgagttccagaccccctgagccacagaaagctccttccagaccttatcaggataccagaggaagttatggcagtgatgccgaggaggaggagtaccgccagcagctgtcagaacactccaagcgcggttactatggccagtctgcccgataccgggacacagaattatagatgtctgagcacggactctcccaggcctgcctgcatggcatcagactagccactcctgccaggccgccgggatggttcttctccagttagaatgcaccatggagacgtggtgggactccagctcgtgtgtcctcatggagaacccaggggacagctggtgcaaattcagaactgagggctctatttgtgggactgggttagaggagtctgtggctttttgttcagaattaagcagaacactgcagtcagatcctgttacttgcttcagtggaccgaaatctgtattctgtttgcgtacttgtaatatgtatattaagaagcaataactatttttcctcattaatagctgccttcaaggactgtttcagtgtgagtcagaatgtgaaaaaggaataaaaaatactgttgggctcaaactaaattcaaagaagtactttattgcaactcttttaagtgccttggatgagaagtgtcttaaattttcttcctttgaagctttaggcagagccataatggactaaaacattttgactaagtttttataccagcttaatagctgtagttttccctgcactgtgtcatcttttcaaggcatttgtctttgtaatattttccataaatttggactgtctatatcataactatacttgatagtttggctataagtgctcaatagcttgaagcccaagaagttggtatcgaaatttgttgtttgtttaaacccaagtgctgcacaaaagcagatacttgaggaaaacactatttccaaaagcacatgtattgacaacagttttataatttaataaaaaggaatacattgcaatccgtaa

SEQ ID NO: 321438 - DNA, 4806 bp, Homo sapiens
  misc_feature (4594)..(4595): n is a, c, g, or t
ggaagctcagctgcagttctacgtagaagaaaagaggcggcaaagtaggcgcgcgggctccagtgacaaaggtctcccaggcagccgcggcccctgccccaccgctgagtggcgtgcgtgcaggcccaccctctccgcctttcccgacaccccaaagtagcgctgcgagcagctgcgtctccctcccggggctcgcgcgcccagaaccctccggtctcaaggaagcaggtgacagccgccgcccacccccttcccctccccgccgctgctctctggctcgccaccgcccaactccccctgcccccaccctggattttttttccccttctctcaaacctctaaacaggaaatagcccgaatcacaataatatacgggagcagccgcggaggccgctggcgccctcccattcccggggagcttcccgcactccggcttgggtgaagtgcagccagcgacgcgcgcagggagcgcagggggacaccagcccagcagctagcgccgcgccgcccagcgccccggagagccgccttcgccctcgcccagcgcccgacaccgccggccgcggcggcggccgccaccggctctagggtgcgaagtaccacattactgtcatctccctgtgagtgggattggcaccccggctgcagctccaggagcaagtactccaggaagcacagagctgtaccagtacacggcccacgttgccaggccccaggcatggaagagctgatatgggaacagtacactgtgaccctacaaaaggattccaaaagaggatttggaattgcagtgtccggaggcagagacaacccccactttgaaaatggagaaacgtcaattgtcatttctgatgtgctcccgggtgggcctgctgatgggctgctccaagaaaatgacagagtggtcatggtcaatggcacccccatggaggatgtgcttcattcgtttgcagttcagcagctcagaaaaagtgggaaggtcgctgctattgtggtcaagaggccccggaaggtccaggtggccgcacttcaggccagccctcccctggatcaggatgaccgggcttttgaggtgatggacgagtttgatggcagaagtttccggagtggctacagcgagaggagccggctgaacagccatggggggcgcagccgcagctgggaggacagcccggaaagggggcgtccccatgagcgggcccggagccgggagcgggacctcagccgggaccggagccgtggccggagcctggagcggggcctggaccaagaccatgcgcgcacccgagaccgcagccgtggccggagcctggagcggggcctggaccacgactttgggccatcccgggaccgggaccgtgaccgcagccgcggccggagcattgaccaggactacgagcgagcctatcaccgggcctacgacccagactacgagcgggcctacagcccggagtacaggcgcggggcccgccacgatgcccgctctcggggaccccgaagccgcagccgcgagcacccgcactcacggagccccagccccgagcctagggggcggccggggcccatcggggtcctcctgatgaaaagcagagcgaacgaagagtatggtctccggcttgggagtcagatcttcgtaaaggaaatgacccgaacgggtctggcaactaaagatggcaaccttcacgaaggagacataattctcaagatcaatgggactgtaactgagaacatgtctttaacggatgctcgaaaattgatagaaaagtcaagaggaaaactacagctagtggtgttgagagacagccagcagaccctcatcaacatcccgtcattaaatgacagtgactcagaaatagaagatatttcagaaatagagtcaaaccgatcattttctccagaggagagacgtcatcagtattctgattatgattatcattcctcaagtgagaagctgaaggaaaggccaagttccagagaggacacgccgagcagattgtccaggatgggtgcgacacccactccctttaagtccacaggggatattgcaggcacagttgtcccagagaccaacaaggaacccagataccaagaggaacccccagctcctcaaccaaaagcagccccgagaacttttcttcgtcctagtcctgaagatgaagcaatatatggccctaataccaaaatggtaaggttcaagaagggagacagcgtgggcctccggttggctggtggcaatgatgtcgggatatttgttgctggcattcaagaagggacctcggcggagcaggagggccttcaagaaggagaccagattctgaaggtgaacacacaggatttcagaggattagtgcgggaggatgccgttctctacctgttagaaatccctaaaggtgaaatggtgaccattttagctcagagccgagccgatgtgtatagagacatcctggcttgtggcagaggggattcgttttttataagaagccactttgaatgtgagaaggaaactccacagagcctggccttcaccagaggggaggtcttccgagtggtagacacactgtatgacggcaagctgggcaactggctggctgtgaggattgggaacgagttggagaaaggcttaatccccaacaagagcagagctgaacaaatggccagtgttcaaaatgcccagagagacaacgctggggaccgggcagatttctggagaatgcgtggccagaggtctggggtgaagaagaacctgaggaaaagtcgggaagacctcacagctgttgtgtctgtcagcaccaagttcccagcttatgagagggttttgctgcgagaagctggtttcaagagacctgtggtcttattcggccccatagctgatatagcaatggaaaaattggctaatgagttacctgactggtttcaaactgctaaaacggaaccaaaagatgcaggatctgagaaatccactggagtggtccggttaaataccgtgaggcaaattattgaacaggataagcatgcactactggatgtgactccgaaagctgtggacctgttgaattacacccagtggttcccaattgtgatttttttcaacccagactccagacaaggtgtcaaaaccatgagacaaaggttaaatccaacgtccaacaaaagttctcgaaagttatttgatcaagccaacaagcttaaaaaaacgtgtgcacacctttttacagctacaatcaacctaaattcagccaatgatagctggtttggcagcttaaaggacactattcagcatcagcaaggagaagcggtttgggtctctgaaggaaagatggaagggatggatgatgaccccgaagaccgcatgtcctacttaaccgccatgggcgcggactatctgagttgcgacagccgcctcatcagtgactttgaagacacggacggtgaaggaggcgcctacactgacaatgagctggatgagccagccgaggagccgctggtgtcgtccatcacccgctcctcggagccggtgcagcacgaggagagcataaggaaacccagcccagagccacgagctcagatgaggagggctgctagcagcgatcaacttagggacaatagcccgcccccagcattcaagccagagccgcccaaggccaaaacccagaacaaagaagaatcctatgacttctccaaatcctatgaatataagtcaaacccctctgccgttgctggtaatgaaactcctggggcatctaccaaaggttatcctcctcctgttgcagcaaaacctacctttgggcggtctatactgaagccctccactcccatccctcctcaagagggtgaggaggtgggagagagcagtgaggagcaagataatgctcccaaatcagtcctgggcaaagtcaaaatatttgagaagatggatcacaaggccaggttacagagaatgcaggagctccaggaagcacagaatgcaaggatcgaaattgcccagaagcatcctgatatctatgcagttccaatcaaaacgcacaagccagaccctggcacgccccagcacacgaggtaagggctgcctagtgggtacaggtctaaggcggggacttctcaaggactgggacttgaagaaagaatttcctttacccaaatttcagagtaacaggaggattttttccccacagattgactgtttgccttactcattccatcaaatttaattgtaaagattacagagtcaaaacttaagcatagtttgcttgtgtgctaaaactctgacaaagtgtaatcattgatgtttccagccagtacatttgacacattggagcctggttatgttacattgcacatggttagcacatgagcagaattcctacggcttagacctgttttgtcttgtttgctgactctcagccaaacttcttaattcctttgcatcatccagcaaagtcagaccgcttgtgctgccctggggtctaaagggaccgtgacaagcaaatgagcagtcttggtaaatgccacacaaacagtaggaatgttcacagtgtcttcctgttgaagttttatactggattgcttcctgcttccgagaatagaaaaaaaaaannaaagaaaaaaaaacccttgttggccgccttggcccaatcgactttagactcgagcaaacttttgcttgcgggcgcaattctggctcacttggccatttgcccttaaggaggggatttacaatcactggccggggtttaaacactcggactgggaaacccttgcgttcccacttaatggcttggggaataccccttttcaactgggggaaac

SEQ ID NO: 321439 - DNA, 3379 bp, Homo sapiens
ggaagctcagctgcagttctacgtagaagaaaagaggcggcaaagtaggcgcgcgggctccagtgacaaaggtctcccaggcagccgcggcccctgccccaccgctgagtggcgtgcgtgcaggcccaccctctccgcctttcccgacaccccaaagtagcgctgcgagcagctgcgtctccctcccggggctcgcgcgcccagaaccctccggtctcaaggaagcaggtgacagccgccgcccacccccttcccctccccgccgctgctctctggctcgccaccgcccaactccccctgcccccaccctggattttttttccccttctctcaaacctctaaacaggaaatagcccgaatcacaataatatacgggagcagccgcggaggccgctggcgccctcccattcccggggagcttcccgcactccggcttgggtgaagtgcagccagcgacgcgcgcagggagcgcagggggacaccagcccagcagctagcgccgcgccgcccagcgccccggagagccgccttcgccctcgcccagcgcccgacaccgccggccgcggcggcggccgccaccggctctagggtgcgaagtaccacattactgtcatctccctgtgagtgggattggcaccccggctgcagctccaggagcaagtactccaggaagcacagagctgtaccagtacacggcccacgttgccaggccccaggcatggaagagctgatatgggaacagtacactgtgaccctacaaaaggattccaaaagaggatttggaattgcagtgtccggaggcagagacaacccccactttgaaaatggagaaacgtcaattgtcatttctgatgtgctcccgggtgggcctgctgatgggctgctccaagaaaatgacagagtggtcatggtcaatggcacccccatggaggatgtgcttcattcgtttgcagttcagcagctcagaaaaagtgggaaggtcgctgctattgtggtcaagaggccccggaaggtccaggtggccgcacttcaggccagccctcccctggatcaggatgaccgggcttttgaggtgatggacgagtttgatggcagaagtttccggagtggctacagcgagaggagccggctgaacagccatggggggcgcagccgcagctgggaggacagcccggaaagggggcgtccccatgagcgggcccggagccgggagcgggacctcagccgggaccggagccgtggccggagcctggagcggggcctggaccaagaccatgcgcgcacccgagaccgcagccgtggccggagcctggagcggggcctggaccacgactttgggccatcccgggaccgggaccgtgaccgcagccgcggccggagcattgaccaggactacgagcgagcctatcaccgggcctacgacccagactacgagcgggcctacagcccggagtacaggcgcggggcccgccacgatgcccgctctcggggaccccgaagccgcagccgcgagcacccgcactcacggagccccagccccgagcctagggggcggccggggcccatcggggtcctcctgatgaaaagcagagcgaacgaagagtatggtctccggcttgggagtcagatcttcgtaaaggaaatgacccgaacgggtctggcaactaaagatggcaaccttcacgaaggagacataattctcaagatcaatgggactgtaactgagaacatgtctttaacggatgctcgaaaattgatagaaaagtcaagaggaaaactacagctagtggtgttgagagacagccagcagaccctcatcaacatcccgtcattaaatgacagtgactcagaaatagaagatatttcagaaatagagtcaaaccgatcattttctccagaggagagacgtcatcagtattctgattatgattatcattcctcaagtgagaagctgaaggaaaggccaagttccagagaggacacgccgagcagattgtccaggatgggtgcgacacccactccctttaagtccacaggggatattgcaggcacagttgtcccagagaccaacaaggaacccagataccaagaggaacccccagctcctcaaccaaaagcagccccgagaacttttcttcgtcctagtcctgaagatgaagcaatatatggccctaataccaaaatggtaaggttcaagaagggagacagcgtgggcctccggttggctggtggcaatgatgtcgggatatttgttgctggcattcaagaagggacctcggcggagcaggagggccttcaagaaggagaccagattctgaaggtgaacacacaggatttcagaggattagtgcgggaggatgccgttctctacctgttagaaatccctaaaggtgaaatggtgaccattttagctcagagccgagccgatgtgtatagagacatcctggcttgtggcagaggggattcgttttttataagaagccactttgaatgtgagaaggaaactccacagagcctggccttcaccagaggggaggtcttccgagtggtagacacactgtatgacggcaagctgggcaactggctggctgtgaggattgggaacgagttggagaaaggcttaatccccaacaagagcagagctgaacaaatggccagtgttcaaaatgcccagagagacaacgctggggaccgggcagatttctggagaatgcgtggccagaggtctggggtgaagaagaacctgaggaaaagtcgggaagacctcacagctgttgtgtctgtcagcaccaagttcccagcttatgagagggttttgctgcgagaagctggtttcaagagacctgtggtcttattcggccccatagctgatatagcaatggaaaaattggctaatgagttacctgactggtttcaaactgctaaaacggaaccaaaagatgcaggatctgagaaatccactggagtggtccggttaaataccgtgaggcaaattattgaacaggataagcatgcactactggatgtgactccgaaagctgtggacctgttgaattacacccagtggttcccaattgtgatttttttcaacccagactccagacaaggtgtcaaaaccatgagacaaaggttaaatccaacgtccaacaaaagttctcgaaagttatttgatcaagccaacaagcttaaaaaaacgtgtgcacacctttttacagctacaatcaacctaaattcagccaatgatagctggtttggcagcttaaaggacactattcagcatcagcaaggagaagcggtttgggtctctgaaggaaagatggaagggatggtatgacccccaagttgcagcctgggtaccgagctgaatttatcatgtcaa

SEQ ID NO: 321440 - DNA, 1171 bp, Homo sapiens
ggaagctcagctgcagttctacgtagaagaaaagaggcggcaaagtaggcgcgcgggctccagtgacaaaggtctcccaggcagccgcggcccctgccccaccgctgagtggcgtgcgtgcaggcccaccctctccgcctttcccgacaccccaaagtagcgctgcgagcagctgcgtctccctcccggggctcgcgcgcccagaaccctccggtctcaaggaagcaggtgacagccgccgcccacccccttcccctccccgccgctgctctctggctcgccaccgcccaactccccctgcccccaccctggattttttttccccttctctcaaacctctaaacaggaaatagcccgaatcacaataatatacgggagcagccgcggaggccgctggcgccctcccattcccggggagcttcccgcactccggcttgggtgaagtgcagccagcgacgcgcgcagggagcgcagggggacaccagcccagcagctagcgccgcgccgcccagcgccccggagagccgccttcgccctcgcccagcgcccgacaccgccggccgcggcggcggccgccaccggctctagggtgcgaagtaccacattactgtcatctccctgtgagtgggattggcaccccggctgcagctccaggagcaagtactccaggaagcacagagctgtaccagtacacggcccacgttgccaggccccaggcatggaagagctgatatgggaacagtacactgtgaccctacaaaaggattccaaaagaggatttggaattgcagtgtccggaggcagagacaacccccactttgaaaatggagaaacgtcaattgtcatttctgatgtgctcccgggtgggcctgctgatgggctgctccaagaaaatgacagagtggtcatggtcaatggcacccccatggaggatgtgcttcattcgtttgcagttcagcagctcagaaaaagtgggaaggtcgctgctattgtaagtactgggtttgctttcagcttgccttaatagcattttggttttttgcccagaagaaaattaccccttgcttttaagcatttgacagaattacataacctagggaccgctgttcttggatcctcagtacttttggaggggtgtgaagatatgtgtaagttatcttcctacttttcc

SEQ ID NO: 321441 - DNA, 527 bp, Homo sapiens
gcggccgccaccggctctaggcaagtaccctcctctctctccctccccggcccaggtgctgcctgccgcacgccccgggagagccgccgaggcgcggcagcctgtgcccaggcgtcgccgggatgccttccctcctgtcccgactttggccagggaatgatttggtgggcgcgaattcgcgctggtgccctgggtcgtttgtgcaggcggggtgaggggcagcgcgagtaaacgggttgacatcccctaggtttctctgcagagtgcgctgtgtacttcatcgggcatttactttttcactgcttcctcatcgcccccggggcggcagcgcctcacagggtctctctgggggaatcatcaacaggtgtgcctgaacacgcacctgcggcagccacaggtgtctgggagccaccttttttcttctccctggcctggcaccctttcactcaagggatggaaactgtttcactttctgctgagcttctcttttacccgattaaaagggcctttgaatttctgttggcgca

SEQ ID NO: 321442 - DNA, 4612 bp, Homo sapiens
cgcggaggcgccacgctcgggtcgggggcgggctgacgccgccgccgccgcgggaggagggacaaaggggtgggtccccgcgggtcggcaccccggcggttgggctgcgggtcagagcactgtccggtggtgcccaggaggagtaggagcaggagcagaagcagaagcggggtccggagctgcgcgcctacgcgggacctgtgtccgaaatgccggtgcgaggagaccgcgggtttccaccccggcgggagctgtcaggttggctccgcgccccaggcatggaagagctgatatgggaacagtacactgtgaccctacaaaaggattccaaaagaggatttggaattgcagtgtccggaggcagagacaacccccactttgaaaatggagaaacgtcaattgtcatttctgatgtgctcccgggtgggcctgctgatgggctgctccaagaaaatgacagagtggtcatggtcaatggcacccccatggaggatgtgcttcattcgtttgcagttcagcagctcagaaaaagtgggaaggtcgctgctattgtggtcaagaggccccggaaggtccaggtggccgcacttcaggccagccctcccctggatcaggatgaccgggcttttgaggtgatggacgagtttgatggcagaagtttccggagtggctacagcgagaggagccggctgaacagccatggggggcgcagccgcagctgggaggacagcccggaaagggggcgtccccatgagcgggcccggagccgggagcgggacctcagccgggaccggagccgtggccggagcctggagcggggcctggaccaagaccatgcgcgcacccgagaccgcagccgtggccggagcctggagcggggcctggaccacgactttgggccatcccgggaccgggaccgtgaccgcagccgcggccggagcattgaccaggactacgagcgagcctatcaccgggcctacgacccagactacgagcgggcctacagcccggagtacaggcgcggggcccgccacgatgcccgctctcggggaccccgaagccgcagccgcgagcacccgcactcacggagccccagccccgagcctagggggcggccggggcccatcggggtcctcctgatgaaaagcagagcgaacgaagagtatggtctccggcttgggagtcagatcttcgtaaaggaaatgacccgaacgggtctggcaactaaagatggcaaccttcacgaaggagacataattctcaagatcaatgggactgtaactgagaacatgtctttaacggatgctcgaaaattgatagaaaagtcaagaggaaaactacagctagtggtgttgagagacagccagcagaccctcatcaacatcccgtcattaaatgacagtgactcagaaatagaagatatttcagaaatagagtcaaaccgatcattttctccagaggagagacgtcatcagtattctgattatgattatcattcctcaagtgagaagctgaaggaaaggccaagttccagagaggacacgccgagcagattgtccaggatgggtgcgacacccactccctttaagtccacaggggatattgcaggcacagttgtcccagagaccaacaaggaacccagataccaagaggaacccccagctcctcaaccaaaagcagccccgagaacttttcttcgtcctagtcctgaagatgaagcaatatatggccctaataccaaaatggtaaggttcaagaagggagacagcgtgggcctccggttggctggtggcaatgatgtcgggatatttgttgctggcattcaagaagggacctcggcggagcaggagggccttcaagaaggagaccagattctgaaggtgaacacacaggatttcagaggattagtgcgggaggatgccgttctctacctgttagaaatccctaaaggtgaaatggtgaccattttagctcagagccgagccgatgtgtatagagacatcctggcttgtggcagaggggattcgttttttataagaagccactttgaatgtgagaaggaaactccacagagcctggccttcaccagaggggaggtcttccgagtggtagacacactgtatgacggcaagctgggcaactggctggctgtgaggattgggaacgagttggagaaaggcttaatccccaacaagagcagagctgaacaaatggccagtgttcaaaatgcccagagagacaacgctggggaccgggcagatttctggagaatgcgtggccagaggtctggggtgaagaagaacctgaggaaaagtcgggaagacctcacagctgttgtgtctgtcagcaccaagttcccagcttatgagagggttttgctgcgagaagctggtttcaagagacctgtggtcttattcggccccatagctgatatagcaatggaaaaattggctaatgagttacctgactggtttcaaactgctaaaacggaaccaaaagatgcaggatctgagaaatccactggagtggtccggttaaataccgtgaggcaaattattgaacaggataagcatgcactactggatgtgactccgaaagctgtggacctgttgaattacacccagtggttcccaattgtgatttttttcaacccagactccagacaaggtgtcaaaaccatgagacaaaggttaaatccaacgtccaacaaaagttctcgaaagttatttgatcaagccaacaagcttaaaaaaacgtgtgcacacctttttacagctacaatcaacctaaattcagccaatgatagctggtttggcagcttaaaggacactattcagcatcagcaaggagaagcggtttgggtctctgaaggaaagatggaagggatggatgatgaccccgaagaccgcatgtcctacttaaccgccatgggcgcggactatctgagttgcgacagccgcctcatcagtgactttgaagacacggacggtgaaggaggcgcctacactgacaatgagctggatgagccagccgaggagccgctggtgtcgtccatcacccgctcctcggagccggtgcagcacgaggagagcataaggaaacccagcccagagccacgagctcagatgaggagggctgctagcagcgatcaacttagggacaatagcccgcccccagcattcaagccagagccgcccaaggccaaaacccagaacaaagaagaatcctatgacttctccaaatcctatgaatataagtcaaacccctctgccgttgctggtaatgaaactcctggggcatctaccaaaggttatcctcctcctgttgcagcaaaacctacctttgggcggtctatactgaagccctccactcccatccctcctcaagagggtgaggaggtgggagagagcagtgaggagcaagataatgctcccaaatcagtcctgggcaaagtcaaaatatttgagaagatggatcacaaggccaggttacagagaatgcaggagctccaggaagcacagaatgcaaggatcgaaattgcccagaagcatcctgatatctatgcagttccaatcaaaacgcacaagccagaccctggcacgccccagcacacgagttccagaccccctgagccacagaaagctccttccagaccttatcaggataccagaggaagttatggcagtgatgccgaggaggaggagtaccgccagcagctgtcagaacactccaagcgcggttactatggccagtctgcccgataccgggacacagaattatagatgtctgagcacggactctcccaggcctgcctgcatggcatcagactagccactcctgccaggccgccgggatggttcttctccagttagaatgcaccatggagacgtggtgggactccagctcgtgtgtcctcatggagaacccaggggacagctggtgcaaattcagaactgagggctctatttgtgggactgggttagaggagtctgtggctttttgttcagaattaagcagaacactgcagtcagatcctgttacttgcttcagtggaccgaaatctgtattctgtttgcgtacttgtaatatgtatattaagaagcaataactatttttcctcattaatagctgccttcaaggactgtttcagtgtgagtcagaatgtgaaaaaggaataaaaaatactgttgggctcaaactaaattcaaagaagtactttattgcaactcttttaagtgccttggatgagaagtgtcttaaattttcttcctttgaagctttaggcagagccataatggactaaaacattttgactaagtttttataccagcttaatagctgtagttttccctgcactgtgtcatcttttcaaggcatttgtctttgtaatattttccataaatttggactgtctatatcataactatacttgatagtttggctataagtgctcaatagcttgaagcccaagaagttggtatcgaaatttgttgtttgtttaaacccaagtgctgcacaaaagcagatacttgaggaaaacactatttccaaaagcacatgtattgacaacagttttataatttaataaaaaggaatacattgcaatccgtaa

SEQ ID NO: 321443 - DNA, 4969 bp, Homo sapiens
ggaagctcagctgcagttctacgtagaagaaaagaggcggcaaagtaggcgcgcgggctccagtgacaaaggtctcccaggcagccgcggcccctgccccaccgctgagtggcgtgcgtgcaggcccaccctctccgcctttcccgacaccccaaagtagcgctgcgagcagctgcgtctccctcccggggctcgcgcgcccagaaccctccggtctcaaggaagcaggtgacagccgccgcccacccccttcccctccccgccgctgctctctggctcgccaccgcccaactccccctgcccccaccctggattttttttccccttctctcaaacctctaaacaggaaatagcccgaatcacaataatatacgggagcagccgcggaggccgctggcgccctcccattcccggggagcttcccgcactccggcttgggtgaagtgcagccagcgacgcgcgcagggagcgcagggggacaccagcccagcagctagcgccgcgccgcccagcgccccggagagccgccttcgccctcgcccagcgcccgacaccgccggccgcggcggcggccgccaccggctctagggtgcgaagtaccacattactgtcatctccctgtgagtgggattggcaccccggctgcagctccaggagcaagtactccaggaagcacagagctgtaccagtacacggcccacgttgccaggccccaggcatggaagagctgatatgggaacagtacactgtgaccctacaaaaggattccaaaagaggatttggaattgcagtgtccggaggcagagacaacccccactttgaaaatggagaaacgtcaattgtcatttctgatgtgctcccgggtgggcctgctgatgggctgctccaagaaaatgacagagtggtcatggtcaatggcacccccatggaggatgtgcttcattcgtttgcagttcagcagctcagaaaaagtgggaaggtcgctgctattgtggtcaagaggccccggaaggtccaggtggccgcacttcaggccagccctcccctggatcaggatgaccgggcttttgaggtgatggacgagtttgatggcagaagtttccggagtggctacagcgagaggagccggctgaacagccatggggggcgcagccgcagctgggaggacagcccggaaagggggcgtccccatgagcgggcccggagccgggagcgggacctcagccgggaccggagccgtggccggagcctggagcggggcctggaccaagaccatgcgcgcacccgagaccgcagccgtggccggagcctggagcggggcctggaccacgactttgggccatcccgggaccgggaccgtgaccgcagccgcggccggagcattgaccaggactacgagcgagcctatcaccgggcctacgacccagactacgagcgggcctacagcccggagtacaggcgcggggcccgccacgatgcccatcggggtcctcctgatgaaaagcagagcgaacgaagagtatggtctccggcttgggagtcagatcttcgtaaaggaaatgacccgaacgggtctggcaactaaagatggcaaccttcacgaaggagacataattctcaagatcaatgggactgtaactgagaacatgtctttaacggatgctcgaaaattgatagaaaagtcaagaggaaaactacagctagtggtgttgagagacagccagcagaccctcatcaacatcccgtcattaaatgacagtgactcagaaatagaagatatttcagaaatagagtcaaaccgatcattttctccagaggagagacgtcatcagtattctgattatgattatcattcctcaagtgagaagctgaaggaaaggccaagttccagagaggacacgccgagcagattgtccaggatgggtgcgacacccactccctttaagtccacaggggatattgcaggcacagttgtcccagagaccaacaaggaacccagataccaagaggaacccccagctcctcaaccaaaagcagccccgagaacttttcttcgtcctagtcctgaagatgaagcaatatatggccctaataccaaaatggtaaggttcaagaagggagacagcgtgggcctccggttggctggtggcaatgatgtcgggatatttgttgctggcattcaagaagggacctcggcggagcaggagggccttcaagaaggagaccagattctgaaggtgaacacacaggatttcagaggattagtgcgggaggatgccgttctctacctgttagaaatccctaaaggtgaaatggtgaccattttagctcagagccgagccgatgtgtatagagacatcctggcttgtggcagaggggattcgttttttataagaagccactttgaatgtgagaaggaaactccacagagcctggccttcaccagaggggaggtcttccgagtggtagacacactgtatgacggcaagctgggcaactggctggctgtgaggattgggaacgagttggagaaaggcttaatccccaacaagagcagagctgaacaaatggccagtgttcaaaatgcccagagagacaacgctggggaccgggcagatttctggagaatgcgtggccagaggtctggggtgaagaagaacctgaggaaaagtcgggaagacctcacagctgttgtgtctgtcagcaccaagttcccagcttatgagagggttttgctgcgagaagctggtttcaagagacctgtggtcttattcggccccatagctgatatagcaatggaaaaattggctaatgagttacctgactggtttcaaactgctaaaacggaaccaaaagatgcaggatctgagaaatccactggagtggtccggttaaataccgtgaggcaaattattgaacaggataagcatgcactactggatgtgactccgaaagctgtggacctgttgaattacacccagtggttcccaattgtgatttttttcaacccagactccagacaaggtgtcaaaaccatgagacaaaggttaaatccaacgtccaacaaaagttctcgaaagttatttgatcaagccaacaagcttaaaaaaacgtgtgcacacctttttacagctacaatcaacctaaattcagccaatgatagctggtttggcagcttaaaggacactattcagcatcagcaaggagaagcggtttgggtctctgaaggaaagatggaagggatggatgatgaccccgaagaccgcatgtcctacttaaccgccatgggcgcggactatctgagttgcgacagccgcctcatcagtgactttgaagacacggacggtgaaggaggcgcctacactgacaatgagctggatgagccagccgaggagccgctggtgtcgtccatcacccgctcctcggagccggtgcagcacgaggagagcataaggaaacccagcccagagccacgagctcagatgaggagggctgctagcagcgatcaacttagggacaatagcccgcccccagcattcaagccagagccgcccaaggccaaaacccagaacaaagaagaatcctatgacttctccaaatcctatgaatataagtcaaacccctctgccgttgctggtaatgaaactcctggggcatctaccaaaggttatcctcctcctgttgcagcaaaacctacctttgggcggtctatactgaagccctccactcccatccctcctcaagagggtgaggaggtgggagagagcagtgaggagcaagataatgctcccaaatcagtcctgggcaaagtcaaaatatttgagaagatggatcacaaggccaggttacagagaatgcaggagctccaggaagcacagaatgcaaggatcgaaattgcccagaagcatcctgatatctatgcagttccaatcaaaacgcacaagccagaccctggcacgccccagcacacgagttccagaccccctgagccacagaaagctccttccagaccttatcaggataccagaggaagttatggcagtgatgccgaggaggaggagtaccgccagcagctgtcagaacactccaagcgcggttactatggccagtctgcccgataccgggacacagaattatagatgtctgagcacggactctcccaggcctgcctgcatggcatcagactagccactcctgccaggccgccgggatggttcttctccagttagaatgcaccatggagacgtggtgggactccagctcgtgtgtcctcatggagaacccaggggacagctggtgcaaattcagaactgagggctctatttgtgggactgggttagaggagtctgtggctttttgttcagaattaagcagaacactgcagtcagatcctgttacttgcttcagtggaccgaaatctgtattctgtttgcgtacttgtaatatgtatattaagaagcaataactatttttcctcattaatagctgccttcaaggactgtttcagtgtgagtcagaatgtgaaaaaggaataaaaaatactgttgggctcaaactaaattcaaagaagtactttattgcaactcttttaagtgccttggatgagaagtgtcttaaattttcttcctttgaagctttaggcagagccataatggactaaaacattttgactaagtttttataccagcttaatagctgtagttttccctgcactgtgtcatcttttcaaggcatttgtctttgtaatattttccataaatttggactgtctatatcataactatacttgatagtttggctataagtgctcaatagcttgaagcccaagaagttggtatcgaaatttgttgtttgtttaaacccaagtgctgcacaaaagcagatacttgaggaaaacactatttccaaaagcacatgtattgacaacagttttataatttaataaaaaggaatacattgcaatccgtaa

SEQ ID NO: 321444 - DNA, 4998 bp, Homo sapiens
ggaagctcagctgcagttctacgtagaagaaaagaggcggcaaagtaggcgcgcgggctccagtgacaaaggtctcccaggcagccgcggcccctgccccaccgctgagtggcgtgcgtgcaggcccaccctctccgcctttcccgacaccccaaagtagcgctgcgagcagctgcgtctccctcccggggctcgcgcgcccagaaccctccggtctcaaggaagcaggtgacagccgccgcccacccccttcccctccccgccgctgctctctggctcgccaccgcccaactccccctgcccccaccctggattttttttccccttctctcaaacctctaaacaggaaatagcccgaatcacaataatatacgggagcagccgcggaggccgctggcgccctcccattcccggggagcttcccgcactccggcttgggtgaagtgcagccagcgacgcgcgcagggagcgcagggggacaccagcccagcagctagcgccgcgccgcccagcgccccggagagccgccttcgccctcgcccagcgcccgacaccgccggccgcggcggcggccgccaccggctctagggtgcgaagtaccacattactgtcatctccctgtgagtgggattggcaccccggctgcagctccaggagcaagtactccaggaagcacagagctgtaccagtacacggcccacgttgccaggccccaggcatggaagagctgatatgggaacagtacactgtgaccctacaaaaggattccaaaagaggatttggaattgcagtgtccggaggcagagacaacccccactttgaaaatggagaaacgtcaattgtcatttctgatgtgctcccgggtgggcctgctgatgggctgctccaagaaaatgacagagtggtcatggtcaatggcacccccatggaggatgtgcttcattcgtttgcagttcagcagctcagaaaaagtgggaaggtcgctgctattgtggtcaagaggccccggaaggtccaggtggccgcacttcaggccagccctcccctggatcaggatgaccgggcttttgaggtgatggacgagtttgatggcagaagtttccggagtggctacagcgagaggagccggctgaacagccatggggggcgcagccgcagctgggaggacagcccggaaagggggcgtccccatgagcgggcccggagccgggagcgggacctcagccgggaccggagccgtggccggagcctggagcggggcctggaccaagaccatgcgcgcacccgagaccgcagccgtggccggagcctggagcggggcctggaccacgactttgggccatcccgggaccgggaccgtgaccgcagccgcggccggagcattgaccaggactacgagcgagcctatcaccgggcctacgacccagactacgagcgggcctacagcccggagtacaggcgcggggcccgccacgatgcccgctctcggggaccccgaagccgcagccgcgagcacccgcactcacggagccccagccccgagcctagggggcggccggggcccatcggggtcctcctgatgaaaagcagagcgaacgaagagtatggtctccggcttgggagtcagatcttcgtaaaggaaatgacccgaacgggtctggcaactaaagatggcaaccttcacgaaggagacataattctcaagatcaatgggactgtaactgagaacatgtctttaacggatgctcgaaaattgatagaaaagtcaagaggaaaactacagctagtggtgttgagagacagccagcagaccctcatcaacatcccgtcattaaatgacagtgactcagaaatagaagatatttcagaaatagagtcaaaccgatcattttctccagaggagagacgtcatcagtattctgattatgattatcattcctcaagtgagaagctgaaggaaaggccaagttccagagaggacacgccgagcagattgtccaggatgggtgcgacacccactccctttaagtccacaggggatattgcaggcacagttgtcccagagaccaacaaggaacccagataccaagaggaacccccagctcctcaaccaaaagcagccccgagaacttttcttcgtcctagtcctgaagatgaagcaatatatggccctaataccaaaatggtaaggttcaagaagggagacagcgtgggcctccggttggctggtggcaatgatgtcgggatatttgttgctggcattcaagaagggacctcggcggagcaggagggccttcaagaaggagaccagattctgaaggtgaacacacaggatttcagaggattagtgcgggaggatgccgttctctacctgttagaaatccctaaaggtgaaatggtgaccattttagctcagagccgagccgatgtgtatagagacatcctggcttgtggcagaggggattcgttttttataagaagccactttgaatgtgagaaggaaactccacagagcctggccttcaccagaggggaggtcttccgagtggtagacacactgtatgacggcaagctgggcaactggctggctgtgaggattgggaacgagttggagaaaggcttaatccccaacaagagcagagctgaacaaatggccagtgttcaaaatgcccagagagacaacgctggggaccgggcagatttctggagaatgcgtggccagaggtctggggtgaagaagaacctgaggaaaagtcgggaagacctcacagctgttgtgtctgtcagcaccaagttcccagcttatgagagggttttgctgcgagaagctggtttcaagagacctgtggtcttattcggccccatagctgatatagcaatggaaaaattggctaatgagttacctgactggtttcaaactgctaaaacggaaccaaaagatgcaggatctgagaaatccactggagtggtccggttaaataccgtgaggcaaattattgaacaggataagcatgcactactggatgtgactccgaaagctgtggacctgttgaattacacccagtggttcccaattgtgatttttttcaacccagactccagacaaggtgtcaaaaccatgagacaaaggttaaatccaacgtccaacaaaagttctcgaaagttatttgatcaagccaacaagcttaaaaactggtttggcagcttaaaggacactattcagcatcagcaaggagaagcggtttgggtctctgaaggaaagatggaagggatggatgatgaccccgaagaccgcatgtcctacttaaccgccatgggcgcggactatctgagttgcgacagccgcctcatcagtgactttgaagacacggacggtgaaggaggcgcctacactgacaatgagctggatgagccagccgaggagccgctggtgtcgtccatcacccgctcctcggagccggtgcagcacgaggagagcataaggaaacccagcccagagccacgagctcagatgaggagggctgctagcagcgatcaacttagggacaatagcccgcccccagcattcaagccagagccgcccaaggccaaaacccagaacaaagaagaatcctatgacttctccaaatcctatgaatataagtcaaacccctctgccgttgctggtaatgaaactcctggggcatctaccaaaggttatcctcctcctgttgcagcaaaacctacctttgggcggtctatactgaagccctccactcccatccctcctcaagagggtgaggaggtgggagagagcagtgaggagcaagataatgctcccaaatcagtcctgggcaaagtcaaaatatttgagaagatggatcacaaggccaggttacagagaatgcaggagctccaggaagcacagaatgcaaggatcgaaattgcccagaagcatcctgatatctatgcagttccaatcaaaacgcacaagccagaccctggcacgccccagcacacgagttccagaccccctgagccacagaaagctccttccagaccttatcaggataccagaggaagttatggcagtgatgccgaggaggaggagtaccgccagcagctgtcagaacactccaagcgcggttactatggccagtctgcccgataccgggacacagaattatagatgtctgagcacggactctcccaggcctgcctgcatggcatcagactagccactcctgccaggccgccgggatggttcttctccagttagaatgcaccatggagacgtggtgggactccagctcgtgtgtcctcatggagaacccaggggacagctggtgcaaattcagaactgagggctctatttgtgggactgggttagaggagtctgtggctttttgttcagaattaagcagaacactgcagtcagatcctgttacttgcttcagtggaccgaaatctgtattctgtttgcgtacttgtaatatgtatattaagaagcaataactatttttcctcattaatagctgccttcaaggactgtttcagtgtgagtcagaatgtgaaaaaggaataaaaaatactgttgggctcaaactaaattcaaagaagtactttattgcaactcttttaagtgccttggatgagaagtgtcttaaattttcttcctttgaagctttaggcagagccataatggactaaaacattttgactaagtttttataccagcttaatagctgtagttttccctgcactgtgtcatcttttcaaggcatttgtctttgtaatattttccataaatttggactgtctatatcataactatacttgatagtttggctataagtgctcaatagcttgaagcccaagaagttggtatcgaaatttgttgtttgtttaaacccaagtgctgcacaaaagcagatacttgaggaaaacactatttccaaaagcacatgtattgacaacagttttataatttaataaaaaggaatacattgcaatccgtaa

SEQ ID NO: 321445 - DNA, 5011 bp, Homo sapiens
ggaagctcagctgcagttctacgtagaagaaaagaggcggcaaagtaggcgcgcgggctccagtgacaaaggtctcccaggcagccgcggcccctgccccaccgctgagtggcgtgcgtgcaggcccaccctctccgcctttcccgacaccccaaagtagcgctgcgagcagctgcgtctccctcccggggctcgcgcgcccagaaccctccggtctcaaggaagcaggtgacagccgccgcccacccccttcccctccccgccgctgctctctggctcgccaccgcccaactccccctgcccccaccctggattttttttccccttctctcaaacctctaaacaggaaatagcccgaatcacaataatatacgggagcagccgcggaggccgctggcgccctcccattcccggggagcttcccgcactccggcttgggtgaagtgcagccagcgacgcgcgcagggagcgcagggggacaccagcccagcagctagcgccgcgccgcccagcgccccggagagccgccttcgccctcgcccagcgcccgacaccgccggccgcggcggcggccgccaccggctctagggtgcgaagtaccacattactgtcatctccctgtgagtgggattggcaccccggctgcagctccaggagcaagtactccaggaagcacagagctgtaccagtacacggcccacgttgccaggccccaggcatggaagagctgatatgggaacagtacactgtgaccctacaaaaggattccaaaagaggatttggaattgcagtgtccggaggcagagacaacccccactttgaaaatggagaaacgtcaattgtcatttctgatgtgctcccgggtgggcctgctgatgggctgctccaagaaaatgacagagtggtcatggtcaatggcacccccatggaggatgtgcttcattcgtttgcagttcagcagctcagaaaaagtgggaaggtcgctgctattgtggtcaagaggccccggaaggtccaggtggccgcacttcaggccagccctcccctggatcaggatgaccgggcttttgaggtgatggacgagtttgatggcagaagtttccggagtggctacagcgagaggagccggctgaacagccatggggggcgcagccgcagctgggaggacagcccggaaagggggcgtccccatgagcgggcccggagccgggagcgggacctcagccgggaccggagccgtggccggagcctggagcggggcctggaccaagaccatgcgcgcacccgagaccgcagccgtggccggagcctggagcggggcctggaccacgactttgggccatcccgggaccgggaccgtgaccgcagccgcggccggagcattgaccaggactacgagcgagcctatcaccgggcctacgacccagactacgagcgggcctacagcccggagtacaggcgcggggcccgccacgatgcccgctctcggggaccccgaagccgcagccgcgagcacccgcactcacggagccccagccccgagcctagggggcggccggggcccatcggggtcctcctgatgaaaagcagagcgaacgaagagtatggtctccggcttgggagtcagatcttcgtaaaggaaatgacccgaacgggtctggcaactaaagatggcaaccttcacgaaggagacataattctcaagatcaatgggactgtaactgagaacatgtctttaacggatgctcgaaaattgatagaaaagtcaagaggaaaactacagctagtggtgttgagagacagccagcagaccctcatcaacatcccgtcattaaatgacagtgactcagaaatagaagatatttcagaaatagagtcaaaccgatcattttctccagaggagagacgtcatcagtattctgattatgattatcattcctcaagtgagaagctgaaggaaaggccaagttccagagaggacacgccgagcagattgtccaggatgggtgcgacacccactccctttaagtccacaggggatattgcaggcacagttgtcccagagaccaacaaggaacccagataccaagaggaacccccagctcctcaaccaaaagcagccccgagaacttttcttcgtcctagtcctgaagatgaagcaatatatggccctaataccaaaatggtaaggttcaagaagggagacagcgtgggcctccggttggctggtggcaatgatgtcgggatatttgttgctggcattcaagaagggacctcggcggagcaggagggccttcaagaaggagaccagattctgaaggtgaacacacaggatttcagaggattagtgcgggaggatgccgttctctacctgttagaaatccctaaaggtgaaatggtgaccattttagctcagagccgagccgatgtgtatagagacatcctggcttgtggcagaggggattcgttttttataagaagccactttgaatgtgagaaggaaactccacagagcctggccttcaccagaggggaggtcttccgagtggtagacacactgtatgacggcaagctgggcaactggctggctgtgaggattgggaacgagttggagaaaggcttaatccccaacaagagcagagctgaacaaatggccagtgttcaaaatgcccagagagacaacgctggggaccgggcagatttctggagaatgcgtggccagaggtctggggtgaagaagaacctgaggaaaagtcgggaagacctcacagctgttgtgtctgtcagcaccaagttcccagcttatgagagggttttgctgcgagaagctggtttcaagagacctgtggtcttattcggccccatagctgatatagcaatggaaaaattggctaatgagttacctgactggtttcaaactgctaaaacggaaccaaaagatgcaggatctgagaaatccactggagtggtccggttaaataccgtgaggcaaattattgaacaggataagcatgcactactggatgtgactccgaaagctgtggacctgttgaattacacccagtggttcccaattgtgatttttttcaacccagactccagacaaggtgtcaaaaccatgagacaaaggttaaatccaacgtccaacaaaagttctcgaaagttatttgatcaagccaacaagcttaaaaaaacgtgtgcacacctttttacagctacaatcaacctaaattcagccaatgatagctggtttggcagcttaaaggacactattcagcatcagcaaggagaagcggtttgggtctctgaaggaaagatggaagggatggatgatgaccccgaagaccgcatgtcctacttaaccgccatgggcgcggactatctgagttgcgacagccgcctcatcagtgactttgaagacacggacggtgaaggaggcgcctacactgacaatgagctggatgagccagccgaggagccgctggtgtcgtccatcacccgctcctcggagccggtgcagcacgaggagagcataaggaaacccagcccagagccacgagctcagatgaggagggctgctagcagcgatcaacttagggacaatagcccgcccccagcattcaagccagagccgcccaaggccaaaacccagaacaaagaagaatcctatgacttctccaaatcctatgaatataagtcaaacccctctgccgttgctggtaatgaaactcctggggcatctaccaaaggttatcctcctcctgttgcagcaaaacctacctttgggcggtctatactgaagccctccactcccatccctcctcaagagggtgaggaggtgggagagagcagtgaggagcaagataatgctcccaaatcagtcctgggcaaagtcaaaatatttgagaagatggatcacaaggccaggttacagagaatgcaggagctccaggaagcacagaatgcaaggatcgaaattgcccagaagcatcctgatatctatgcagttccaatcttccagaccccctgagccacagaaagctccttccagaccttatcaggataccagaggaagttatggcagtgatgccgaggaggaggagtaccgccagcagctgtcagaacactccaagcgcggttactatggccagtctgcccgataccgggacacagaattatagatgtctgagcacggactctcccaggcctgcctgcatggcatcagactagccactcctgccaggccgccgggatggttcttctccagttagaatgcaccatggagacgtggtgggactccagctcgtgtgtcctcatggagaacccaggggacagctggtgcaaattcagaactgagggctctatttgtgggactgggttagaggagtctgtggctttttgttcagaattaagcagaacactgcagtcagatcctgttacttgcttcagtggaccgaaatctgtattctgtttgcgtacttgtaatatgtatattaagaagcaataactatttttcctcattaatagctgccttcaaggactgtttcagtgtgagtcagaatgtgaaaaaggaataaaaaatactgttgggctcaaactaaattcaaagaagtactttattgcaactcttttaagtgccttggatgagaagtgtcttaaattttcttcctttgaagctttaggcagagccataatggactaaaacattttgactaagtttttataccagcttaatagctgtagttttccctgcactgtgtcatcttttcaaggcatttgtctttgtaatattttccataaatttggactgtctatatcataactatacttgatagtttggctataagtgctcaatagcttgaagcccaagaagttggtatcgaaatttgttgtttgtttaaacccaagtgctgcacaaaagcagatacttgaggaaaacactatttccaaaagcacatgtattgacaacagttttataatttaataaaaaggaatacattgcaatccgtaa

SEQ ID NO: 321446 - DNA, 5695 bp, Homo sapiens
ggaagctcagctgcagttctacgtagaagaaaagaggcggcaaagtaggcgcgcgggctccagtgacaaaggtctcccaggcagccgcggcccctgccccaccgctgagtggcgtgcgtgcaggcccaccctctccgcctttcccgacaccccaaagtagcgctgcgagcagctgcgtctccctcccggggctcgcgcgcccagaaccctccggtctcaaggaagcaggtgacagccgccgcccacccccttcccctccccgccgctgctctctggctcgccaccgcccaactccccctgcccccaccctggattttttttccccttctctcaaacctctaaacaggaaatagcccgaatcacaataatatacgggagcagccgcggaggccgctggcgccctcccattcccggggagcttcccgcactccggcttgggtgaagtgcagccagcgacgcgcgcagggagcgcagggggacaccagcccagcagctagcgccgcgccgcccagcgccccggagagccgccttcgccctcgcccagcgcccgacaccgccggccgcggcggcggccgccaccggctctagggtgcgaagtaccacattactgtcatctccctgtgagtgggattggcaccccggctgcagctccaggagcaagtactccaggaagcacagagctgtaccagtacacggcccacgttgccaggccccaggcatggaagagctgatatgggaacagtacactgtgaccctacaaaaggattccaaaagaggatttggaattgcagtgtccggaggcagagacaacccccactttgaaaatggagaaacgtcaattgtcatttctgatgtgctcccgggtgggcctgctgatgggctgctccaagaaaatgacagagtggtcatggtcaatggcacccccatggaggatgtgcttcattcgtttgcagttcagcagctcagaaaaagtgggaaggtcgctgctattgtggtcaagaggccccggaaggtccaggtggccgcacttcaggccagccctcccctggatcaggatgaccgggcttttgaggtgatggacgagtttgatggcagaagtttccggagtggctacagcgagaggagccggctgaacagccatggggggcgcagccgcagctgggaggacagcccggaaagggggcgtccccatgagcgggcccggagccgggagcgggacctcagccgggaccggagccgtggccggagcctggagcggggcctggaccaagaccatgcgcgcacccgagaccgcagccgtggccggagcctggagcggggcctggaccacgactttgggccatcccgggaccgggaccgtgaccgcagccgcggccggagcattgaccaggactacgagcgagcctatcaccgggcctacgacccagactacgagcgggcctacagcccggagtacaggcgcggggcccgccacgatgcccgctctcggggaccccgaagccgcagccgcgagcacccgcactcacggagccccagccccgagcctagggggcggccggggcccatcggggtcctcctgatgaaaagcagagcgaacgaagagtatggtctccggcttgggagtcagatcttcgtaaaggaaatgacccgaacgggtctggcaactaaagatggcaaccttcacgaaggagacataattctcaagatcaatgggactgtaactgagaacatgtctttaacggatgctcgaaaattgatagaaaagtcaagaggaaaactacagctagtggtgttgagagacagccagcagaccctcatcaacatcccgtcattaaatgacagtgactcagaaatagaagatatttcagaaatagagtcaaaccgatcattttctccagaggagagacgtcatcagtattctgattatgattatcattcctcaagtgagaagctgaaggaaaggccaagttccagagaggacacgccgagcagattgtccaggatgggtgcgacacccactccctttaagtccacaggggatattgcaggcacagttgtcccagagaccaacaaggaacccagataccaagaggaacccccagctcctcaaccaaaagcagccccgagaacttttcttcgtcctagtcctgaagatgaagcaatatatggccctaataccaaaatggtaaggttcaagaagggagacagcgtgggcctccggttggctggtggcaatgatgtcgggatatttgttgctggcattcaagaagggacctcggcggagcaggagggccttcaagaaggagaccagattctgaaggtgaacacacaggatttcagaggattagtgcgggaggatgccgttctctacctgttagaaatccctaaaggtgaaatggtgaccattttagctcagagccgagccgatgtgtatagagacatcctggcttgtggcagaggggattcgttttttataagaagccactttgaatgtgagaaggaaactccacagagcctggccttcaccagaggggaggtcttccgagtggtagacacactgtatgacggcaagctgggcaactggctggctgtgaggattgggaacgagttggagaaaggcttaatccccaacaagagcagagctgaacaaatggccagtgttcaaaatgcccagagagacaacgctggggaccgggcagatttctggagaatgcgtggccagaggtctggggtgaagaagaacctgaggaaaagtcgggaagacctcacagctgttgtgtctgtcagcaccaagttcccagcttatgagagggttttgctgcgagaagctggtttcaagagacctgtggtcttattcggccccatagctgatatagcaatggaaaaattggctaatgagttacctgactggtttcaaactgctaaaacggaaccaaaagatgcaggatctgagaaatccactggagtggtccggttaaataccgtgaggcaaattattgaacaggataagcatgcactactggatgtgactccgaaagctgtggacctgttgaattacacccagtggttcccaattgtgatttttttcaacccagactccagacaaggtgtcaaaaccatgagacaaaggttaaatccaacgtccaacaaaagttctcgaaagttatttgatcaagccaacaagcttaaaaaaacgtgtgcacacctttttacagctacaatcaacctaaattcagccaatgatagctggtttggcagcttaaaggacactattcagcatcagcaaggagaagcggtttgggtctctgaaggaaagatggaagggatggatgatgaccccgaagaccgcatgtcctacttaaccgccatgggcgcggactatctgagttgcgacagccgcctcatcagtgactttgaagacacggacggtgaaggaggcgcctacactgacaatgagctggatgagccagccgaggagccgctggtgtcgtccatcacccgctcctcggagccggtgcagcacgaggagagcataaggaaacccagcccagagccacgagctcagatgaggagggctgctagcagcgatcaacttagggacaatagcccgcccccagcattcaagccagagccgcccaaggccaaaacccagaacaaagaagaatcctatgacttctccaaatcctatgaatataagtcaaacccctctgccgttgctggtaatgaaactcctggggcatctaccaaaggttatcctcctcctgttgcagcaaaacctacctttgggcggtctatactgaagccctccactcccatccctcctcaagagggtgaggaggtgggagagagcagtgaggagcaagataatgctcccaaatcagtcctgggcaaagtcaaaatatttgagaagatggatcacaaggccaggttacagagaatgcaggagctccaggaagcacagaatgcaaggatcgaaattgcccagaagcatcctgatatctatgcagttccaatcaaaacgcacaagccagaccctggcacgccccagcacacgagttccagaccccctgagccacagaaagctccttccagaccttatcaggataccagaggaagttatggcagtgatgccgaggaggaggagtaccgccagcagctgtcagaacactccaagcgcggttactatggccagtctgcccgataccgggacacagaattatagatgtctgagcacggactctcccaggcctgcctgcatggcatcagactagccactcctgccaggccgccgggatggttcttctccagttagaatgcaccatggagacgtggtgggactccagctcgtgtgtcctcatggagaacccaggggacagctggtgcaaattcagaactgagggctctatttgtgggactgggttagaggagtctgtggctttttgttcagaattaagcagaacactgcagtcagatcctgttacttgcttcagtggaccgaaatctgtattctgtttgcgtacttgtaatatgtatattaagaagcaataactatttttcctcattaatagctgccttcaaggactgtttcagtgtgagtcagaatgtgaaaaaggaataaaaaatactgttgggctcaaactaaattcaaagaagtactttattgcaactcttttaagtgccttggatgagaagtgtcttaaattttcttcctttgaagctttaggcagagccataatggactaaaacattttgactaagtttttataccagcttaatagctgtagttttccctgcactgtgtcatcttttcaaggcatttgtctttgtaatattttccataaatttggactgtctatatcataactatacttgatagtttggctataagtgctcaatagcttgaagcccaagaagttggtatcgaaatttgttgtttgtttaaacccaagtgctgcacaaaagcagatacttgaggaaaacactatttccaaaagcacatgtattgacaacagttttataatttaataaaaaggaatacattgcaatccgtaaaaaaaaaaaaaaaagaaaaaaaaaaaaaaaaagaaagaaaaaaaaaaaaagaaaaaaaagaaagaaaaaagacaaaagaagaagagaagagaacagaggaggagaagaagagagaaagagaggaagaaaaagagggcagaaagaaaacaaagagaggaagcgaaaagaagaagaaagaaggacgaggcaggagaaagaaaagaagagagaagtgagagagaagaaagaaagaggggaaaggagagaagaaaaggagagaggataagaaaagagaaaaaaaaaaaaacaaaaaaagcgaaaaaaaagaaagaaagaaaaagaaaaaaagaaaagagaaagaaagaaagaagaaaaagaaagaaaaaaaaaaaaagaaaaaaaagaaagagaaaggagaacgaaaaagaaaagaagaaaaagagacagcagaaagacaagagaaaagagcaggacacagaaaataacgaagagagaaaagaagagaaggaagaagaagaaagaagaaagagacagagagagaggagggagggagaaaagcggaaagaacggggaggggacgcagaggacgggggaggagaggaggcgggcgagaggggaggggagggagagggggagggaggcaggaaaaggagggaacagaaat

SEQ ID NO: 321447 - DNA, 1907 bp, Homo sapiens
gttcaacaacaacaaactgaagggggagaaaaatacaccattaccacagcaacaaattagtttatgctagacaacttgtaaagaataaattaacttccaaatgcctatagacatggatattagtgacacaagagattttagacttttggagggttcttaaaaaattgtgctttaaaggaagagactctacattggatgcagccagtttttaaaaatgtgtctgaagcatttggtgatggtttctgcctgttcagtaaagaagcaccggctcagaacctcaacttctggacttactcaagtttgcagaactcctccaaagcagtcgagtgctctgttctctctgcttggatgttcttgttgtgaatgaacctttatgtcttgtagagcataaggaaacccagcccagagccacgagctcagatgaggagggctgctagcagcgatcaacttagggacaatagcccgcccccagcattcaagccagagccgcccaaggccaaaacccagaacaaagaagaatcctatgacttctccaaatcctatgaatataagtcaaacccctctgccgttgctggtaatgaaactcctggggcatctaccaaaggttatcctcctcctgttgcagcaaaacctacctttgggcggtctatactgaagccctccactcccatccctcctcaagagggtgaggaggtgggagagagcagtgaggagcaagataatgctcccaaatcagtcctgggcaaagtcaaaatatttgagaagatggatcacaaggccaggttacagagaatgcaggagctccaggaagcacagaatgcaaggatcgaaattgcccagaagcatcctgatatctatgcagttccaatcaaaacgcacaagccagaccctggcacgccccagcacacgagttccagaccccctgagccacagaaagctccttccagaccttatcaggataccagaggaagttatggcagtgatgccgaggaggaggagtaccgccagcagctgtcagaacactccaagcgcggttactatggccagtctgcccgataccgggacacagaattatagatgtctgagcacggactctcccaggcctgcctgcatggcatcagactagccactcctgccaggccgccgggatggttcttctccagttagaatgcaccatggagacgtggtgggactccagctcgtgtgtcctcatggagaacccaggggacagctggtgcaaattcagaactgagggctctatttgtgggactgggttagaggagtctgtggctttttgttcagaattaagcagaacactgcagtcagatcctgttacttgcttcagtggaccgaaatctgtattctgtttgcgtacttgtaatatgtatattaagaagcaataactatttttcctcattaatagctgccttcaaggactgtttcagtgtgagtcagaatgtgaaaaaggaataaaaaatactgttgggctcaaactaaattcaaagaagtactttattgcaactcttttaagtgccttggatgagaagtgtcttaaattttcttcctttgaagctttaggcagagccataatggactaaaacattttgactaagtttttataccagcttaatagctgtagttttccctgcactgtgtcatcttttcaaggcatttgtctttgtaatattttccataaatttggactgtctatatcataactatacttgatagtttggctataagtgctcaatagcttgaagcccaagaagttggtatcgaaatttgttgtttgtttaaacccaagtgctgcacaaaagcagatacttgaggaaaacactatttccaaaagcacatgtattgacaacagttttataatttaataaaaaggaatacattgcaatccgtaa

SEQ ID NO: 321448 - DNA, 5510 bp, Homo sapiens
  misc_feature (3739)..(3739): n is a, c, g, or t
ggaagctcagctgcagttctacgtagaagaaaagaggcggcaaagtaggcgcgcgggctccagtgacaaaggtctcccaggcagccgcggcccctgccccaccgctgagtggcgtgcgtgcaggcccaccctctccgcctttcccgacaccccaaagtagcgctgcgagcagctgcgtctccctcccggggctcgcgcgcccagaaccctccggtctcaaggaagcaggtgacagccgccgcccacccccttcccctccccgccgctgctctctggctcgccaccgcccaactccccctgcccccaccctggattttttttccccttctctcaaacctctaaacaggaaatagcccgaatcacaataatatacgggagcagccgcggaggccgctggcgccctcccattcccggggagcttcccgcactccggcttgggtgaagtgcagccagcgacgcgcgcagggagcgcagggggacaccagcccagcagctagcgccgcgccgcccagcgccccggagagccgccttcgccctcgcccagcgcccgacaccgccggccgcggcggcggccgccaccggctctagggtgcgaagtaccacattactgtcatctccctgtgagtgggattggcaccccggctgcagctccaggagcaagtactccaggaagcacagagctgtaccagtacacggcccacgttgccaggccccaggcatggaagagctgatatgggaacagtacactgtgaccctacaaaaggattccaaaagaggatttggaattgcagtgtccggaggcagagacaacccccactttgaaaatggagaaacgtcaattgtcatttctgatgtgctcccgggtgggcctgctgatgggctgctccaagaaaatgacagagtggtcatggtcaatggcacccccatggaggatgtgcttcattcgtttgcagttcagcagctcagaaaaagtgggaaggtcgctgctattgtggtcaagaggccccggaaggtccaggtggccgcacttcaggccagccctcccctggatcaggatgaccgggcttttgaggtgatggacgagtttgatggcagaagtttccggagtggctacagcgagaggagccggctgaacagccatggggggcgcagccgcagctgggaggacagcccggaaagggggcgtccccatgagcgggcccggagccgggagcgggacctcagccgggaccggagccgtggccggagcctggagcggggcctggaccaagaccatgcgcgcacccgagaccgcagccgtggccggagcctggagcggggcctggaccacgactttgggccatcccgggaccgggaccgtgaccgcagccgcggccggagcattgaccaggactacgagcgagcctatcaccgggcctacgacccagactacgagcgggcctacagcccggagtacaggcgcggggcccgccacgatgcccgctctcggggaccccgaagccgcagccgcgagcacccgcactcacggagccccagccccgagcctagggggcggccggggcccatcggggtcctcctgatgaaaagcagagcgaacgaagagtatggtctccggcttgggagtcagatcttcgtaaaggaaatgacccgaacgggtctggcaactaaagatggcaaccttcacgaaggagacataattctcaagatcaatgggactgtaactgagaacatgtctttaacggatgctcgaaaattgatagaaaagtcaagaggaaaactacagctagtggtgttgagagacagccagcagaccctcatcaacatcccgtcattaaatgacagtgactcagaaatagaagatatttcagaaatagagtcaaaccgatcattttctccagaggagagacgtcatcagtattctgattatgattatcattcctcaagtgagaagctgaaggaaaggccaagttccagagaggacacgccgagcagattgtccaggatgggtgcgacacccactccctttaagtccacaggggatattgcaggcacagttgtcccagagaccaacaaggaacccagataccaagaggaacccccagctcctcaaccaaaagcagccccgagaacttttcttcgtcctagtcctgaagatgaagcaatatatggccctaataccaaaatggtaaggttcaagaagggagacagcgtgggcctccggttggctggtggcaatgatgtcgggatatttgttgctggcattcaagaagggacctcggcggagcaggagggccttcaagaaggagaccagattctgaaggtgaacacacaggatttcagaggattagtgcgggaggatgccgttctctacctgttagaaatccctaaaggtgaaatggtgaccattttagctcagagccgagccgatgtgtatagagacatcctggcttgtggcagaggggattcgttttttataagaagccactttgaatgtgagaaggaaactccacagagcctggccttcaccagaggggaggtcttccgagtggtagacacactgtatgacggcaagctgggcaactggctggctgtgaggattgggaacgagttggagaaaggcttaatccccaacaagagcagagctgaacaaatggccagtgttcaaaatgcccagagagacaacgctggggaccgggcagatttctggagaatgcgtggccagaggtctggggtgaagaagaacctgaggaaaagtcgggaagacctcacagctgttgtgtctgtcagcaccaagttcccagcttatgagagggttttgctgcgagaagctggtttcaagagacctgtggtcttattcggccccatagctgatatagcaatggaaaaattggctaatgagttacctgactggtttcaaactgctaaaacggaaccaaaagatgcaggatctgagaaatccactggagtggtccggttaaataccgtgaggcaaattattgaacaggataagcatgcactactggatgtgactccgaaagctgtggacctgttgaattacacccagtggttcccaattgtgatttttttcaacccagactccagacaaggtgtcaaaaccatgagacaaaggttaaatccaacgtccaacaaaagttctcgaaagttatttgatcaagccaacaagcttaaaaaaacgtgtgcacacctttttacagctacaatcaacctaaattcagccaatgatagctggtttggcagcttaaaggacactattcagcatcagcaaggagaagcggtttgggtctctgaaggaaaggtatgtggcatagatatgctgctatgaggtgagagtccctgttctgaaacttttctcaagagggcagtgaatgtagtcaagccatgcccatttgaagtgatgctcacatgtgtgctaatcaagtttgaaatttcgtaaattctctgaccaagtaataaaaatgaagggacttttaaaagaagagcagaatgtgacatgtgcagccctacattcacttccctttcacttttaatgtagtaactagtgttatattccaagtacactaatcagagcttacaagatctcatgctgagctccacagcttactaaggacgtgggaaacttagagtgcagatgagaggtgaggttgagcaacttggagaatacggctaaacattaataaaaagaaaagctaatggagttagaattacttagaaaataagnttggttgagaatgtgccatcgttctgggagtttgaatgggtgatatgagaacgttagggaatttgtctaggcctctagaattggatcgcttctccctcggggagatagctcacacacagctgtgctgcagggaggagagagggagattctattacctgtggccgcttttattttagaagcttttggtgttagtatcctgttcaccagctgaactgaggtagttttgtgagacttgacagtgactattttgttgcagaattgactaagttttgctctttgagaactagatgtgtagtcaaagtatctggcatctatggagtgcttccagtttggaagggggatgcaagcttccctggggaggacaggttgaacaggacatagcttctgcctttgagggtctgagaatcttgtagaggcatggatgtgagtgtagcacaaggcagcgtgcaatgtgttgatattactaggagagtggtaccaggagaacaggctgcagaggagctggattcagaagaaaagcaagacagactgagaaagtgtggcttagccgcggtatggaggatggatggtagcacagataggctgcagggcccctaatttgagttcctgcacaaaaacgaccataatatcaacattgtaccaaagccaagtgatctcagggagaaaaataaaagatgccttccctggcgagcacatcaaggtttcagtcgcttggctgtgtccttgggaattttcttgagtccccactcccaggagccacatcagaccccactgaccgtccaacacaaattcctctagatggaagggatggatgatgaccccgaagaccgcatgtcctacttaaccgccatgggcgcggactatctgagttgcgacagccgcctcatcagtgactttgaagacacggacggtgaaggaggcgcctacactgacaatgagctggatgagccagccgaggagccgctggtgtcgtccatcacccgctcctcggagccggtgcagcacgaggaggtgaggcgaggcaggccacgggcaggaacaggagagcctggtgttttccttgcactctcgtggacagctgtgtgttcagggtgctgtggaaggcattcctaagggttggagcagatgacttccagggagtctctcgctttgagtccacgctggcatggttgcagtctgtgggaaagtggggcaggcaggtggacttcagaagagcttgaggggtcagcactccgcacacccatgccctcaggtgcgatggataaacagaatggctttaggtgccgtctgtccaaattaccagcggaaccttccttcccatgcagtattgttgtatgtacttgtaacctttgattaggtttctctctgtactcttagatgtccttgcttttcttccccatcctgcctttaacctttctaatcttgccaaagctcttgagtgtttccccatcagtttccttctctcttatatttcagttttttaattgagttcatgatcaaaccttcatctgatcacatcacatgtactgtgcatccactgtgattagatagcttatgggatccttgaaatcacattgacaggcactgtaaagtcacagccaagttagcaattattagttgcacctcagagaatgttggaataatgatctttgaagatgggattgttcatatatttggataattattgctgtggatttctctctagcattttagctcattccagtaaatgatttttttctttatgaaatagaactaccaaaaaaaaaaaaaa

SEQ ID NO: 321449 - DNA, 3909 bp, Homo sapiens
ggaagctcagctgcagttctacgtagaagaaaagaggcggcaaagtaggcgcgcgggctccagtgacaaaggtctcccaggcagccgcggcccctgccccaccgctgagtggcgtgcgtgcaggcccaccctctccgcctttcccgacaccccaaagtagcgctgcgagcagctgcgtctccctcccggggctcgcgcgcccagaaccctccggtctcaaggaagcaggtgacagccgccgcccacccccttcccctccccgccgctgctctctggctcgccaccgcccaactccccctgcccccaccctggattttttttccccttctctcaaacctctaaacaggaaatagcccgaatcacaataatatacgggagcagccgcggaggccgctggcgccctcccattcccggggagcttcccgcactccggcttgggtgaagtgcagccagcgacgcgcgcagggagcgcagggggacaccagcccagcagctagcgccgcgccgcccagcgccccggagagccgccttcgccctcgcccagcgcccgacaccgccggccgcggcggcggccgccaccggctctagggtgcgaagtaccacattactgtcatctccctgtgagtgggattggcaccccggctgcagctccaggagcaagtactccaggaagcacagagctgtaccagtacacggcccacgttgccaggccccaggcatggaagagctgatatgggaacagtacactgtgaccctacaaaaggattccaaaagaggatttggaattgcagtgtccggaggcagagacaacccccactttgaaaatggagaaacgtcaattgtcatttctgatgtgctcccgggtgggcctgctgatgggctgctccaagaaaatgacagagtggtcatggtcaatggcacccccatggaggatgtgcttcattcgtttgcagttcagcagctcagaaaaagtgggaaggtcgctgctattgtggtcaagaggccccggaaggtccaggtggccgcacttcaggccagccctcccctggatcaggatgaccgggcttttgaggtgatggacgagtttgatggcagaagtttccggagtggctacagcgagaggagccggctgaacagccatggggggcgcagccgcagctgggaggacagcccggaaagggggcgtccccatgagcgggcccggagccgggagcgggacctcagccgggaccggagccgtggccggagcctggagcggggcctggaccaagaccatgcgcgcacccgagaccgcagccgtggccggagcctggagcggggcctggaccacgactttgggccatcccgggaccgggaccgtgaccgcagccgcggccggagcattgaccaggactacgagcgagcctatcaccgggcctacgacccagactacgagcgggcctacagcccggagtacaggcgcggggcccgccacgatgcccgctctcggggaccccgaagccgcagccgcgagcacccgcactcacggagccccagccccgagcctagggggcggccggggcccatcggggtcctcctgatgaaaagcagagcgaacgaagagtatggtctccggcttgggagtcagatcttcgtaaaggaaatgacccgaacgggtctggcaactaaagatggcaaccttcacgaaggagacataattctcaagatcaatgggactgtaactgagaacatgtctttaacggatgctcgaaaattgatagaaaagtcaagaggaaaactacagctagtggtgttgagagacagccagcagaccctcatcaacatcccgtcattaaatgacagtgactcagaaatagaagatatttcagaaatagagtcaaaccgatcattttctccagaggagagacgtcatcagtattctgattatgattatcattcctcaagtgagaagctgaaggaaaggccaagttccagagaggacacgccgagcagattgtccaggatgggtgcgacacccactccctttaagtccacaggggatattgcaggcacagttgtcccagagaccaacaaggaacccagataccaagaggaacccccagctcctcaaccaaaagcagccccgagaacttttcttcgtcctagtcctgaagatgaagcaatatatggccctaataccaaaatggtaaggttcaagaagggagacagcgtgggcctccggttggctggtggcaatgatgtcgggatatttgttgctggcattcaagaagggacctcggcggagcaggagggccttcaagaaggagaccagattctgaaggtgaacacacaggatttcagaggattagtgcgggaggatgccgttctctacctgttagaaatccctaaaggtgaaatggtgaccattttagctcagagccgagccgatgtgtatagagacatcctggcttgtggcagaggggattcgttttttataagaagccactttgaatgtgagaaggaaactccacagagcctggccttcaccagaggggaggtcttccgagtggtagacacactgtatgacggcaagctgggcaactggctggctgtgaggattgggaacgagttggagaaaggcttaatccccaacaagagcagagctgaacaaatggccagtgttcaaaatgcccagagagacaacgctggggaccgggcagatttctggagaatgcgtggccagaggtctggggtgaagaagaacctgaggaaaagtcgggaagacctcacagctgttgtgtctgtcagcaccaagttcccagcttatgagagggttttgctgcgagaagctggtttcaagagacctgtggtcttattcggccccatagctgatatagcaatggaaaaattggctaatgagttacctgactggtttcaaactgctaaaacggaaccaaaagatgcaggatctgagaaatccactggagtggtccggttaaataccgtgaggcaaattattgaacaggataagcatgcactactggatgtgactccgaaagctgtggacctgttgaattacacccagtggttcccaattgtgatttttttcaacccagactccagacaaggtgtcaaaaccatgagacaaaggttaaatccaacgtccaacaaaagttctcgaaagttatttgatcaagccaacaagcttaaaaaaacgtgtgcacacctttttacagctacaatcaacctaaattcagccaatgatagctggtttggcagcttaaaggacactattcagcatcagcaaggagaagcggtttgggtctctgaaggaaagatggaagggatggatgatgaccccgaagaccgcatgtcctacttaaccgccatgggcgcggactatctgagttgcgacagccgcctcatcagtgactttgaagacacggacggtgaaggaggcgcctacactgacaatgagctggatgagccagccgaggagccgctggtgtcgtccatcacccgctcctcggagccggtgcagcacgaggagagcataaggaaacccagcccagagccacgagctcagatgaggagggctgctagcagcgatcaacttagggacaatagcccgcccccagcattcaagccagagccgcccaaggtacgtggctgggaagccccaggatgggaaggaagaggaagcagatgccctctgaagcctccctggacggcccagggaggagcatgcacactgagatggtgtttaattacggttctgactcactgtgttctctattagagcctatcttttggcctgttgggtgaactcccaaattagggaagggcaaaaaggaaggaaaggcaatattaggagagcatatgattttaggactgttagtgtttatttaatttactcttcttgtaaaaaaa

SEQ ID NO: 321450 - DNA, 1185 bp, Homo sapiens
aaatggcgcgagcggcagggaggggctcttcacccagtccggcagttgaagctcggcgctcgggttacccctgcagcgacgccccctggtcccacagataccactgctgctcccgccctttcgctcctcggccgcgcaatgggcacccgcgacgacgagtacgactacctctttaaagttgtccttattggagattctggtgttggaaagagtaatctcctgtctcgatttactcgaaatgagtttaatctggaaagcaagagcaccattggagtagagtttgcaacaagaagcatccaggttgatggaaaaacaataaaggcacagatatgggacacagcagggcaagagcgatatcgagctataacatcagcatattatcgtggagctgtaggtgccttattggtttatgacattgctaaacatctcacatatgaaaatgtagagcgatggctgaaagaactgagagatcatgctgatagtaacattgttatcatgcttgtgggcaataagagtgatctacgtcatctcagggcagttcctacagatgaagcaagagcttttgcagaaaagaatggtttgtcattcattgaaacttcggccctagactctacaaatgtagaagctgcttttcagacaattttaacagagatttaccgcattgtttctcagaagcaaatgtcagacagacgcgaaaatgacatgtctccaagcaacaatgtggttcctattcatgttccaccaaccactgaaaacaagccaaaggtgcagtgctgtcagaacatctaaggcatttctcttctcccctagaaggctgtgtatagtccatttcccaggtctgagatttaaatatatttgtaattcttgtgaaaaaaaaaaaaaaaaaaaaaaaatttggggggggcccgggccctaagaaagaaggtttcataaacaccacctcgggtggggcggccggcggccccagagtaggttaaggtagaccctgggccactcagggtgctcccaaaggaagagatccgcgggcacacgacacaagtcggcgggggattccccaccaaatataaaaagccgcgggggagcaccaccggcggttctggacaactccacagcggagtccgaggggcacacacggggccaacaacaagggggcccagggaggcaaataaataccgcgcgggagag

SEQ ID NO: 321451 - DNA, 2700 bp, Homo sapiens
aaatggcgcgagcggcagggaggggctcttcacccagtccggcagttgaagctcggcgctcgggttacccctgcagcgacgccccctggtcccacagataccactgctgctcccgccctttcgctcctcggccgcgcaatgggcacccgcgacgacgagtacgactacctctttaaagttgtccttattggagattctggtgttggaaagagtaatctcctgtctcgatttactcgaaatgagtttaatctggaaagcaagagcaccattggagtagagtttgcaacaagaagcatccaggttgatggaaaaacaataaaggcacagatatgggacacagcagggcaagagcgatatcgagctataacatcagcatattatcgtggagctgtaggtgccttattggtttatgacattgctaaacatctcacatatgaaaatgtagagcgatggctgaaagaactgagagatcatgctgatagtaacattgttatcatgcttgtgggcaataagagtgatctacgtcatctcagggcagttcctacagatgaagcaagagcttttgcagaaaagaatggtttgtcattcattgaaacttcggccctagactctacaaatgtagaagctgcttttcagacaattttaacagagatttaccgcattgtttctcagaagcaaatgtcagacagacgcgaaaatgacatgtctccaagcaacaatgtggttcctattcatgttccaccaaccactgaaaacaagccaaaggtgcagtgctgtcagaacatctaaggcatttctcttctcccctagaaggctgtgtatagtccatttcccaggtctgagatttaaatatatttgtaattcttgtgtcacttttgtgttttattacttcatacttatgaatttttccatgtcctaagtcttttgattttagctttataaaatcatccacttgtcccgaatgactgcagctttttttcatgctatggcttcactagccttagtttaataaactgaatgtttggattcctcagttattgtttacttttcatcatggaagcctgtcactgtatgtaggacataatagaacttgatcacttgaagctcagacctattggtcttgatcaaatcaaactaagaagaccttagaaataagctaccattttgccacagagcagcttataggtaatacactcttctctcagtgcagtgtacatttccacaaatctaagaattgccctataaacatagcaggattttgagagcttgaaaattttccattattctggacatgaatttctaaaatgccttaataggtttatgtagttgagtaaattttgttttttaatttttgtaagcatcaaagttgattagagaggggggcactttttctggagaattctcttagtaaacacaaaagattgttacggtttcattagtagtatggttgtggggccataagttaaacagtgctgcctggtaggctgggaactgaagagacttgtggtattccatctcgggtgcctctgttggcaatgatcaggcagcccaaaagatttaaatgatctataataatttccaagcggtagattatgtggcattttattgctcaggcaataattggtttaatgctggtagtgtcaaattttgaagtgttaattttgtcttagaaccttccagtaagtgaaatacaacctagttttatcaccatatccaccagcaggcatggataattattttaacaatgctaatatttgagttttgcagtatattatagaatatagtccagttaaatctttggtttcagtatgtctgaagagtacagtgagaggttaatttctgctcaagtggtaccacttaaaggcatgtattcttttagtatgtaaaatgaaatagtaccttgagtttaaatagaatgcatttaggcattgtagagatctgaaatagttttcttccactacattgttgaaatcaatgaagcaattagtttctcattcagaaatgtgcacactaatatttagttttgctttctcgtggataatattaagcacttactctgcagtttcctggaagttgtgtcaactgcagtgatactattcaggatggtgggaaatccccaaaaatatgtatgtgtgggcttgcttagattactatatttcatagttaatcttttgtctcttgcggtgctcatgatgtgtggggcacacggaaggcattgctgtagtcagtcattttggttttcttctatagccattttattattttagtgtattagttatgaagataatattatctatttgtaaattgctactttgtattttatgcatgctctgtaatttgatttttttttagttattgatttggattatattcacattctaataaacagttatagggggattatttcttatgctgtcagattacatttttcctttgagtgctttgggtgcagccgtggaatcctgatgtaaaagcataggttcttgcattactgagtaaacattgaattgggagcatcagtgtgtgaattcagctttgattttagaactgcagttcaattatgctttccttggaaaaagtatgtccaaaaacattaggaaagtagtgtgtattttcatatataacagtgtcaccagacccaggaaaagaaaccatctctattttattgaaagttggtggtagattttttacaaagtaagg

SEQ ID NO: 321452 - DNA, 2697 bp, Homo sapiens
ttatataggctaggtacgaggcgggtggtgaatcggccgaggttgaagctcggcgctcgggttacccctgcagcgacgccccctggtcccacagataccactgctgctcccgccctttcgctcctcggccgcgcaatgggcacccgcgacgacgagtacgactacctctttaaagttgtccttattggagattctggtgttggaaagagtaatctcctgtctcgatttactcgaaatgagtttaatctggaaagcaagagcaccattggagtagagtttgcaacaagaagcatccaggttgatggaaaaacaataaaggcacagatatgggacacagcagggcaagagcgatatcgagctataacatcagcatattatcgtggagctgtaggtgccttattggtttatgacattgctaaacatctcacatatgaaaatgtagagcgatggctgaaagaactgagagatcatgctgatagtaacattgttatcatgcttgtgggcaataagagtgatctacgtcatctcagggcagttcctacagatgaagcaagagcttttgcagaaaagaatggtttgtcattcattgaaacttcggccctagactctacaaatgtagaagctgcttttcagacaattttaacagagatttaccgcattgtttctcagaagcaaatgtcagacagacgcgaaaatgacatgtctccaagcaacaatgtggttcctattcatgttccaccaaccactgaaaacaagccaaaggtgcagtgctgtcagaacatctaaggcatttctcttctcccctagaaggctgtgtatagtccatttcccaggtctgagatttaaatatatttgtaattcttgtgtcacttttgtgttttattacttcatacttatgaatttttccatgtcctaagtcttttgattttagctttataaaatcatccacttgtcccgaatgactgcagctttttttcatgctatggcttcactagccttagtttaataaactgaatgtttggattcctcagttattgtttacttttcatcatggaagcctgtcactgtatgtaggacataatagaacttgatcacttgaagctcagacctattggtcttgatcaaatcaaactaagaagaccttagaaataagctaccattttgccacagagcagcttataggtaatacactcttctctcagtgcagtgtacatttccacaaatctaagaattgccctataaacatagcaggattttgagagcttgaaaattttccattattctggacatgaatttctaaaatgccttaataggtttatgtagttgagtaaattttgttttttaatttttgtaagcatcaaagttgattagagaggggggcactttttctggagaattctcttagtaaacacaaaagattgttacggtttcattagtagtatggttgtggggccataagttaaacagtgctgcctggtaggctgggaactgaagagacttgtggtattccatctcgggtgcctctgttggcaatgatcaggcagcccaaaagatttaaatgatctataataatttccaagcggtagattatgtggcattttattgctcaggcaataattggtttaatgctggtagtgtcaaattttgaagtgttaattttgtcttagaaccttccagtaagtgaaatacaacctagttttatcaccatatccaccagcaggcatggataattattttaacaatgctaatatttgagttttgcagtatattatagaatatagtccagttaaatctttggtttcagtatgtctgaagagtacagtgagaggttaatttctgctcaagtggtaccacttaaaggcatgtattcttttagtatgtaaaatgaaatagtaccttgagtttaaatagaatgcatttaggcattgtagagatctgaaatagttttcttccactacattgttgaaatcaatgaagcaattagtttctcattcagaaatgtgcacactaatatttagttttgctttctcgtggataatattaagcacttactctgcagtttcctggaagttgtgtcaactgcagtgatactattcaggatggtgggaaatccccaaaaatatgtatgtgtgggcttgcttagattactatatttcatagttaatcttttgtctcttgcggtgctcatgatgtgtggggcacacggaaggcattgctgtagtcagtcattttggttttcttctatagccattttattattttagtgtattagttatgaagataatattatctatttgtaaattgctactttgtattttatgcatgctctgtaatttgatttttttttagttattgatttggattatattcacattctaataaacagttatagggggattatttcttatgctgtcagattacatttttcctttgagtgctttgggtgcagccgtggaatcctgatgtaaaagcataggttcttgcattactgagtaaacattgaattgggagcatcagtgtgtgaattcagctttgattttagaactgcagttcaattatgctttccttggaaaaagtatgtccaaaaacattaggaaagtagtgtgtattttcatatataacagtgtcaccagacccaggaaaagaaaccatctctattttattgaaagttggtggtagattttttacaaagtaagg

SEQ ID NO: 321453 - DNA, 1093 bp, Homo sapiens
  misc_feature (1038)..(1038): n is a, c, g, or t
aaatggcgcgagcggcagggaggggctcttcacccagtccggcagttgaagctcggcgctcgggttacccctgcagcgacgccccctggtcccacagataccactgctgctcccgccctttcgctcctcggccgcgcaatgggcacccgcgacgacgagtacgactacctctttaaagttgtccttattggagattctggtgttggaaagagtaatctcctgtctcgatttactcgaaatgagtttaatctggaaagcaagagcaccattggagtagagtttgcaacaagaagcatccaggttgatggaaaaacaataaaggcacagatatgggacacagcagggcaagagcgatatcgagctataacatcagcatattatcgtggagctgtaggtgccttattggtttatgacattgctaaacatctcacatatgaaaatgtagagcgatggctgaaagaactgagagatcatgctgatagtaacattgttatcatgcttgtgggcaataagagtgatctacgtcatctcagggcagttcctacagatgaagcaagagcttttgcagaaaagaatggtttgtcattcattgaaacttcggccctagactctacaaatgtagaagctgcttttcagacaattttaacagagatttaccgcattgtttctcagaagcaaatgtcagacagacgcgaaaatgacatgtctccaagcaacaatgtggttcctattcatgttccaccaaccactgaaaacaagccaaaggtgcagtgctgtcagaacatctaaggcatttctcttctcccctagaaggctgtgtatagtccatttcccaggtctgagatttaaatatatttgtaattcttgtgtcacttttgtgttttattacttcatacttatgaatttttccatgtcctaagtcttttgattttagctttataaaatcatccacttgtcccgaatgactgcagctttttttcatgctatggcttcactagccttagtttaataaactgaatgtttggattcctaaaaaanagggggggctaagatccggggcctttccttcccctttcagggcctgggtttacgg

SEQ ID NO: 321454 - DNA, 2296 bp, Homo sapiens
cctctcccgaagcccctctgacgggttcttcgcttccctcttggccttgccttcggtgcagactcccattacagttgtccttattggagattctggtgttggaaagagtaatctcctgtctcgatttactcgaaatgagtttaatctggaaagcaagagcaccattggagtagagtttgcaacaagaagcatccaggttgatggaaaaacaataaaggcacagatatgggacacagcagggcaagagcgatatcgagctataacatcagcatattatcgtggagctgtaggtgccttattggtttatgacattgctaaacatctcacatatgaaaatgtagagcgatggctgaaagaactgagagatcatgctgatagtaacattgttatcatgcttgtgggcaataagagtgatctacgtcatctcagggcagttcctacagatgaagcaagagcttttgcagaaaagaatggtttgtcattcattgaaacttcggccctagactctacaaatgtagaagctgcttttcagacaattttaacagagatttaccgcattgtttctcagaagcaaatgtcagacagacgcgaaaatgacatgtctccaagcaacaatgtggttcctattcatgttccaccaaccactgaaaacaagccaaaggtgcagtgctgtcagaacatctaaggcatttctcttctcccctagaaggctgtgtatagtccatttcccaggtctgagatttaaatatatttgtaattcttgtgtcacttttgtgttttattacttcatacttatgaatttttccatgtcctaagtcttttgattttagctttataaaatcatccacttgtcccgaatgactgcagctttttttcatgctatggcttcactagccttagtttaataaactgaatgtttggattcctcagttattgtttacttttcatcatggaagcctgtcactgtatgtaggacataatagaacttgatcacttgaagctcagacctattggtcttgatcaaatcaaactaagaagaccttagaaataagctaccattttgccacagagcagcttataggtaatacactcttctctcagtgcagtgtacatttccacaaatctaagaattgccctataaacatagcaggattttgagagcttgaaaattttccattattctggacatgaatttctaaaatgccttaataggtttatgtagttgagtaaattttgttttttaatttttgtaagcatcaaagttgattagagaggggggcactttttctggagaattctcttagtaaacacaaaagattgttacggtttcattagtagtatggttgtggggccataagttaaacagtgctgcctggtaggctgggaactgaagagacttgtggtattccatctcgggtgcctctgttggcaatgatcaggcagcccaaaagatttaaatgatctataataatttccaagcggtagattatgtggcattttattgctcaggcaataattggtttaatgctggtagtgtcaaattttgaagtgttaattttgtcttagaaccttccagtaagtgaaatacaacctagttttatcaccatatccaccagcaggcatggataattattttaacaatgctaatatttgagttttgcagtatattatagaatatagtccagttaaatctttggtttcagtatgtctgaagagtacagtgagaggttaatttctgctcaagtggtaccacttaaaggcatgtattcttttagtatgtaaaatgaaatagtaccttgagtttaaatagaatgcatttaggcattgtagagatctgaaatagttttcttccactacattgttgaaatcaatgaagcaattagtttctcattcagaaatgtgcacactaatatttagttttgctttctcgtggataatattaagcacttactctgcagtttcctggaagttgtgtcaactgcagtgatactattcaggatggtgggaaatccccaaaaatatgtatgtgtgggcttgcttagattactatatttcatagttaatcttttgtctcttgcggtgctcatgatgtgtggggcacacggaaggcattgctgtagtcagtcattttggttttcttctatagccattttattattttagtgtattagttatgaagataatattatctatttgtaaattgctactttgtattttatgcatgctctgtaatttgatttttttttagttattgatttggattatattcacattctaataaacagttataggggga

SEQ ID NO: 321455 - DNA, 2346 bp, Homo sapiens
aaatggcgcgagcggcagggaggggctcttcacccagtccggcagttgaagctcggcgctcgggttacccctgcagcgacgccccctggtcccacagataccactgctgctcccgccctttcgctcctcggccgcgcaatgggcacccgcgacgacgagtacgactacctctttaaagttgtccttattggagattctggtgttggaaagagtaatctcctgtctcgatttactcgaaatgagtttaatctggaaagcaagagcaccattggagtagagtttgcaacaagaagcatccaggttgatggaaaaacaataaaggcacagatatgggacacagcagggcaagagcgatatcgagctataacatcagcatattatcgtggagctgtaggtgccttattggtttatgacattgctaaacatctcacatatgaaaatgtagagcgatggctgaaagaactgagagatcatgctgatagtaacattgttatcatgcttgtgggcaataagagtgatctacgtcatctcagggcagttcctacagatgaagcaagagcttttgcagaagctgcttttcagacaattttaacagagatttaccgcattgtttctcagaagcaaatgtcagacagacgcgaaaatgacatgtctccaagcaacaatgtggttcctattcatgttccaccaaccactgaaaacaagccaaaggtgcagtgctgtcagaacatctaaggcatttctcttctcccctagaaggctgtgtatagtccatttcccaggtctgagatttaaatatatttgtaattcttgtgtcacttttgtgttttattacttcatacttatgaatttttccatgtcctaagtcttttgattttagctttataaaatcatccacttgtcccgaatgactgcagctttttttcatgctatggcttcactagccttagtttaataaactgaatgtttggattcctcagttattgtttacttttcatcatggaagcctgtcactgtatgtaggacataatagaacttgatcacttgaagctcagacctattggtcttgatcaaatcaaactaagaagaccttagaaataagctaccattttgccacagagcagcttataggtaatacactcttctctcagtgcagtgtacatttccacaaatctaagaattgccctataaacatagcaggattttgagagcttgaaaattttccattattctggacatgaatttctaaaatgccttaataggtttatgtagttgagtaaattttgttttttaatttttgtaagcatcaaagttgattagagaggggggcactttttctggagaattctcttagtaaacacaaaagattgttacggtttcattagtagtatggttgtggggccataagttaaacagtgctgcctggtaggctgggaactgaagagacttgtggtattccatctcgggtgcctctgttggcaatgatcaggcagcccaaaagatttaaatgatctataataatttccaagcggtagattatgtggcattttattgctcaggcaataattggtttaatgctggtagtgtcaaattttgaagtgttaattttgtcttagaaccttccagtaagtgaaatacaacctagttttatcaccatatccaccagcaggcatggataattattttaacaatgctaatatttgagttttgcagtatattatagaatatagtccagttaaatctttggtttcagtatgtctgaagagtacagtgagaggttaatttctgctcaagtggtaccacttaaaggcatgtattcttttagtatgtaaaatgaaatagtaccttgagtttaaatagaatgcatttaggcattgtagagatctgaaatagttttcttccactacattgttgaaatcaatgaagcaattagtttctcattcagaaatgtgcacactaatatttagttttgctttctcgtggataatattaagcacttactctgcagtttcctggaagttgtgtcaactgcagtgatactattcaggatggtgggaaatccccaaaaatatgtatgtgtgggcttgcttagattactatatttcatagttaatcttttgtctcttgcggtgctcatgatgtgtggggcacacggaaggcattgctgtagtcagtcattttggttttcttctatagccattttattattttagtgtattagttatgaagataatattatctatttgtaaattgctactttgtattttatgcatgctctgtaatttgatttttttttagttattgatttggattatattcacattctaataaacagttataggggga

SEQ ID NO: 321456 - DNA, 1949 bp, Homo sapiens
ccgggcctgctctctcgggccctgctgatagtaacattgttatcatgcttgtgggcaataagagtgatctacgtcatctcagggcagttcctacagatgaagcaagagcttttgcagaaaagaatggtttgtcattcattgaaacttcggccctagactctacaaatgtagaagctgcttttcagacaattttaacagagatttaccgcattgtttctcagaagcaaatgtcagacagacgcgaaaatgacatgtctccaagcaacaatgtggttcctattcatgttccaccaaccactgaaaacaagccaaaggtgcagtgctgtcagaacatctaaggcatttctcttctcccctagaaggctgtgtatagtccatttcccaggtctgagatttaaatatatttgtaattcttgtgtcacttttgtgttttattacttcatacttatgaatttttccatgtcctaagtcttttgattttagctttataaaatcatccacttgtcccgaatgactgcagctttttttcatgctatggcttcactagccttagtttaataaactgaatgtttggattcctcagttattgtttacttttcatcatggaagcctgtcactgtatgtaggacataatagaacttgatcacttgaagctcagacctattggtcttgatcaaatcaaactaagaagaccttagaaataagctaccattttgccacagagcagcttataggtaatacactcttctctcagtgcagtgtacatttccacaaatctaagaattgccctataaacatagcaggattttgagagcttgaaaattttccattattctggacatgaatttctaaaatgccttaataggtttatgtagttgagtaaattttgttttttaatttttgtaagcatcaaagttgattagagaggggggcactttttctggagaattctcttagtaaacacaaaagattgttacggtttcattagtagtatggttgtggggccataagttaaacagtgctgcctggtaggctgggaactgaagagacttgtggtattccatctcgggtgcctctgttggcaatgatcaggcagcccaaaagatttaaatgatctataataatttccaagcggtagattatgtggcattttattgctcaggcaataattggtttaatgctggtagtgtcaaattttgaagtgttaattttgtcttagaaccttccagtaagtgaaatacaacctagttttatcaccatatccaccagcaggcatggataattattttaacaatgctaatatttgagttttgcagtatattatagaatatagtccagttaaatctttggtttcagtatgtctgaagagtacagtgagaggttaatttctgctcaagtggtaccacttaaaggcatgtattcttttagtatgtaaaatgaaatagtaccttgagtttaaatagaatgcatttaggcattgtagagatctgaaatagttttcttccactacattgttgaaatcaatgaagcaattagtttctcattcagaaatgtgcacactaatatttagttttgctttctcgtggataatattaagcacttactctgcagtttcctggaagttgtgtcaactgcagtgatactattcaggatggtgggaaatccccaaaaatatgtatgtgtgggcttgcttagattactatatttcatagttaatcttttgtctcttgcggtgctcatgatgtgtggggcacacggaaggcattgctgtagtcagtcattttggttttcttctatagccattttattattttagtgtattagttatgaagataatattatctatttgtaaattgctactttgtattttatgcatgctctgtaatttgatttttttttagttattgatttggattatattcacattctaataaacagttataggggga

SEQ ID NO: 321457 - DNA, 1892 bp, Homo sapiens
ggggtcggtccgaattcggctctctgggcagttcctacagatgaagcagagcttttgcagaaaagaatggtttgtcattcattgaaacttcggccctagactctacaaatgtagaagctgcttttcagacaattttaacagagatttaccgcattgtttctcagaagcaaatgtcagacagacgcgaaaatgacatgtctccaagcaacaatgtggttcctattcatgttccaccaaccactgaaaacaagccaaaggtgcagtgctgtcagaacatctaaggcatttctcttctcccctagaaggctgtgtatagtccatttcccaggtctgagatttaaatatatttgtaattcttgtgtcacttttgtgttttattacttcatacttatgaatttttccatgtcctaagtcttttgattttagctttataaaatcatccacttgtcccgaatgactgcagctttttttcatgctatggcttcactagccttagtttaataaactgaatgtttggattcctcagttattgtttacttttcatcatggaagcctgtcactgtatgtaggacataatagaacttgatcacttgaagctcagacctattggtcttgatcaaatcaaactaagaagaccttagaaataagctaccattttgccacagagcagcttataggtaatacactcttctctcagtgcagtgtacatttccacaaatctaagaattgccctataaacatagcaggattttgagagcttgaaaattttccattattctggacatgaatttctaaaatgccttaataggtttatgtagttgagtaaattttgttttttaatttttgtaagcatcaaagttgattagagaggggggcactttttctggagaattctcttagtaaacacaaaagattgttacggtttcattagtagtatggttgtggggccataagttaaacagtgctgcctggtaggctgggaactgaagagacttgtggtattccatctcgggtgcctctgttggcaatgatcaggcagcccaaaagatttaaatgatctataataatttccaagcggtagattatgtggcattttattgctcaggcaataattggtttaatgctggtagtgtcaaattttgaagtgttaattttgtcttagaaccttccagtaagtgaaatacaacctagttttatcaccatatccaccagcaggcatggataattattttaacaatgctaatatttgagttttgcagtatattatagaatatagtccagttaaatctttggtttcagtatgtctgaagagtacagtgagaggttaatttctgctcaagtggtaccacttaaaggcatgtattcttttagtatgtaaaatgaaatagtaccttgagtttaaatagaatgcatttaggcattgtagagatctgaaatagttttcttccactacattgttgaaatcaatgaagcaattagtttctcattcagaaatgtgcacactaatatttagttttgctttctcgtggataatattaagcacttactctgcagtttcctggaagttgtgtcaactgcagtgatactattcaggatggtgggaaatccccaaaaatatgtatgtgtgggcttgcttagattactatatttcatagttaatcttttgtctcttgcggtgctcatgatgtgtggggcacacggaaggcattgctgtagtcagtcattttggttttcttctatagccattttattattttagtgtattagttatgaagataatattatctatttgtaaattgctactttgtattttatgcatgctctgtaatttgatttttttttagttattgatttggattatattcacattctaataaacagttataggggga

SEQ ID NO: 321458 - DNA, 1873 bp, Homo sapiens
tcttagtggatcaagcagaaagaaatagctcagacctcagcaacttcaagaaagaaagaaaaaatagctgaagtgcaatggcatgatcttcgctcactgcaacctccgcctcctggattcaaagatttaccgcattgtttctcagaagcaaatgtcagacagacgcgaaaatgacatgtctccaagcaacaatgtggttcctattcatgttccaccaaccactgaaaacaagccaaaggtgcagtgctgtcagaacatctaaggcatttctcttctcccctagaaggctgtgtatagtccatttcccaggtctgagatttaaatatatttgtaattcttgtgtcacttttgtgttttattacttcatacttatgaatttttccatgtcctaagtcttttgattttagctttataaaatcatccacttgtcccgaatgactgcagctttttttcatgctatggcttcactagccttagtttaataaactgaatgtttggattcctcagttattgtttacttttcatcatggaagcctgtcactgtatgtaggacataatagaacttgatcacttgaagctcagacctattggtcttgatcaaatcaaactaagaagaccttagaaataagctaccattttgccacagagcagcttataggtaatacactcttctctcagtgcagtgtacatttccacaaatctaagaattgccctataaacatagcaggattttgagagcttgaaaattttccattattctggacatgaatttctaaaatgccttaataggtttatgtagttgagtaaattttgttttttaatttttgtaagcatcaaagttgattagagaggggggcactttttctggagaattctcttagtaaacacaaaagattgttacggtttcattagtagtatggttgtggggccataagttaaacagtgctgcctggtaggctgggaactgaagagacttgtggtattccatctcgggtgcctctgttggcaatgatcaggcagcccaaaagatttaaatgatctataataatttccaagcggtagattatgtggcattttattgctcaggcaataattggtttaatgctggtagtgtcaaattttgaagtgttaattttgtcttagaaccttccagtaagtgaaatacaacctagttttatcaccatatccaccagcaggcatggataattattttaacaatgctaatatttgagttttgcagtatattatagaatatagtccagttaaatctttggtttcagtatgtctgaagagtacagtgagaggttaatttctgctcaagtggtaccacttaaaggcatgtattcttttagtatgtaaaatgaaatagtaccttgagtttaaatagaatgcatttaggcattgtagagatctgaaatagttttcttccactacattgttgaaatcaatgaagcaattagtttctcattcagaaatgtgcacactaatatttagttttgctttctcgtggataatattaagcacttactctgcagtttcctggaagttgtgtcaactgcagtgatactattcaggatggtgggaaatccccaaaaatatgtatgtgtgggcttgcttagattactatatttcatagttaatcttttgtctcttgcggtgctcatgatgtgtggggcacacggaaggcattgctgtagtcagtcattttggttttcttctatagccattttattattttagtgtattagttatgaagataatattatctatttgtaaattgctactttgtattttatgcatgctctgtaatttgatttttttttagttattgatttggattatattcacattctaataaacagttataggggga

SEQ ID NO: 321459 - DNA, 2400 bp, Homo sapiens
aaatggcgcgagcggcagggaggggctcttcacccagtccggcagttgaagctcggcgctcgggttacccctgcagcgacgccccctggtcccacagataccactgctgctcccgccctttcgctcctcggccgcgcaatgggcacccgcgacgacgagtacgactacctctttaaagttgtccttattggagattctggtgttggaaagagtaatctcctgtctcgatttactcgaaatgagtttaatctggaaagcaagagcaccattggagtagagtttgcaacaagaagcatccaggttgatggaaaaacaataaaggcacagatatgggacacagcagggcaagagcgatatcgagctataacatcagcatattatcgtggagctgtaggtgccttattggtttatgacattgctaaacatctcacatatgaaaatgtagagcgatggctgaaagaactgagagatcatgctgatagtaacattgttatcatgcttgtgggcaataagagtgatctacgtcatctcagggcagttcctacagatgaagcaagagcttttgcagaaaagaatggtttgtcattcattgaaacttcggccctagactctacaaatgtagaagctgcttttcagacaattttaacagagatttaccgcattgtttctcagaagcaaatgtcagacagacgcgaaaatgacatgtctccaagcaacaatgtggttcctattcatgttccaccaaccactgaaaacaagccaaaggtgcagtgctgtcagaacatctaaggcatttctcttctcccctagaaggctgtgtatagtccatttcccaggtctgagatttaaatatatttgtaattcttgtgtcacttttgtgttttattacttcatacttatgaatttttccatgtcctaagtcttttgattttagctttataaaatcatccacttgtcccgaatgactgcagctttttttcatgctatggcttcactagccttagtttaataaactgaatgtttggattcctcagttattgtttacttttcatcatggaagcctgtcactgtatgtaggacataatagaacttgatcacttgaagctcagacctattggtcttgatcaaatcaaactaagaagaccttagaaataagctaccattttgccacagagcagcttataggtaatacactcttctctcagtgcagtgtacatttccacaaatctaagaattgccctataaacatagcaggattttgagagcttgaaaattttccattattctggacatgaatttctaaaatgccttaataggtttatgtagttgagtaaattttgttttttaatttttgtaagcatcaaagttgattagagaggggggcactttttctggagaattctcttagtaaacacaaaagattgttacggtttcattagtagtatggttgtggggccataagttaaacagtgctgcctggtaggctgggaactgaagagacttgtggtattccatctcgggtgcctctgttggcaatgatcaggcagcccaaaagatttaaatgatctataataatttccaagcggtagattatgtggcattttattgctcaggcaataattggtttaatgctggtagtgtcaaattttgaagtgttaattttgtcttagaaccttccagtaagtgaaatacaacctagttttatcaccatatccaccagcaggcatggataattattttaacaatgctaatatttgagttttgcagtatattatagaatatagtccagttaaatctttggtttcagtatgtctgaagagtacagtgagaggttaatttctgctcaagtggtaccacttaaaggcatgtattcttttagtatgtaaaatgaaatagtaccttgagtttaaatagaatgcatttaggcattgtagagatctgaaatagttttcttccactacattgttgaaatcaatgaagcaattagtttctcattcagaaatgtgcacactaatatttagttttgctttctcgtggataatattaagcacttactctgcagtttcctggaagttgtgtcaactgcagtgatactattcaggatggtgggaaatccccaaaaatatgtatgtgtgggcttgcttagattactatatttcatagttaatcttttgtctcttgcggtgctcatgatgtgtggggcacacggaaggcattgctgtagtcagtcattttggttttcttctatagccattttattattttagtgtattagttatgaagataatattatctatttgtaaattgctactttgtattttatgcatgctctgtaatttgatttttttttagttattgatttggattatattcacattctaataaacagttataggggga

SEQ ID NO: 321460 - DNA, 832 bp, Homo sapiens
tgtgtcactttggtgttttattacttcatacttatgaagcaagagctttgcagaaaagaatggtttgtcattcattgaaacttcggccctagactctacaaatgtagaagctgcttttcagacaattttaacagagatttaccgcattgtttctcagaagcaaatgtcagacagacgcgaaaatgacatgtctccaagcaacaatgtggttcctattcatgttccaccaaccactgaaaacaagccaaaggtgcagtgctgtcagaacatctaaggcatttctcttctcccctagaaggctgtgtatagtccatttcccaggtctgagatttaaatatatttgtaattcttgtgtcacttttgtgttttattacttcatacttatgaatttttccatgtcctaagtcttttgattttagctttataaaatcatccacttgtcccgaatgactgcagctttttttcatgctatggcttcactagccttagtttaataaactgaatgtttggattcctaaaaaaaaaaaaaaaaaaaaaaaatttggggggggcccgggccctaagaaagaaggtttcataaacaccacctcgggtggggcggccggcggccccagagtaggttaaggtagaccctgggccactcagggtgctcccaaaggaagagatccgcgggcacacgacacaagtcggcgggggattccccaccaaatataaaaagccgcgggggagcaccaccggcggttctggacaactccacagcggagtccgaggggcacacacggggccaacaacaagggggcccagggaggcaaataaataccgcgcgggagag

SEQ ID NO: 321461 - DNA, 1031 bp, Homo sapiens
aaatggcgcgagcggcagggaggggctcttcacccagtccggcagttgaagctcggcgctcgggttacccctgcagcgacgccccctggtcccacagataccactgctgctcccgccctttcgctcctcggccgcgcaatgggcacccgcgacgacgagtacgactacctctttaaagttgtccttattggagattctggtgttggaaagagtaatctcctgtctcgatttactcgaaatgagtttaatctggaaagcaagagcaccattggagtagagtttgcaacaagaagcatccaggttgatggaaaaacaataaaggcacagatatgggacacagcagggcaagagcgatatcgagctataacatcagcatattatcgtggagctgtaggtgccttattggtttatgacattgctaaacatctcacatatgaaaatgtagagcgatggctgaaagaactgagagatcatgctgatagtaacattgttatcatgcttgtgggcaataagagtgatctacgtcatctcagggcagttcctacagatgaagcaagagcttttgcagaaaagaatggtttgtcattcattgaaacttcggccctagactctacaaatgtagaagctgcttttcagacaattttaacagagatttaccgcattgtttctcagaagcaaatgtcagacagacgcgaaaatgacatgtctccaagcaacaatgtggttcctattcatgttccaccaaccactgaaaacaagccaaaggtgcagtgctgtcagaacatctaaggcatttctcttctcccctagaaggctgtgtatagtccatttcccaggtctgagatttaaatatatttgtaattcttgtgtcacttttgtgttttattacttcatacttatgaatttttccatgtcctaagtcttttgattttagctttataaaatcatccacttgtcccgaatgactgcagctttttttcatgctatggcttcactagccttagtttaataaactgaatgtttggattcct

SEQ ID NO: 321462 - DNA, 1347 bp, Homo sapiens
aaatggcgcgagcggcagggaggggctcttcacccagtccggcagttgaagctcggcgctcgggttacccctgcagcgacgccccctggtcccacagataccactgctgctcccgccctttcgctcctcggccgcgcaatgggcacccgcgacgacgagtacgactacctctttaaagttgtccttattggagattctggtgttggaaagagtaatctcctgtctcgatttactcgaaatgagtttaatctggaaagcaagagcaccattggagtagagtttgcaacaagaagcatccaggttgatggaaaaacaataaaggcacagatatgggacacagcagggcaagagcgatatcgagctataacatcagcatattatcgtggagctgtaggtgccttattggtttatgacattgctaaacatctcacatatgaaaatgtagagcgatggctgaaagaactgagagatcatgctgatagtaacattgttatcatgcttgtgggcaataagagtgatctacgtcatctcagggcagttcctacagatgaagcaagagcttttgcagaaaagaatggtttgtcattcattgaaacttcggccctagactctacaaatgtagaagctgcttttcagacaattttaacagagatttaccgcattgtttctcagaagcaaatgtcagacagacgcgaaaatgacatgtctccaagcaacaatgtggttcctattcatgttccaccaaccactgaaaacaagccaaaggtgcagtgctgtcagaacatctaaggcatttctcttctcccctagaaggctgtgtatagtccatttcccaggtctgagatttaaatatatttgtaattcttgtgtcacttttgtgttttattacttcatacttatgaatttttccatgtcctaagtcttttgattttagctttataaaatcatccacttgtcccgaatgactgcagctttttttcatgctatggcttcactagccttagtttaataaactgaatgtttggattcctaaaaaaaaaaaaaaaaaaaaaaaatttggggggggcccgggccctaagaaagaaggtttcataaacaccacctcgggtggggcggccggcggccccagagtaggttaaggtagaccctgggccactcagggtgctcccaaaggaagagatccgcgggcacacgacacaagtcggcgggggattccccaccaaatataaaaagccgcgggggagcaccaccggcggttctggacaactccacagcggagtccgaggggcacacacggggccaacaacaagggggcccagggaggcaaataaataccgcgcgggagag

SEQ ID NO: 321463 - DNA, 2266 bp, Homo sapiens
atctagaggatcccgttcactttctacacgatacccctttaaagttgtccttattggagattctggtgttggaaagagtaatctcctgtctcgatttactcgaaatgagtttaatctggaaagcaagagcaccattggagtagagtttgcaacaagaagcatccaggttgatggaaaaacaataaaggcacagatatgggacacagcagggcaagagcgatatcgagctataacatcagcatattatcgtggagctgtaggtgccttattggtttatgacattgctaaacatctcacatatgaaaatgtagagcgatggctgaaagaactgagagatcatgctgatagtaacattgttatcatgcttgtgggcaataagagtgatctacgtcatctcagggcagttcctacagatgaagcaagagcttttgcagaaaagaatggtttgtcattcattgaaacttcggccctagactctacaaatgtagaagctgcttttcagacaattttaacagagatttaccgcattgtttctcagaagcaaatgtcagacagacgcgaaaatgacatgtctccaagcaacaatgtggttcctattcatgttccaccaaccactgaaaacaagccaaaggtgcagtgctgtcagaacatctaaggcatttctcttctcccctagaaggctgtgtatagtccatttcccaggtctgagatttaaatatatttgtaattcttgtgtcacttttgtgttttattacttcatacttatgaatttttccatgtcctaagtcttttgattttagctttataaaatcatccacttgtcccgaatgactgcagctttttttcatgctatggcttcactagccttagtttaataaactgaatgtttggattcctcagttattgtttacttttcatcatggaagcctgtcactgtatgtaggacataatagaacttgatcacttgaagctcagacctattggtcttgatcaaatcaaactaagaagaccttagaaataagctaccattttgccacagagcagcttataggtaatacactcttctctcagtgcagtgtacatttccacaaatctaagaattgccctataaacatagcaggattttgagagcttgaaaattttccattattctggacatgaatttctaaaatgccttaataggtttatgtagttgagtaaattttgttttttaatttttgtaagcatcaaagttgattagagaggggggcactttttctggagaattctcttagtaaacacaaaagattgttacggtttcattagtagtatggttgtggggccataagttaaacagtgctgcctggtaggctgggaactgaagagacttgtggtattccatctcgggtgcctctgttggcaatgatcaggcagcccaaaagatttaaatgatctataataatttccaagcggtagattatgtggcattttattgctcaggcaataattggtttaatgctggtagtgtcaaattttgaagtgttaattttgtcttagaaccttccagtaagtgaaatacaacctagttttatcaccatatccaccagcaggcatggataattattttaacaatgctaatatttgagttttgcagtatattatagaatatagtccagttaaatctttggtttcagtatgtctgaagagtacagtgagaggttaatttctgctcaagtggtaccacttaaaggcatgtattcttttagtatgtaaaatgaaatagtaccttgagtttaaatagaatgcatttaggcattgtagagatctgaaatagttttcttccactacattgttgaaatcaatgaagcaattagtttctcattcagaaatgtgcacactaatatttagttttgctttctcgtggataatattaagcacttactctgcagtttcctggaagttgtgtcaactgcagtgatactattcaggatggtgggaaatccccaaaaatatgtatgtgtgggcttgcttagattactatatttcatagttaatcttttgtctcttgcggtgctcatgatgtgtggggcacacggaaggcattgctgtagtcagtcattttggttttcttctatagccattttattattttagtgtattagttatgaagataatattatctatttgtaaattgctactttgtattttatgcatgctctgtaatttgatttttttttagttattgatttggattatattcacattctaataaacagttataggggga

SEQ ID NO: 321464 - DNA, 2346 bp, Homo sapiens
aaatggcgcgagcggcagggaggggctcttcacccagtccggcagttgaagctcggcgctcgggttacccctgcagcgacgccccctggtcccacagataccactgctgctcccgccctttcgctcctcggccgcgcaatgggcacccgcgacgacgagtacgactacctctttaaagttgtccttattggagattctggtgttggaaagagtaatctcctgtctcgatttactcgaaatgagtttaatctggaaagcaagagcaccattggagtagagtttgcaacaagaagcatccaggttgatggaaaaacaataaaggcacagatatgggacacagcagggcaagagcgatatcgagctataacatcagcatattatcgtggagctgtaggtgccttattggtttatgacattgctaaacatctcacatatgatatcatgcttgtgggcaataagagtgatctacgtcatctcagggcagttcctacagatgaagcaagagcttttgcagaaaagaatggtttgtcattcattgaaacttcggccctagactctacaaatgtagaagctgcttttcagacaattttaacagagatttaccgcattgtttctcagaagcaaatgtcagacagacgcgaaaatgacatgtctccaagcaacaatgtggttcctattcatgttccaccaaccactgaaaacaagccaaaggtgcagtgctgtcagaacatctaaggcatttctcttctcccctagaaggctgtgtatagtccatttcccaggtctgagatttaaatatatttgtaattcttgtgtcacttttgtgttttattacttcatacttatgaatttttccatgtcctaagtcttttgattttagctttataaaatcatccacttgtcccgaatgactgcagctttttttcatgctatggcttcactagccttagtttaataaactgaatgtttggattcctcagttattgtttacttttcatcatggaagcctgtcactgtatgtaggacataatagaacttgatcacttgaagctcagacctattggtcttgatcaaatcaaactaagaagaccttagaaataagctaccattttgccacagagcagcttataggtaatacactcttctctcagtgcagtgtacatttccacaaatctaagaattgccctataaacatagcaggattttgagagcttgaaaattttccattattctggacatgaatttctaaaatgccttaataggtttatgtagttgagtaaattttgttttttaatttttgtaagcatcaaagttgattagagaggggggcactttttctggagaattctcttagtaaacacaaaagattgttacggtttcattagtagtatggttgtggggccataagttaaacagtgctgcctggtaggctgggaactgaagagacttgtggtattccatctcgggtgcctctgttggcaatgatcaggcagcccaaaagatttaaatgatctataataatttccaagcggtagattatgtggcattttattgctcaggcaataattggtttaatgctggtagtgtcaaattttgaagtgttaattttgtcttagaaccttccagtaagtgaaatacaacctagttttatcaccatatccaccagcaggcatggataattattttaacaatgctaatatttgagttttgcagtatattatagaatatagtccagttaaatctttggtttcagtatgtctgaagagtacagtgagaggttaatttctgctcaagtggtaccacttaaaggcatgtattcttttagtatgtaaaatgaaatagtaccttgagtttaaatagaatgcatttaggcattgtagagatctgaaatagttttcttccactacattgttgaaatcaatgaagcaattagtttctcattcagaaatgtgcacactaatatttagttttgctttctcgtggataatattaagcacttactctgcagtttcctggaagttgtgtcaactgcagtgatactattcaggatggtgggaaatccccaaaaatatgtatgtgtgggcttgcttagattactatatttcatagttaatcttttgtctcttgcggtgctcatgatgtgtggggcacacggaaggcattgctgtagtcagtcattttggttttcttctatagccattttattattttagtgtattagttatgaagataatattatctatttgtaaattgctactttgtattttatgcatgctctgtaatttgatttttttttagttattgatttggattatattcacattctaataaacagttataggggga

SEQ ID NO: 321465 - DNA, 2277 bp, Homo sapiens
aaatggcgcgagcggcagggaggggctcttcacccagtccggcagttgaagctcggcgctcgggttacccctgcagcgacgccccctggtcccacagataccactgctgctcccgccctttcgctcctcggccgcgcaatgggcacccgcgacgacgagtacgactacctctttaaagttgtccttattggagattctggtgttggaaagagtaatctcctgtctcgatttactcgaaatgagtttaatctggaaagcaagagcaccattggagtagagtttgcaacaagaagcatccaggttgatggaaaaacaataaaggcacagatatgggacacagcagggcaagagcgatatcgagctataacatcagcatattatcgtggagctgtaggtgccttattggtttatgacattgctaaacatctcacatatgaaaatgtagagcgatggctgaaagaactgagagatcatgctgatagtaacattgttatcatgcttgtgggcaataagagtgatctacgtcatctcagggcagttcctacagatgaacaaatgtcagacagacgcgaaaatgacatgtctccaagcaacaatgtggttcctattcatgttccaccaaccactgaaaacaagccaaaggtgcagtgctgtcagaacatctaaggcatttctcttctcccctagaaggctgtgtatagtccatttcccaggtctgagatttaaatatatttgtaattcttgtgtcacttttgtgttttattacttcatacttatgaatttttccatgtcctaagtcttttgattttagctttataaaatcatccacttgtcccgaatgactgcagctttttttcatgctatggcttcactagccttagtttaataaactgaatgtttggattcctcagttattgtttacttttcatcatggaagcctgtcactgtatgtaggacataatagaacttgatcacttgaagctcagacctattggtcttgatcaaatcaaactaagaagaccttagaaataagctaccattttgccacagagcagcttataggtaatacactcttctctcagtgcagtgtacatttccacaaatctaagaattgccctataaacatagcaggattttgagagcttgaaaattttccattattctggacatgaatttctaaaatgccttaataggtttatgtagttgagtaaattttgttttttaatttttgtaagcatcaaagttgattagagaggggggcactttttctggagaattctcttagtaaacacaaaagattgttacggtttcattagtagtatggttgtggggccataagttaaacagtgctgcctggtaggctgggaactgaagagacttgtggtattccatctcgggtgcctctgttggcaatgatcaggcagcccaaaagatttaaatgatctataataatttccaagcggtagattatgtggcattttattgctcaggcaataattggtttaatgctggtagtgtcaaattttgaagtgttaattttgtcttagaaccttccagtaagtgaaatacaacctagttttatcaccatatccaccagcaggcatggataattattttaacaatgctaatatttgagttttgcagtatattatagaatatagtccagttaaatctttggtttcagtatgtctgaagagtacagtgagaggttaatttctgctcaagtggtaccacttaaaggcatgtattcttttagtatgtaaaatgaaatagtaccttgagtttaaatagaatgcatttaggcattgtagagatctgaaatagttttcttccactacattgttgaaatcaatgaagcaattagtttctcattcagaaatgtgcacactaatatttagttttgctttctcgtggataatattaagcacttactctgcagtttcctggaagttgtgtcaactgcagtgatactattcaggatggtgggaaatccccaaaaatatgtatgtgtgggcttgcttagattactatatttcatagttaatcttttgtctcttgcggtgctcatgatgtgtggggcacacggaaggcattgctgtagtcagtcattttggttttcttctatagccattttattattttagtgtattagttatgaagataatattatctatttgtaaattgctactttgtattttatgcatgctctgtaatttgatttttttttagttattgatttggattatattcacattctaataaacagttataggggga

SEQ ID NO: 321466 - DNA, 572 bp, Homo sapiens
gatcaaggatctccaaagatctttgagcatcacctcttttacttggggctggtcatgtaggcgcccccttcctggcacataacaaaatttccagactcccagaaggaaaggtgttcagcgtaaactgtattggtttgcatgaacggtttaggcacagtgaaccactgataccaggtagggagcggtgggaaccttcctgaattccaagttcccagacaccagccaaggagccgaccttggaagcaggcctttccaagggttgtagtttcagtctcctaggcttacacttctctgcacatatggaaactgggttggttatgcagggttctctgagaagctttctgtaaggagcagtgtcgtttttgcttacccaggatttattccccctttcatttatttcatttattcaccagatagttttagtactgtttaaggtattggggatataccaaggaataaaacaagattcctggagggagaggggaacggacagcaaacaatagacacaatacgatcgtgaggtatatagttaatgttggtgatgctcaaagatcttgggggtaccgagctcg

SEQ ID NO: 321467 - DNA, 103 bp, Homo sapiens
gcgtgagccaccacacctcacccctcctttttcttgttcccattctttctgtcagagatctttctgcctctgccagaagcccttctttttggcctttctttcc

SEQ ID NO: 321468 - DNA, 348 bp, Homo sapiens
cagccaaatgaggatctctgtaggaatggaagaaatcacacactctgctccaggagcctctgtttgccaggtcacattgctttactctggatttctaccatttgatcgaaggtcagtccagagacttgaggcccactgtggtgctgcagatggcccagtcttgccagggaaatgtgtccccttgtgtttttgccagctgcggatctgaagatgagatgtttgcatctctaacacctcactttttgtgccaaaccaggcctgcactgcaaggaatccccctacctgaacccctcttgccactgccttctaccttgtttgaaacctgaatcctaataaagaattaataac

SEQ ID NO: 321469 - DNA, 3899 bp, Homo sapiens
gttgctggttgttagtctaccaaccactcaacttcatgcataacttataatcaggaagcatggccttaacggtttttcttcgcttccttgacagcctggctgcaacaattcattcattagtcgcattccatgaggcgtggcctctgttttacctgttttcgttgttactgccacaatgtccaccaggtggtgctgttccacttctaaccgaatgaatcgcaaccgagtagggaactttatgcatgattcataagtaggcgcggcccgcttgcatccgggtttctgggggtggggcccaaggttttgttccggccccaggctcagcgtccgccatcttgtgtcggcggctcggctgtaaggaggtggcagggacaaccacaaccacaacggccgggggaggagaaggcggcagcggcgattctaggcggcccaggcggcggggaggaggagaaggaggagggtggcggccgggcttggcttcggctccttgaggagttggcggcggcgcgacccggggaaccggcattgatgtccagctcgccgctgtccaagaaacgtcgcgtgtccgggcctgatccaaagccgggttctaactgctcccctgcccagtccgtgttgtccgaagtgccctcggtgccaaccaacggaatggccaagaacggcagtgaagcagacatagacgagggcctttactcccggcagctgtatgtgttgggccatgaggcaatgaagcggctccagacatccagtgtcctggtatcaggcctgcggggcctgggcgtggagatcgctaagaacatcatccttggtggggtcaaggctgttaccctacatgaccagggcactgcccagtgggctgatctttcctcccagttctacctgcgggaggaggacatcggtaaaaaccgggccgaggtatcacagccccgcctcgctgagctcaacagctatgtgcctgtcactgcctacactggacccctcgttgaggacttccttagtggtttccaggtggtggtgctcaccaacacccccctggaggaccagctgcgagtgggtgagttctgtcacaaccgtggcatcaagctggtggtggcagacacgcggggcctgtttgggcagctcttctgtgactttggagaggaaatgatcctcacagattccaatggggagcagccactcagtgctatggtttctatggttaccaaggacaaccccggtgtggttacctgcctggatgaggcccgacacgggtttgagagcggggactttgtctccttttcagaagtacagggcatggttgaactcaacggaaatcagcccatggagatcaaagtcctgggtccttatacctttagcatctgtgacacctccaacttctccgactacatccgtggaggcatcgtcagtcaggtcaaagtacctaagaagattagctttaaatccttggtggcctcactggcagaacctgactttgtggtgacggacttcgccaagttttctcgccctgcccagctgcacattggcttccaggccctgcaccagttctgtgctcagcatggccggccacctcggccccgcaatgaggaggatgcagcagaactggtagccttagcacaggctgtgaatgctcgagccctgccagcagtgcagcaaaataacctggacgaggacctcatccggaagctggcatatgtggctgctggggatctggcacccataaacgccttcattgggggcctggctgcccaggaagtcatgaaggcctgctccgggaagttcatgcccatcatgcagtggctatactttgatgcccttgagtgtctccctgaggacaaagaggtcctcacagaggacaagtgcctccagcgccagaaccgttatgacgggcaagtggctgtgtttggctcagacctgcaagagaagctgggcaagcagaagtatttcctggtgggtgcgggggccattggctgtgagctgctcaagaactttgccatgattgggctgggctgcggggagggtggagaaatcatcgttacagacatggacaccattgagaagtcaaatctgaatcgacagtttcttttccggccctgggatgtcacgaagttaaagtctgacacggctgctgcagctgtgcgccaaatgaatccacatatccgggtgacaagccaccagaaccgtgtgggtcctgacacggagcgcatctatgatgacgattttttccaaaacctagatggcgtggccaatgccctggacaacgtggatgcccgcatgtacatggaccgccgctgtgtctactaccggaagccactgctggagtcaggcacactgggcaccaaaggcaatgtgcaggtggtgatccccttcctgacagagtcgtacagttccagccaggacccacctgagaagtccatccccatctgtaccctgaagaacttccctaatgccatcgagcacaccctgcagtgggctcgggatgagtttgaaggcctcttcaagcagccagcagaaaatgtcaaccagtacctcacagaccccaagtttgtggagcgaacactgcggctggcaggcactcagcccttggaggtgctggaggctgtgcagcgcagcctggtgctgcagcgaccacagacctgggctgactgcgtgacctgggcctgccaccactggcacacccagtactcgaacaacatccggcagctgctgcacaacttccctcctgaccagctcacaagctcaggagcgccgttctggtctgggcccaaacgctgtccacacccgctcacctttgatgtcaacaatcccctgcatctggactatgtgatggctgctgccaacctgtttgcccagacctacgggctgacaggctctcaggaccgagctgctgtggccacattcctgcagtctgtgcaggtccccgaattcacccccaagtctggcgtcaagatccatgtttctgaccaggagctgcagagcgccaatgcctctgttgatgacagtcgtctagaggagctcaaagccactctgcccagcccagacaagctccctggattcaagatgtaccccattgactttgagaaggatgatgacagcaactttcatatggatttcatcgtggctgcatccaacctccgggcagaaaactatgacattccttctgcagaccggcacaagagcaagctgattgcagggaagatcatcccagccattgccacgaccacagcagccgtggttggccttgtgtgtctggagctgtacaaggttgtgcaggggcaccgacagcttgactcctacaagaatggtttcctcaacttggccctgcctttctttggtttctctgaaccccttgccgcaccacgtcaccagtactataaccaagagtggacattgtgggatcgctttgaggtacaagggctgcagcctaatggtgaggagatgaccctcaaacagttcctcgactattttaagacagagcacaaattagagatcaccatgctgtcccagggcgtgtccatgctctattccttcttcatgccagctgccaagctcaaggaacggttggatcagccgatgacagagattgtgagccgtgtgtcgaagcgaaagctgggccgccacgtgcgggcgctggtgcttgagctgtgctgtaacgacgagagcggcgaggatgtcgaggttccctatgtccgatacaccatccgctgaccccgtctgctcctctaggctggccccttgtccacccctctccacaccccttccagcccagggttcccatttggcttctggcagtggcccaactagccaagtctggtgttccctcatcatccccctacctgaacccctcttgccactgccttctaccttgtttgaaacctgaatcctaataaagaattaataac

SEQ ID NO: 321470 - DNA, 1114 bp, Homo sapiens
  misc_feature (963)..(964): n is a, c, g, or t
  misc_feature (966)..(966): n is a, c, g, or t
  misc_feature (978)..(978): n is a, c, g, or t
tgggccgtaccacaacctgtagggtcatctgggtctgaaacgggcaccagcgacgcgggagcagggactgacgcccctctagcaaagcatctgtggtacatcccagacccggggctctccaaggccccgcgcttccgagctccgcgcaaactctggcttctcttgtacgacagaggtggtttgctcttccgttgccccgtggcttcagctcatctttggcaggaaggcgaggcttccgcccggcacaggggatgtccagctcgccgctgtccaagaaacgtcgcgtgtccgggcctgatccaaagccgggttctaactgctcccctgcccagtccgtgttgtccgaagtgccctcggtgccaaccaacggaatggccaagaacggcagtgaagcagacatagacgagggcctttactcccggcagctgtatgtgttgggccatgaggcaatgaagcggctccagacatccagtgtcctggtatcaggcctgcggggcctgggcgtggagatcgctaagaacatcatccttggtggggtcaaggctgttaccctacatgaccagggcactgcccagtgggctgatctttcctcccagttctacctgcgggaggaggacatcggtaaaaaccgggccgaggtatcacagccccgcctcgctgagctcaacagctatgtgcctgtcactgcctacactggacccctcgttgaggacttccttagtggtttccaggtggtggtgctcaccaacacccccctggaggaccagctgcgagtgggtgagttctgtcacaaccgtggcatcaagctggtggtggcagacacgcggggcctgtttgggcagctcttctgtgactttggagaggaaatgatcctcacagattccaatggggagcagccactcagtgctatggtttctatggttaccaagacaacccggggtggttactgctggatgaggccgnnangggttgagacgngacttgtcctttcgaagtacaggctggtggctcacggattagcctgggacaagccgggcttaccttagttggaactccatttcgaatcgggggttgcatcaggaaggccaaaattaactggcgccggaccgtgtgg

SEQ ID NO: 321471 - DNA, 3622 bp, Homo sapiens
tgggccgtaccacaacctgtagggtcatctgggtctgaaacgggcaccagcgacgcgggagcagggactgacgcccctctagcaaagcatctgtggtacatcccagacccggggctctccaaggccccgcgcttccgagctccgcgcaaactctggcttctcttgtacgacagaggtggtttgctcttccgttgccccgtggcttcagctcatctttggcaggaaggcgaggcttccgcccggcacaggggatgtccagctcgccgctgtccaagaaacgtcgcgtgtccgggcctgatccaaagccgggttctaactgctcccctgcccagtccgtgttgtccgaagtgccctcggtgccaaccaacggaatggccaagaacggcagtgaagcagacatagacgagggcctttactcccggcagctgtatgtgttgggccatgaggcaatgaagcggctccagacatccagtgtcctggtatcaggcctgcggggcctgggcgtggagatcgctaagaacatcatccttggtggggtcaaggctgttaccctacatgaccagggcactgcccagtgggctgatctttcctcccagttctacctgcgggaggaggacatcggtaaaaaccgggccgaggtatcacagccccgcctcgctgagctcaacagctatgtgcctgtcactgcctacactggacccctcgttgaggacttccttagtggtttccaggtggtggtgctcaccaacacccccctggaggaccagctgcgagtgggtgagttctgtcacaaccgtggcatcaagctggtggtggcagacacgcggggcctgtttgggcagctcttctgtgactttggagaggaaatgatcctcacagattccaatggggagcagccactcagtgctatggtttctatggttaccaaggacaaccccggtgtggttacctgcctggatgaggcccgacacgggtttgagagcggggactttgtctccttttcagaagtacagggcatggttgaactcaacggaaatcagcccatggagatcaaagtcctgggtccttatacctttagcatctgtgacacctccaacttctccgactacatccgtggaggcatcgtcagtcaggtcaaagtacctaagaagattagctttaaatccttggtggcctcactggcagaacctgactttgtggtgacggacttcgccaagttttctcgccctgcccagctgcacattggcttccaggccctgcaccagttctgtgctcagcatggccggccacctcggccccgcaatgaggaggatgcagcagaactggtagccttagcacaggctgtgaatgctcgagccctgccagcagtgcagcaaaataacctggacgaggacctcatccggaagctggcatatgtggctgctggggatctggcacccataaacgccttcattgggggcctggctgcccaggaagtcatgaaggcctgctccgggaagttcatgcccatcatgcagtggctatactttgatgcccttgagtgtctccctgaggacaaagaggtcctcacagaggacaagtgcctccagcgccagaaccgttatgacgggcaagtggctgtgtttggctcagacctgcaagagaagctgggcaagcagaagtatttcctggtgggtgcgggggccattggctgtgagctgctcaagaactttgccatgattgggctgggctgcggggagggtggagaaatcatcgttacagacatggacaccattgagaagtcaaatctgaatcgacagtttcttttccggccctgggatgtcacgaagttaaagtctgacacggctgctgcagctgtgcgccaaatgaatccacatatccgggtgacaagccaccagaaccgtgtgggtcctgacacggagcgcatctatgatgacgattttttccaaaacctagatggcgtggccaatgccctggacaacgtggatgcccgcatgtacatggaccgccgctgtgtctactaccggaagccactgctggagtcaggcacactgggcaccaaaggcaatgtgcaggtggtgatccccttcctgacagagtcgtacagttccagccaggacccacctgagaagtccatccccatctgtaccctgaagaacttccctaatgccatcgagcacaccctgcagtgggctcgggatgagtttgaaggcctcttcaagcagccagcagaaaatgtcaaccagtacctcacagaccccaagtttgtggagcgaacactgcggctggcaggcactcagcccttggaggtgctggaggctgtgcagcgcagcctggtgctgcagcgaccacagacctgggctgactgcgtgacctgggcctgccaccactggcacacccagtactcgaacaacatccggcagctgctgcacaacttccctcctgaccagctcacaagctcaggagcgccgttctggtctgggcccaaacgctgtccacacccgctcacctttgatgtcaacaatcccctgcatctggactatgtgatggctgctgccaacctgtttgcccagacctacgggctgacaggctctcaggaccgagctgctgtggccacattcctgcagtctgtgcaggtccccgaattcacccccaagtctggcgtcaagatccatgtttctgaccaggagctgcagagcgccaatgcctctgttgatgacagtcgtctagaggagctcaaagccactctgcccagcccagacaagctccctggattcaagatgtaccccattgactttgagaaggatgatgacagcaactttcatatggatttcatcgtggctgcatccaacctccgggcagaaaactatgacattccttctgcagaccggcacaagagcaagctgattgcagggaagatcatcccagccattgccacgaccacagcagccgtggttggccttgtgtgtctggagctgtacaaggttgtgcaggggcaccgacagcttgactcctacaagaatggtttcctcaacttggccctgcctttctttggtttctctgaaccccttgccgcaccacgtcaccagtactataaccaagagtggacattgtgggatcgctttgaggtacaagggctgcagcctaatggtgaggagatgaccctcaaacagttcctcgactattttaagacagagcacaaattagagatcaccatgctgtcccagggcgtgtccatgctctattccttcttcatgccagctgccaagctcaaggaacggttggatcagccgatgacagagattgtgagccgtgtgtcgaagcgaaagctgggccgccacgtgcgggcgctggtgcttgagctgtgctgtaacgacgagagcggcgaggatgtcgaggttccctatgtccgatacaccatccgctgaccccgtctgctcctctaggctggccccttgtccacccctctccacaccccttccagcccagggttcccatttggcttctggcagtggcccaactagccaagtctggtgttccctcatcatccccctacctgaacccctcttgccactgccttctaccttgtttgaaacctgaatcctaataaagaattaataac

SEQ ID NO: 321472 - DNA, 790 bp, Homo sapiens
tgatgaggtcctccccgcgcctggagcggaggactgcgagactggacacgtcgggggcccagatgtttctagggagaggagcctcccagctcaggctagggaagggacaccggagcccagctcttcctgagctgacgaggcgccacccggcctttattcattattcataataaggtggggctgtggtaggcggcagtttttttgcctctttcgcacctggtccgctgaaggttctcggcttgtgaattattcacgaggggcggatcagcgtgccgaagggacgtgctgaaggggcgttctgaagtctgccgcgcaaacgagttcattgatgattcgcaaaagttaagtagcaccctgagttttcagtggcttttctaggggttccgtgcttaattcatgaggagcgtggcttttgcagctttgtctgcgtgatccgcggttagctttcccttgcaggtaccagagttaaaacctggcgtctagcaaagggatgaggcctcctacatggttcatttcttatggcctggtaatcccagataatcagccggctctggattcaaatcccatcgatcctttccagttgtgtgatctttggcaaatcgtttgtaagcctgaataatgggtatgaggataacgataagattagcttacactcgtttagctacttagcgcatttaatcttcacgacaatcctaggaggtaggtcattattaccccgcactttatacgataaggaaacctgggaccacaggaaggctaagtaatttgcctaaggtcacacaatcagtga

SEQ ID NO: 321473 - DNA, 271 bp, Homo sapiens
gacactggccaggctaggggaggccctgtatgggttggggagcctcatcatccagctgtcccactccagttcactgcccctacctacctgcccatcctctcttgctttctgccctcctgaccctatactcccatccccctatccccaggatgacagagattgtgagccgtgtgtcgaagcgaaagctgggccacaccacgccggcccagcattcacacttagctagcacagttcacgacatccggtacaccagctcaattgtatctgtctc

SEQ ID NO: 321474 - DNA, 2537 bp, Homo sapiens
  misc_feature (25)..(25): n is a, c, g, or t
ccacgctggtacgcccccgggtatntgggatatcgtcgaccagcgccgtcgctgactttgtggtgacggacttcgccaagttttctcgccctgcccagctgcacattggcttccaggccctgcaccagttctgtgctcagcatggccggccacctcggccccgcaatgaggaggatgcagcagaactggtagccttagcacaggctgtgaatgctcgagccctgccagcagtgcagcaaaataacctggacgaggacctcatccggaagctggcatatgtggctgctggggatctggcacccataaacgccttcattgggggcctggctgcccaggaagtcatgaaggcctgctccgggaagttcatgcccatcatgcagtggctatactttgatgcccttgagtgtctccctgaggacaaagaggtcctcacagaggacaagtgcctccagcgccagaaccgttatgacgggcaagtggctgtgtttggctcagacctgcaagagaagctgggcaagcagaagtatttcctggtgggtgcgggggccattggctgtgagctgctcaagaactttgccatgattgggctgggctgcggggagggtggagaaatcatcgttacagacatggacaccattgagaagtcaaatctgaatcgacagtttcttttccggccctgggatgtcacgaagttaaagtctgacacggctgctgcagctgtgcgccaaatgaatccacatatccgggtgacaagccaccagaaccgtgtgggtcctgacacggagcgcatctatgatgacgattttttccaaaacctagatggcgtggccaatgccctggacaacgtggatgcccgcatgtacatggaccgccgctgtgtctactaccggaagccactgctggagtcaggcacactgggcaccaaaggcaatgtgcaggtggtgatccccttcctgacagagtcgtacagttccagccaggacccacctgagaagtccatccccatctgtaccctgaagaacttccctaatgccatcgagcacaccctgcagtgggctcgggatgagtttgaaggcctcttcaagcagccagcagaaaatgtcaaccagtacctcacagaccccaagtttgtggagcgaacactgcggctggcaggcactcagcccttggaggtgctggaggctgtgcagcgcagcctggtgctgcagcgaccacagacctgggctgactgcgtgacctgggcctgccaccactggcacacccagtactcgaacaacatccggcagctgctgcacaacttccctcctgaccagctcacaagctcaggagcgccgttctggtctgggcccaaacgctgtccacacccgctcacctttgatgtcaacaatcccctgcatctggactatgtgatggctgctgccaacctgtttgcccagacctacgggctgacaggctctcaggaccgagctgctgtggccacattcctgcagtctgtgcaggtccccgaattcacccccaagtctggcgtcaagatccatgtttctgaccaggagctgcagagcgccaatgcctctgttgatgacagtcgtctagaggagctcaaagccactctgcccagcccagacaagctccctggattcaagatgtaccccattgactttgagaaggatgatgacagcaactttcatatggatttcatcgtggctgcatccaacctccgggcagaaaactatgacattccttctgcagaccggcacaagagcaagctgattgcagggaagatcatcccagccattgccacgaccacagcagccgtggttggccttgtgtgtctggagctgtacaaggttgtgcaggggcaccgacagcttgactcctacaagaatggtttcctcaacttggccctgcctttctttggtttctctgaaccccttgccgcaccacgtcaccagtactataaccaagagtggacattgtgggatcgctttgaggtacaagggctgcagcctaatggtgaggagatgaccctcaaacagttcctcgactattttaagacagagcacaaattagagatcaccatgctgtcccagggcgtgtccatgctctattccttcttcatgccagctgccaagctcaaggaacggttggatcagccgatgacagagattgtgagccgtgtgtcgaagcgaaagctgggccgccacgtgcgggcgctggtgcttgagctgtgctgtaacgacgagagcggcgaggatgtcgaggttccctatgtccgatacaccatccgctgaccccgtctgctcctctaggctggccccttgtccacccctctccacaccccttccagcccagggttcccatttggcttctggcagtggcccaactagccaagtctggtgttccctcatcatccccctacctgaacccctcttgccactgccttctaccttgtttgaaacctgaatcctaataaagaattaataactcccacatcgcctgccctgctggttccagggaaggaagggacttcctggagc

SEQ ID NO: 321475 - DNA, 3339 bp, Homo sapiens
gatcaaggatctccaaagatctttgagcatcacctcttttacttggggctggtcatgtaggcgcccccttcctggcacataacaaaatttccagactcccagaaggaaaggtgttcagcgtaaactgtattggtttgcatgaacggtttaggcacagtgaaccactgataccaggtagggagcggtgggaaccttcctgaattccaagttcccagacaccagccaaggagccgaccttggaagcaggcctttccaagggttgtagtttcagtctcctaggcttacacttctctgcacatatggaaactgggttggttatgcagggttctctgagaagctttctgtaaggagcagtgtcgtttttgcttacccaggatttattccccctttcatttatttcatttattcaccagatagttttagtactgtttaaggtattggggatataccaaggaataaaacaagattcctggagggagaggggaacggacagcaaacaatagacacaatacgatcgtgaggtatatagttaatgttggtgatgagtgctcctcaaaggaaacaactaaaaccagacaagggaagtcggggtgtcagggagaatggtttgtagtattgatgacaatggttaaggaaggcctgagttctgcaaagacctcaaggatatgagggactagagtgccttctgctgtggaagagcctgcgcaaagatcctgaggtgggaggggtcagggagccaactcattttacggtaagtggaggtgggatccaggggaggattctgagcagaggagggacgtggcccaatttgggctttgaaaggatcctgcttgtctgtgtgccagcatcctggtggtggttgggggagtctgcatcaatcctgggtgctgttacctgaaaaaatagcaggtgttagacgaaagaacagatgtctggcccattgtttccagtctgttcctgtccacagcttccctttatgctgagcccctgccacatgcatcatcatcctggccatgtggcattgtcacagaccgtctctcctgctagcctcctaactcagggcctgggtcttccccagcattaagtaaatcagtctcaggcagacagccctttataggtgtttgggccaggtgcggtggctcacgcctgtaatcccagctctttgtggggccgaggtctttgagctcaggagttcaagaccagcctgggcagcatgacaaaaccctgtctctaccaaaaatacaaaaattagccacgcatggtggcacacacctgtggtcccagctactcgggaggctgaggtgggaggatcgctggagcctgggaagttgaggctgcagtgagccgtgatcatgccactgcattccagcctgtgtgatggagagagaccctgtctcaaaaaaaataaagatgtttgttgggtgaatgcacaaataagtgagctttgttcccccatccccaccctggaactgcactttcttaaccctttagaagttaaagtctgacacggctgctgcagctgtgcgccaaatgaatccacatatccgggtgacaagccaccagaaccgtgtgggtcctgacacggagcgcatctatgatgacgattttttccaaaacctagatggcgtggccaatgccctggacaacgtggatgcccgcatgtacatggaccgccgctgtgtctactaccggaagccactgctggagtcaggcacactgggcaccaaaggcaatgtgcaggtggtgatccccttcctgacagagtcgtacagttccagccaggacccacctgagaagtccatccccatctgtaccctgaagaacttccctaatgccatcgagcacaccctgcagtgggctcgggatgagtttgaaggcctcttcaagcagccagcagaaaatgtcaaccagtacctcacagaccccaagtttgtggagcgaacactgcggctggcaggcactcagcccttggaggtgctggaggctgtgcagcgcagcctggtgctgcagcgaccacagacctgggctgactgcgtgacctgggcctgccaccactggcacacccagtactcgaacaacatccggcagctgctgcacaacttccctcctgaccagctcacaagctcaggagcgccgttctggtctgggcccaaacgctgtccacacccgctcacctttgatgtcaacaatcccctgcatctggactatgtgatggctgctgccaacctgtttgcccagacctacgggctgacaggctctcaggaccgagctgctgtggccacattcctgcagtctgtgcaggtccccgaattcacccccaagtctggcgtcaagatccatgtttctgaccaggagctgcagagcgccaatgcctctgttgatgacagtcgtctagaggagctcaaagccactctgcccagcccagacaagctccctggattcaagatgtaccccattgactttgagaaggatgatgacagcaactttcatatggatttcatcgtggctgcatccaacctccgggcagaaaactatgacattccttctgcagaccggcacaagagcaagctgattgcagggaagatcatcccagccattgccacgaccacagcagccgtggttggccttgtgtgtctggagctgtacaaggttgtgcaggggcaccgacagcttgactcctacaagaatggtttcctcaacttggccctgcctttctttggtttctctgaaccccttgccgcaccacgtcaccagtactataaccaagagtggacattgtgggatcgctttgaggtacaagggctgcagcctaatggtgaggagatgaccctcaaacagttcctcgactattttaagacagagcacaaattagagatcaccatgctgtcccagggcgtgtccatgctctattccttcttcatgccagctgccaagctcaaggaacggttggatcagccgatgacagagattgtgagccgtgtgtcgaagcgaaagctgggccgccacgtgcgggcgctggtgcttgagctgtgctgtaacgacgagagcggcgaggatgtcgaggttccctatgtccgatacaccatccgctgaccccgtctgctcctctaggctggccccttgtccacccctctccacaccccttccagcccagggttcccatttggcttctggcagtggcccaactagccaagtctggtgttccctcatcatccccctacctgaacccctcttgccactgccttctaccttgtttgaaacctgaatcctaataaagaattaataactcccacatcgcctgccctgctggttccagggaaggaagggacttcctggagc

SEQ ID NO: 321476 - DNA, 2946 bp, Homo sapiens
  misc_feature (24)..(24): n is a, c, g, or t
  misc_feature (31)..(31): n is a, c, g, or t
  misc_feature (35)..(35): n is a, c, g, or t
  misc_feature (37)..(37): n is a, c, g, or t
  misc_feature (46)..(46): n is a, c, g, or t
cctctagacggatcccgcactgantgttcgntgangncttccttangtggtttccaggtggtggtgctcaccaacacccccctggaggaccagctgcgagtgggtgagttctgtcacaaccgtggcatcaagctggtggtggcagacacgcggggcctgtttgggcagctcttctgtgactttggagaggaaatgatcctcacagattccaatggggagcagccactcagtgctatggtttctatggttaccaaggacaaccccggtgtggttacctgcctggatgaggcccgacacgggtttgagagcggggactttgtctccttttcagaagtacagggcatggttgaactcaacggaaatcagcccatggagatcaaagtcctgggtccttatacctttagcatctgtgacacctccaacttctccgactacatccgtggaggcatcgtcagtcaggtcaaagtacctaagaagattagctttaaatccttggtggcctcactggcagaacctgactttgtggtgacggacttcgccaagttttctcgccctgcccagctgcacattggcttccaggccctgcaccagttctgtgctcagcatggccggccacctcggccccgcaatgaggaggatgcagcagaactggtagccttagcacaggctgtgaatgctcgagccctgccagcagtgcagcaaaataacctggacgaggacctcatccggaagctggcatatgtggctgctggggatctggcacccataaacgccttcattgggggcctggctgcccaggaagtcatgaaggcctgctccgggaagttcatgcccatcatgcagtggctatactttgatgcccttgagtgtctccctgaggacaaagaggtcctcacagaggacaagtgcctccagcgccagaaccgttatgacgggcaagtggctgtgtttggctcagacctgcaagagaagctgggcaagcagaagtatttcctggtgggtgcgggggccattggctgtgagctgctcaagaactttgccatgattgggctgggctgcggggagggtggagaaatcatcgttacagacatggacaccattgagaagtcaaatctgaatcgacagtttcttttccggccctgggatgtcacgaagttaaagtctgacacggctgctgcagctgtgcgccaaatgaatccacatatccgggtgacaagccaccagaaccgtgtgggtcctgacacggagcgcatctatgatgacgattttttccaaaacctagatggcgtggccaatgccctggacaacgtggatgcccgcatgtacatggaccgccgctgtgtctactaccggaagccactgctggagtcaggcacactgggcaccaaaggcaatgtgcaggtggtgatccccttcctgacagagtcgtacagttccagccaggacccacctgagaagtccatccccatctgtaccctgaagaacttccctaatgccatcgagcacaccctgcagtgggctcgggatgagtttgaaggcctcttcaagcagccagcagtggcaggcactcagcccttggaggtgctggaggctgtgcagcgcagcctggtgctgcagcgaccacagacctgggctgactgcgtgacctgggcctgccaccactggcacacccagtactcgaacaacatccggcagctgctgcacaacttccctcctgaccagctcacaagctcaggagcgccgttctggtctgggcccaaacgctgtccacacccgctcacctttgatgtcaacaatcccctgcatctggactatgtgatggctgctgccaacctgtttgcccagacctacgggctgacaggctctcaggaccgagctgctgtggccacattcctgcagtctgtgcaggtccccgaattcacccccaagtctggcgtcaagatccatgtttctgaccaggagctgcagagcgccaatgcctctgttgatgacagtcgtctagaggagctcaaagccactctgcccagcccagacaagctccctggattcaagatgtaccccattgactttgagaaggatgatgacagcaactttcatatggatttcatcgtggctgcatccaacctccgggcagaaaactatgacattccttctgcagaccggcacaagagcaagctgattgcagggaagatcatcccagccattgccacgaccacagcagccgtggttggccttgtgtgtctggagctgtacaaggttgtgcaggggcaccgacagcttgactcctacaagaatggtttcctcaacttggccctgcctttctttggtttctctgaaccccttgccgcaccacgtcaccagtactataaccaagagtggacattgtgggatcgctttgaggtacaagggctgcagcctaatggtgaggagatgaccctcaaacagttcctcgactattttaagacagagcacaaattagagatcaccatgctgtcccagggcgtgtccatgctctattccttcttcatgccagctgccaagctcaaggaacggttggatcagccgatgacagagattgtgagccgtgtgtcgaagcgaaagctgggccgccacgtgcgggcgctggtgcttgagctgtgctgtaacgacgagagcggcgaggatgtcgaggttccctatgtccgatacaccatccgctgaccccgtctgctcctctaggctggccccttgtccacccctctccacaccccttccagcccagggttcccatttggcttctggcagtggcccaactagccaagtctggtgttccctcatcatccccctacctgaacccctcttgccactgccttctaccttgtttgaaacctgaatcctaataaagaattaataactcccacatcgcctgccctgctggttccagggaaggaagggacttcctggagc

SEQ ID NO: 321477 - DNA, 2870 bp, Homo sapiens
  misc_feature (24)..(24): n is a, c, g, or t
  misc_feature (31)..(31): n is a, c, g, or t
  misc_feature (35)..(35): n is a, c, g, or t
  misc_feature (37)..(37): n is a, c, g, or t
  misc_feature (46)..(46): n is a, c, g, or t
cctctagacggatcccgcactgantgttcgntgangncttccttangtggtttccaggtggtggtgctcaccaacacccccctggaggaccagctgcgagtgggtgagttctgtcacaaccgtggcatcaagctggtggtggcagacacgcggggcctgtttgggcagctcttctgtgactttggagaggaaatgatcctcacagattccaatggggagcagccactcagtgctatggtttctatggttaccaaggacaaccccggtgtggttacctgcctggatgaggcccgacacgggtttgagagcggggactttgtctccttttcagaagtacagggcatggttgaactcaacggaaatcagcccatggagatcaaagtcctgggtccttatacctttagcatctgtgacacctccaacttctccgactacatccgtggaggcatcgtcagtcaggtcaaagtacctaagaagattagctttaaatccttggtggcctcactggcagaacctgactttgtggtgacggacttcgccaagttttctcgccctgcccagctgcacattggcttccaggccctgcaccagttctgtgctcagcatggccggccacctcggccccgcaatgaggaggatgcagcagaactggtagccttagcacaggctgtgaatgctcgagccctgccagcagtgcagcaaaataacctggacgaggacctcatccggaagctggcatatgtggctgctggggatctggcacccataaacgccttcattgggggcctggctgcccaggaagtcatgaaggcctgctccgggaagttcatgcccatcatgcagtggctatactttgatgcccttgagtgtctccctgaggacaaagaggtcctcacagaggacaagtgcctccagcgccagaaccgttatgacgggcaagtggctgtgtttggctcagacctgcaagagaagctgggcaagcagaagtatttcctggtgggtgcgggggccattggctgtgagctgctcaagaactttgccatgattgggctgggctgcggggagggtggagaaatcatcgttacagacatggacaccattgagaagtcaaatctgaatcgacagtttcttttccggccctgggatgtcacgaagttaaagtctgacacggctgctgcagctgtgcgccaaatgaatccacatatccgggtgacaagccaccagaaccgtgtgggtcctgacacggagcgcatctatgatgacgattttttccaaaacctagatggcgtggccaatgccctggacaacgtggatgcccgcatgtacatggaccgccgctgtgtctactaccggaagccactgctggagtcaggcacactgggcaccaaaggcaatgtgcaggtggtgatccccttcctgacagagtcgtacagttccagccaggacccacctgagaagtccatccccatctgtaccctgaagaacttccctaatgccatcgagcacaccctgcagtgggctcgggatgagtttgaaggcctcttcaagcagccagcagtgactgcgtgacctgggcctgccaccactggcacacccagtactcgaacaacatccggcagctgctgcacaacttccctcctgaccagctcacaagctcaggagcgccgttctggtctgggcccaaacgctgtccacacccgctcacctttgatgtcaacaatcccctgcatctggactatgtgatggctgctgccaacctgtttgcccagacctacgggctgacaggctctcaggaccgagctgctgtggccacattcctgcagtctgtgcaggtccccgaattcacccccaagtctggcgtcaagatccatgtttctgaccaggagctgcagagcgccaatgcctctgttgatgacagtcgtctagaggagctcaaagccactctgcccagcccagacaagctccctggattcaagatgtaccccattgactttgagaaggatgatgacagcaactttcatatggatttcatcgtggctgcatccaacctccgggcagaaaactatgacattccttctgcagaccggcacaagagcaagctgattgcagggaagatcatcccagccattgccacgaccacagcagccgtggttggccttgtgtgtctggagctgtacaaggttgtgcaggggcaccgacagcttgactcctacaagaatggtttcctcaacttggccctgcctttctttggtttctctgaaccccttgccgcaccacgtcaccagtactataaccaagagtggacattgtgggatcgctttgaggtacaagggctgcagcctaatggtgaggagatgaccctcaaacagttcctcgactattttaagacagagcacaaattagagatcaccatgctgtcccagggcgtgtccatgctctattccttcttcatgccagctgccaagctcaaggaacggttggatcagccgatgacagagattgtgagccgtgtgtcgaagcgaaagctgggccgccacgtgcgggcgctggtgcttgagctgtgctgtaacgacgagagcggcgaggatgtcgaggttccctatgtccgatacaccatccgctgaccccgtctgctcctctaggctggccccttgtccacccctctccacaccccttccagcccagggttcccatttggcttctggcagtggcccaactagccaagtctggtgttccctcatcatccccctacctgaacccctcttgccactgccttctaccttgtttgaaacctgaatcctaataaagaattaataactcccacatcgcctgccctgctggttccagggaaggaagggacttcctggagc

SEQ ID NO: 321478 - DNA, 2777 bp, Homo sapiens
  misc_feature (24)..(24): n is a, c, g, or t
  misc_feature (31)..(31): n is a, c, g, or t
  misc_feature (35)..(35): n is a, c, g, or t
  misc_feature (37)..(37): n is a, c, g, or t
  misc_feature (46)..(46): n is a, c, g, or t
cctctagacggatcccgcactgantgttcgntgangncttccttangtggtttccaggtggtggtgctcaccaacacccccctggaggaccagctgcgagtgggtgagttctgtcacaaccgtggcatcaagctggtggtggcagacacgcggggcctgtttgggcagctcttctgtgactttggagaggaaatgatcctcacagattccaatggggagcagccactcagtgctatggtttctatggttaccaaggacaaccccggtgtggttacctgcctggatgaggcccgacacgggtttgagagcggggactttgtctccttttcagaagtacagggcatggttgaactcaacggaaatcagcccatggagatcaaagtcctgggtccttatacctttagcatctgtgacacctccaacttctccgactacatccgtggaggcatcgtcagtcaggtcaaagtacctaagaagattagctttaaatccttggtggcctcactggcagaacctgactttgtggtgacggacttcgccaagttttctcgccctgcccagctgcacattggcttccaggccctgcaccagttctgtgctcagcatggccggccacctcggccccgcaatgaggaggatgcagcagaactggtagccttagcacaggctgtgaatgctcgagccctgccagcagtgcagcaaaataacctggacgaggacctcatccggaagctggcatatgtggctgctggggatctggcacccataaacgccttcattgggggcctggctgcccaggaagtcatgaaggcctgctccgggaagttcatgcccatcatgcagtggctatactttgatgcccttgagtgtctccctgaggacaaagaggtcctcacagaggacaagtgcctccagcgccagaaccgttatgacgggcaagtggctgtgtttggctcagacctgcaagagaagctgggcaagcagaagtatttcctggtgggtgcgggggccattggctgtgagctgctcaagaactttgccatgattgggctgggctgcggggagggtggagaaatcatcgttacagacatggacaccattgagaagtcaaatctgaatcgacagtttcttttccggccctgggatgtcacgaagttaaagtctgacacggctgctgcagctgtgcgccaaatgaatccacatatccgggtgacaagcaggacccacctgagaagtccatccccatctgtaccctgaagaacttccctaatgccatcgagcacaccctgcagtgggctcgggatgagtttgaaggcctcttcaagcagccagcagaaaatgtcaaccagtacctcacagaccccaagtttgtggagcgaacactgcggctggcaggcactcagcccttggaggtgctggaggctgtgcagcgcagcctggtgctgcagcgaccacagacctgggctgactgcgtgacctgggcctgccaccactggcacacccagtactcgaacaacatccggcagctgctgcacaacttccctcctgaccagctcacaagctcaggagcgccgttctggtctgggcccaaacgctgtccacacccgctcacctttgatgtcaacaatcccctgcatctggactatgtgatggctgctgccaacctgtttgcccagacctacgggctgacaggctctcaggaccgagctgctgtggccacattcctgcagtctgtgcaggtccccgaattcacccccaagtctggcgtcaagatccatgtttctgaccaggagctgcagagcgccaatgcctctgttgatgacagtcgtctagaggagctcaaagccactctgcccagcccagacaagctccctggattcaagatgtaccccattgactttgagaaggatgatgacagcaactttcatatggatttcatcgtggctgcatccaacctccgggcagaaaactatgacattccttctgcagaccggcacaagagcaagctgattgcagggaagatcatcccagccattgccacgaccacagcagccgtggttggccttgtgtgtctggagctgtacaaggttgtgcaggggcaccgacagcttgactcctacaagaatggtttcctcaacttggccctgcctttctttggtttctctgaaccccttgccgcaccacgtcaccagtactataaccaagagtggacattgtgggatcgctttgaggtacaagggctgcagcctaatggtgaggagatgaccctcaaacagttcctcgactattttaagacagagcacaaattagagatcaccatgctgtcccagggcgtgtccatgctctattccttcttcatgccagctgccaagctcaaggaacggttggatcagccgatgacagagattgtgagccgtgtgtcgaagcgaaagctgggccgccacgtgcgggcgctggtgcttgagctgtgctgtaacgacgagagcggcgaggatgtcgaggttccctatgtccgatacaccatccgctgaccccgtctgctcctctaggctggccccttgtccacccctctccacaccccttccagcccagggttcccatttggcttctggcagtggcccaactagccaagtctggtgttccctcatcatccccctacctgaacccctcttgccactgccttctaccttgtttgaaacctgaatcctaataaagaattaataactcccacatcgcctgccctgctggttccagggaaggaagggacttcctggagc

SEQ ID NO: 321479 - DNA, 2948 bp, Homo sapiens
  misc_feature (24)..(24): n is a, c, g, or t
  misc_feature (31)..(31): n is a, c, g, or t
  misc_feature (35)..(35): n is a, c, g, or t
  misc_feature (37)..(37): n is a, c, g, or t
  misc_feature (46)..(46): n is a, c, g, or t
cctctagacggatcccgcactgantgttcgntgangncttccttangtggtttccaggtggtggtgctcaccaacacccccctggaggaccagctgcgagtgggtgagttctgtcacaaccgtggcatcaagctggtggtggcagacacgcggggcctgtttgggcagctcttctgtgactttggagaggaaatgatcctcacagattccaatggggagcagccactcagtgctatggtttctatggttaccaaggacaaccccggtgtggttacctgcctggatgaggcccgacacgggtttgagagcggggactttgtctccttttcagaagtacagggcatggttgaactcaacggaaatcagcccatggagatcaaagtcctgggtccttatacctttagcatctgtgacacctccaacttctccgactacatccgtggaggcatcgtcagtcaggtcaaagtacctaagaagattagctttaaatccttggtggcctcactggcagaacctgactttgtggtgacggacttcgccaagttttctcgccctgcccagctgcacattggcttccaggccctgcaccagttctgtgctcagcatggccggccacctcggccccgcaatgaggaggatgcagcagaactggtagccttagcacaggctgtgaatgctcgagccctgccagcagtgcagcaaaataacctggacgaggacctcatccggaagctggcatatgtggctgctggggatctggcacccataaacgccttcattgggggcctggctgcccaggaagtcatgaaggcctgctccgggaagttcatgcccatcatgcagtggctatactttgatgcccttgagtgtctccctgaggacaaagaggtcctcacagaggacaagtgcctccagcgccagaaccgttatgacgggcaagtggctgtgtttggctcagacctgcaagagaagctgggcaagcagaagtatttcctggtgggtgcgggggccattggctgtgagctgctcaagaactttgccatgattgggctgggctgcggggagggtggagaaatcatcgttacagacatggacaccattgagaagtcaaatctgaatcgacagtttcttttccggccctgggatgtcacgaagttaaagtctgacacggctgctgcagctgtgcgccaaatgaatccacatatccgggtgacaagccaccagaaccgtgtgggtcctgacacggagcgcatctatgatgacgattttttccaaaacctagatggcgtggccaatgccctggacaacgtggatgcccgcatgtacatggaccgccgctgtgtctactaccggaagccactgctggagtcaggcacactgggcaccaaaggcaatgtgcaggtggtgatccccttcctgacagagtcgtacagttccagccaggacccacctgagaagtccatccccatctgtaccctgaagaacttccctaatgccatcgagcacaccctgcagtgggctcgggatgagtttgaaggcctcttcaagcagccagcagaaaatgtcaaccagtacctcacagaccccaagtttgtggagcgaacactgcggctggcaggcactcagcccttggaggtgctggaggctgtgcagcgcagcctggtgctgcagcgaccacagacctgggctgactgcgtgacctgggcctgccaccactggcacacccagtactcgaacaacatccggcagctgctgcacaacttccctcctgaccagctcacaagctcaggagcgccgttctggtctgggcccaaacgctgtccacacccgctcacctttgatgtcaacaatcccctgcatctggactatgtgatggctgctgccaacctgtttgcccagacctacgggctgacaggctctcaggaccgagctgctgtggccacattcctgcagtctgtgcaggtccccgaattcacccccaagtctggcgtcaagatccatgtttctgaccaggagctgcagagcgccaatgcctctgttgatgacagtcgtctagaggagctcaaagccactctgcccagcccagacaagctccctggattcaagatgtaccccattgactttgagaaggatgatgacagcaactttcatatggatttcatcgtggctgcatccaacctccgggcagaaaactatgacattccttctgcagaccggcacaagagcaagctgattgcagggaagatcatcccagccattgccacgaccacagcagccgtggttggccttgtgtgtctggagctgtacaaggttgtgcaggggcaccgacagcttgactcctacaagaatggtttcctcaacttggccctgcctttctttggtttctctgaaccccttgccgcaccacgtcaccagtactataaccaagagtggacattgtgggatcgctttgaggtacaagggctgcagcctaatggtgaggagatgaccctcaaacagttcctcgactattttaagacagagcacaaattagagatcaccatgctgtcccagggcgtgtccatgctctattccttcttcatgccagctgccaagctcaaggaacggttggatcagccgatgacagagattgtgagccgtgtgtcgaagcgaaagctgggccgccacgtgcgggcgctggtgcttgagctgtgctgtaacgacgagagcggcgaggatgtcgaggttccctatgtccgatacaccatccgctgaccccgtctgctcctctaggctggccccttgtccacccctctccacaccccttccagcccagggttcccatttggcttctggcagtggcccaactagccaagtctggtgttccctcatcatccccctacctgaacccctcttgccactgccttctaccttgtttgaaacctgaatcctaataaagaattaataac

SEQ ID NO: 321480 - DNA, 2349 bp, Homo sapiens
  misc_feature (14)..(14): n is a, c, g, or t
  misc_feature (17)..(17): n is a, c, g, or t
  misc_feature (22)..(22): n is a, c, g, or t
  misc_feature (30)..(30): n is a, c, g, or t
agctaggtagaggncgngtgtnaatcggcngagggtcaagtactatgaagatagctttaaatccttggtggcctcactggcagaacctgactttgtggtgacggacttcgccaagttttctcgccctgcccagctgcacattggcttccaggccctgcaccagttctgtgctcagcatggccggccacctcggccccgcaatgaggaggatgcagcagaactggtagccttagcacaggctgtgaatgctcgagccctgccagcagtgcagcaaaataacctggacgaggacctcatccggaagctggcatatgtggctgctggggatctggcacccataaacgccttcattgggggcctggctgcccaggaagtcatgaaggcctgctccgggaagttcatgcccatcatgcagtggctatactttgatgcccttgagtgtctccctgaggacaaagaggtcctcacagaggacaagtgcctccagcgccagaaccgttatgacgggcaagtggctgtgtttggctcagacctgcaagagaagctgggcaagcagaagtatttcctggtgggtgcgggggccattggctgtgagctgctcaagaactttgccatgattgggctgggctgcggggagggtggagaaatcatcgttacagacatggacaccattgagaagtcaaatctgaatcgacagtttcttttccggccctgggatgtcacgaagttaaagtctgacacggctgctgcagctgtgcgccaaatgaatccacatatccgggtgacaagcaggacccacctgagaagtccatccccatctgtaccctgaagaacttccctaatgccatcgagcacaccctgcagtgggctcgggatgagtttgaaggcctcttcaagcagccagcagaaaatgtcaaccagtacctcacagaccccaagtttgtggagcgaacactgcggctggcaggcactcagcccttggaggtgctggaggctgtgcagcgcagcctggtgctgcagcgaccacagacctgggctgactgcgtgacctgggcctgccaccactggcacacccagtactcgaacaacatccggcagctgctgcacaacttccctcctgaccagctcacaagctcaggagcgccgttctggtctgggcccaaacgctgtccacacccgctcacctttgatgtcaacaatcccctgcatctggactatgtgatggctgctgccaacctgtttgcccagacctacgggctgacaggctctcaggaccgagctgctgtggccacattcctgcagtctgtgcaggtccccgaattcacccccaagtctggcgtcaagatccatgtttctgaccaggagctgcagagcgccaatgcctctgttgatgacagtcgtctagaggagctcaaagccactctgcccagcccagacaagctccctggattcaagatgtaccccattgactttgagaaggatgatgacagcaactttcatatggatttcatcgtggctgcatccaacctccgggcagaaaactatgacattccttctgcagaccggcacaagagcaagctgattgcagggaagatcatcccagccattgccacgaccacagcagccgtggttggccttgtgtgtctggagctgtacaaggttgtgcaggggcaccgacagcttgactcctacaagaatggtttcctcaacttggccctgcctttctttggtttctctgaaccccttgccgcaccacgtcaccagtactataaccaagagtggacattgtgggatcgctttgaggtacaagggctgcagcctaatggtgaggagatgaccctcaaacagttcctcgactattttaagacagagcacaaattagagatcaccatgctgtcccagggcgtgtccatgctctattccttcttcatgccagctgccaagctcaaggaacggttggatcagccgatgacagagattgtgagccgtgtgtcgaagcgaaagctgggccgccacgtgcgggcgctggtgcttgagctgtgctgtaacgacgagagcggcgaggatgtcgaggttccctatgtccgatacaccatccgctgaccccgtctgctcctctaggctggccccttgtccacccctctccacaccccttccagcccagggttcccatttggcttctggcagtggcccaactagccaagtctggtgttccctcatcatccccctacctgaacccctcttgccactgccttctaccttgtttgaaacctgaatcctaataaagaattaataactcccacatcgcctgccctgctggttccagggaaggaagggacttcctggagc

SEQ ID NO: 321481 - DNA, 3253 bp, Homo sapiens
  misc_feature (24)..(24): n is a, c, g, or t
  misc_feature (31)..(31): n is a, c, g, or t
  misc_feature (35)..(35): n is a, c, g, or t
  misc_feature (37)..(37): n is a, c, g, or t
  misc_feature (46)..(46): n is a, c, g, or t
cctctagacggatcccgcactgantgttcgntgangncttccttangtggtttccaggtggtggtgctcaccaacacccccctggaggaccagctgcgagtgggtgagttctgtcacaaccgtggcatcaagctggtggtggcagacacgcggggcctgtttgggcagctcttctgtgactttggagaggaaatgatcctcacagattccaatggggagcagccactcagtgctatggtttctatggttaccaaggacaaccccggtgtggttacctgcctggatgaggcccgacacgggtttgagagcggggactttgtctccttttcagaagtacagggcatggttgaactcaacggaaatcagcccatggagatcaaagtcctgggtccttatacctttagcatctgtgacacctccaacttctccgactacatccgtggaggcatcgtcagtcaggtcaaagtacctaagaagattagctttaaatccttggtggcctcactggcagaacctgactttgtggtgacggacttcgccaagttttctcgccctgcccagctgcacattggcttccaggccctgcaccagttctgtgctcagcatggccggccacctcggccccgcaatgaggaggatgcagcagaactggtagccttagcacaggctgtgaatgctcgagccctgccagcagtgcagcaaaataacctggacgaggacctcatccggaagctggcatatgtggctgctggggatctggcacccataaacgccttcattgggggcctggctgcccaggaagtcatgaaggcctgctccgggaagttcatgcccatcatgcagtggctatactttgatgcccttgagtgtctccctgaggacaaagaggtcctcacagaggacaagtgcctccagcgccagaaccgttatgacgggcaagtggctgtgtttggctcagacctgcaagagaagctgggcaagcagaagtatttcctggtgggtgcgggggccattggctgtgagctgctcaagaactttgccatgattgggctgggctgcggggagggtggagaaatcatcgttacagacatggacaccattgagaagtcaaatctgaatcgacagtttcttttccggccctgggatgtcacgaagttaaagtctgacacggctgctgcagctgtgcgccaaatgaatccacatatccgggtgacaagccaccagaaccgtgtgggtcctgacacggagcgcatctatgatgacgattttttccaaaacctagatggcgtggccaatgccctggacaacgtggatgcccgcatgtacatggaccgccgctgtgtctactaccggaagccactgctggagtcaggcacactgggcaccaaaggcaatgtgcaggtggtgatccccttcctgacagagtcgtacagttccagccaggacccacctgagaagtccatccccatctgtaccctgaagaacttccctaatgccatcgagcacaccctgcagtgggctcgggatgagtttgaaggcctcttcaagcagccagcagaaaatgtcaaccagtacctcacagaccccaagtttgtggagcgaacactgcggctggcaggcactcagcccttggaggtgctggaggctgtgcagcgcagcctggtgctgcagcgaccacagacctgggctgactgcgtgacctgggcctgccaccactggcacacccagtactcgaacaacatccggcagctgctgcacaacttccctcctgaccagctcacaagctcaggagcgccgttctggtctgggcccaaacgctgtccacacccgctcacctttgatgtcaacaatcccctgcatctggactatgtgatggctgctgccaacctgtttgcccagacctacgggctgacaggctctcaggaccgagctgctgtggccacattcctgcagtctgtgcaggtccccgaattcacccccaagtctggcgtcaagatccatgtttctgaccaggagctgcagagcgccaatgcctctgttgatgacagtcgtctagaggagctcaaagccactctgcccagcccagacaagctccctggattcaagatgtaccccattgactttgagaaggatgatgacagcaactttcatatggatttcatcgtggctgcatccaacctccgggcagaaaactatgacattccttctgcagaccggcacaagagcaagctgattgcagggaagatcatcccagccattgccacgaccacagcagccgtggttggccttgtgtgtctggagctgtacaaggttgtgcaggggcaccgacagcttgactcctacaagaatggtttcctcaacttggccctgcctttctttggtttctctgaaccccttgccgcaccacgtcaccagtactataaccaagagtggacattgtgggatcgctttgaggtacaagggctgcagcctaatggtgaggagatgaccctcaaacagttcctcgactattttaagacagagcacaaattagagatcaccatgctgtcccagggcgtgtccatgctctattccttcttcatgccagctgccaagctcaaggaacggttggatcagccgatgacagagattgtgagccgtgtgtcgaagcgaaagctgggccgccacgtgcgggcgctggtgcttgagctgtgctgtaacgacgagagcggcgaggatgtcgaggttccctatgtccgatacaccatccgctgaccccgtctgctcctctaggctggccccttgtccacccctctccacaccccttccagcccagggttcccatttggcttctggcagtggcccaactagccaagtctggtgttccctcatcatccccctacctgaacccctcttgccactgccttctaccttgtttgaaacctgaatcctaataaagaattaataacccaaaataaaaaacgaaataaaaaaccggcgtttggggagtgcaaaaaggcttaatagggccaaggggcaactgcgtccccgcccccactttgtgtcacaagggagaaaacgcggcaccccataaaggggacataatccaaaccgcgagacaactagcgagcagcagcacagtggagaacagacgaggagaagagggagcgcaaagaagacaacgaacgcaagcagtacataacacacgacacacgaacataacgagaagacgaagagacagaaaccaaagagaagaagcaagacgactgaagca

SEQ ID NO: 321482 - DNA, 3026 bp, Homo sapiens
  misc_feature (24)..(24): n is a, c, g, or t
  misc_feature (31)..(31): n is a, c, g, or t
  misc_feature (35)..(35): n is a, c, g, or t
  misc_feature (37)..(37): n is a, c, g, or t
  misc_feature (46)..(46): n is a, c, g, or t
  misc_feature (3026)..(3026): n is a, c, g, or t
cctctagacggatcccgcactgantgttcgntgangncttccttangtggtttccaggtggtggtgctcaccaacacccccctggaggaccagctgcgagtgggtgagttctgtcacaaccgtggcatcaagctggtggtggcagacacgcggggcctgtttgggcagctcttctgtgactttggagaggaaatgatcctcacagattccaatggggagcagccactcagtgctatggtttctatggttaccaaggacaaccccggtgtggttacctgcctggatgaggcccgacacgggtttgagagcggggactttgtctccttttcagaagtacagggcatggttgaactcaacggaaatcagcccatggagatcaaagtcctgggtccttatacctttagcatctgtgacacctccaacttctccgactacatccgtggaggcatcgtcagtcaggtcaaagtacctaagaagattagctttaaatccttggtggcctcactggcagaacctgactttgtggtgacggacttcgccaagttttctcgccctgcccagctgcacattggcttccaggccctgcaccagttctgtgctcagcatggccggccacctcggccccgcaatgaggaggatgcagcagaactggtagccttagcacaggctgtgaatgctcgagccctgccagcagtgcagcaaaataacctggacgaggacctcatccggaagctggcatatgtggctgctggggatctggcacccataaacgccttcattgggggcctggctgcccaggaagtcatgaaggcctgctccgggaagttcatgcccatcatgcagtggctatactttgatgcccttgagtgtctccctgaggacaaagaggtcctcacagaggacaagtgcctccagcgccagaaccgttatgacgggcaagtggctgtgtttggctcagacctgcaagagaagctgggcaagcagaagtatttcctggtgggtgcgggggccattggctgtgagctgctcaagaactttgccatgattgggctgggctgcggggagggtggagaaatcatcgttacagacatggacaccattgagaagtcaaatctgaatcgacagtttcttttccggccctgggatgtcacgaagttaaagtctgacacggctgctgcagctgtgcgccaaatgaatccacatatccgggtgacaagccaccagaaccgtgtgggtcctgacacggagcgcatctatgatgacgattttttccaaaacctagatggcgtggccaatgccctggacaacgtggatgcccgcatgtacatggaccgccgctgtgtctactaccggaagccactgctggagtcaggcacactgggcaccaaaggcaatgtgcaggtggtgatccccttcctgacagagtcgtacagttccagccaggacccacctgagaagtccatccccatctgtaccctgaagaacttccctaatgccatcgagcacaccctgcagtgggctcgggatgagtttgaaggcctcttcaagcagccagcagaaaatgtcaaccagtacctcacagaccccaagtttgtggagcgaacactgcggctggcaggcactcagcccttggaggtgctggaggctgtgcagcgcagcctggtgctgcagcgaccacagacctgggctgactgcgtgacctgggcctgccaccactggcacacccagtactcgaacaacatccggcagctgctgcacaacttccctcctgaccagctcacaagctcaggagcgccgttctggtctgggcccaaacgctgtccacacccgctcacctttgatgtcaacaatcccctgcatctggactatgtgatggctgctgccaacctgtttgcccagacctacgggctgacaggctctcaggaccgagctgctgtggccacattcctgcagtctgtgcaggtccccgaattcacccccaagtctggcgtcaagatccatgtttctgaccaggagctgcagagcgccaatgcctctgttgatgacagtcgtctagaggagctcaaagccactctgcccagcccagacaagctccctggattcaagatgtaccccattgactttgagaaggatgatgacagcaactttcatatggatttcatcgtggctgcatccaacctccgggcagaaaactatgacattccttctgcagaccggcacaagagcaagctgattgcagggaagatcatcccagccattgccacgaccacagcagccgtggttggccttgtgtgtctggagctgtacaaggttgtgcaggggcaccgacagcttgactcctacaagaatggtttcctcaacttggccctgcctttctttggtttctctgaaccccttgccgcaccacgtcaccagtactataaccaagagtggacattgtgggatcgctttgaggtacaagggctgcagcctaatggtgaggagatgaccctcaaacagttcctcgactattttaagacagagcacaaattagagatcaccatgctgtcccagggcgtgtccatgctctattccttcttcatgccagctgccaagctcaaggaacggttggatcagccgatgacagagattgtgagccgtgtgtcgaagcgaaagctgggccgccacgtgcgggcgctggtgcttgagctgtgctgtaacgacgagagcggcgaggatgtcgaggttccctatgtccgatacaccatccgctgaccccgtctgctcctctaggctggccccttgtccacccctctccacaccccttccagcccagggttcccatttggcttctggcagtggcccaactagccaagtctggtgttccctcatcatccccctacctgaacccctcttgccactgccttctaccttgtttgaaacctgaatcctaataaagaattaataacaaaaaacaagaacaggatgagacacagcgatgagcaaaaggggtgcgccgcacaaaggaatcccctgagggggcccan

SEQ ID NO: 321483 - DNA, 3118 bp, Homo sapiens
  misc_feature (24)..(24): n is a, c, g, or t
  misc_feature (31)..(31): n is a, c, g, or t
  misc_feature (35)..(35): n is a, c, g, or t
  misc_feature (37)..(37): n is a, c, g, or t
  misc_feature (46)..(46): n is a, c, g, or t
cctctagacggatcccgcactgantgttcgntgangncttccttangtggtttccaggtggtggtgctcaccaacacccccctggaggaccagctgcgagtgggtgagttctgtcacaaccgtggcatcaagctggtggtggcagacacgcggggcctgtttgggcagctcttctgtgactttggagaggaaatgatcctcacagattccaatggggagcagccactcagtgctatggtttctatggttaccaaggacaaccccggtgtggttacctgcctggatgaggcccgacacgggtttgagagcggggactttgtctccttttcagaagtacagggcatggttgaactcaacggaaatcagcccatggagatcaaagtcctgggtccttatacctttagcatctgtgacacctccaacttctccgactacatccgtggaggcatcgtcagtcaggtcaaagtacctaagaagattagctttaaatccttggtggcctcactggcagaacctgactttgtggtgacggacttcgccaagttttctcgccctgcccagctgcacattggcttccaggccctgcaccagttctgtgctcagcatggccggccacctcggccccgcaatgaggaggatgcagcagaactggtagccttagcacaggctgtgaatgctcgagccctgccagcagtgcagcaaaataacctggacgaggacctcatccggaagctggcatatgtggctgctggggatctggcacccataaacgccttcattgggggcctggctgcccaggaagtcatgaaggcctgctccgggaagttcatgcccatcatgcagtggctatactttgatgcccttgagtgtctccctgaggacaaagaggtcctcacagaggacaagtgcctccagcgccagaaccgttatgacgggcaagtggctgtgtttggctcagacctgcaagagaagctgggcaagcagaagtatttcctggtgggtgcgggggccattggctgtgagctgctcaagaactttgccatgattgggctgggctgcggggagggtggagaaatcatcgttacagacatggacaccattgagaagtcaaatctgaatcgacagtttcttttccggccctgggatgtcacgaagttaaagtctgacacggctgctgcagctgtgcgccaaatgaatccacatatccgggtgacaagccaccagaaccgtgtgggtcctgacacggagcgcatctatgatgacgattttttccaaaacctagatggcgtggccaatgccctggacaacgtggatgcccgcatgtacatggaccgccgctgtgtctactaccggaagccactgctggagtcaggcacactgggcaccaaaggcaatgtgcaggtggtgatccccttcctgacagagtcgtacagttccagccaggacccacctgagaagtccatccccatctgtaccctgaagaacttccctaatgccatcgagcacaccctgcagtgggctcgggatgagtttgaaggcctcttcaagcagccagcagaaaatgtcaaccagtacctcacagaccccaagtttgtggagcgaacactgcggctggcaggcactcagcccttggaggtgctggaggctgtgcagcgcagcctggtgctgcagcgaccacagacctgggctgactgcgtgacctgggcctgccaccactggcacacccagtactcgaacaacatccggcagctgctgcacaacttccctcctgaccagctcacaagctcaggagcgccgttctggtctgggcccaaacgctgtccacacccgctcacctttgatgtcaacaatcccctgcatctggactatgtgatggctgctgccaacctgtttgcccagacctacgggctgacaggctctcaggaccgagctgctgtggccacattcctgcagtctgtgcaggtccccgaattcacccccaagtctggcgtcaagatccatgtttctgaccaggagctgcagagcgccaatgcctctgttgatgacagtcgtctagaggagctcaaagccactctgcccagcccagacaagctccctggattcaagatgtaccccattgactttgagaaggatgatgacagcaactttcatatggatttcatcgtggctgcatccaacctccgggcagaaaactatgacattccttctgcagaccggcacaagagcaagctgattgcagggaagatcatcccagccattgccacgaccacagcagccgtggttggccttgtgtgtctggagctgtacaaggttgtgcaggggcaccgacagcttgactcctacaagaatggtttcctcaacttggccctgcctttctttggtttctctgaaccccttgccgcaccacgtcaccagtactataaccaagagtggacattgtgggatcgctttgaggtacaagggctgcagcctaatggtgaggagatgaccctcaaacagttcctcgactattttaagacagagcacaaattagagatcaccatgctgtcccagggcgtgtccatgctctattccttcttcatgccagctgccaagctcaaggaacggttggatcagccgatgacagagattgtgagccgtgtgtcgaagcgaaagctgggccgccacgtgcgggcgctggtgcttgagctgtgctgtaacgacgagagcggcgaggatgtcgaggttccctatgtccgatacaccatccgctgaccccgtctgctcctctaggctggccccttgtccacccctctccacaccccttccagcccagggttcccatttggcttctggcagtggcccaactagccaagtctggtgttccctcatcatccccctacctgaacccctcttgccactgccttctaccttgtttgaaacctgaatcctaataaagaattaataacctcgtgccgaattcggcacgagcccaagctggatctgagcccagcatttatcatctcagcgctgcctcccacagaagaaggaagacataatgaataaatgaaaccccatgactgtatcaacattcatcaacccattactccaaacgtggctgataaaattgggtacctgg

SEQ ID NO: 321484 - DNA, 2939 bp, Homo sapiens
  misc_feature (24)..(24): n is a, c, g, or t
  misc_feature (31)..(31): n is a, c, g, or t
  misc_feature (35)..(35): n is a, c, g, or t
  misc_feature (37)..(37): n is a, c, g, or t
  misc_feature (46)..(46): n is a, c, g, or t
cctctagacggatcccgcactgantgttcgntgangncttccttangtggtttccaggtggtggtgctcaccaacacccccctggaggaccagctgcgagtgggtgagttctgtcacaaccgtggcatcaagctggtggtggcagacacgcggggcctgtttgggcagctcttctgtgactttggagaggaaatgatcctcacagattccaatggggagcagccactcagtgctatggtttctatggttaccaaggacaaccccggtgtggttacctgcctggatgaggcccgacacgggtttgagagcggggactttgtctccttttcagaagtacagggcatggttgaactcaacggaaatcagcccatggagatcaaagtcctgggtccttatacctttagcatctgtgacacctccaacttctccgactacatccgtggaggcatcgtcagtcaggtcaaagtacctaagaagattagctttaaatccttggtggcctcactggcagaacctgactttgtggtgacggacttcgccaagttttctcgccctgcccagctgcacattggcttccaggccctgcaccagttctgtgctcagcatggccggccacctcggccccgcaatgaggaggatgcagcagaactggtagccttagcacaggctgtgaatgctcgagccctgccagcagtgcagcaaaataacctggacgaggacctcatccggaagctggcatatgtggctgctggggatctggcacccataaacgccttcattgggggcctggctgcccaggaagtcatgaaggcctgctccgggaagttcatgcccatcatgcagtggctatactttgatgcccttgagtgtctccctgaggacaaagaggtcctcacagaggacaagtgcctccagcgccagaaccgttatgacgggcaagtggctgtgtttggctcagacctgcaagagaagctgggcaagcagaagtatttcctggtgggtgcgggggccattggctgtgagctgctcaagaactttgccatgattgggctgggctgcggggagggtggagaaatcatcgttacagacatggacaccattgagaagtcaaatctgaatcgacagtttcttttccggccctgggatgtcacgaagttaaagtctgacacggctgctgcagctgtgcgccaaatgaatccacatatccgggtgacaagccaccagaaccgtgtgggtcctgacacggagcgcatctatgatgacgattttttccaaaacctagatggcgtggccaatgccctggacaacgtggatgcccgcatgtacatggaccgccgctgtgtctactaccggaagccactgctggagtcaggcacactgggcaccaaaggcaatgtgcaggtggtgatccccttcctgacagagtcgtacagttccagccaggacccacctgagaagtccatccccatctgtaccctgaagaacttccctaatgccatcgagcacaccctgcagtgggctcgggatgagtttgaaggcctcttcaagcagccagcagaaaatgtcaaccagtacctcacagaccccaagtttgtggagcgaacactgcggctggcaggcactcagcccttggaggtgctggaggctgtgcagcgcagcctggtgctgcagcgaccacagacctgggctgactgcgtgacctgggcctgccaccactggcacacccagtactcgaacaacatccggcagctgctgcacaacttccctcctgaccagctcacaagctcaggagcgccgttctggtctgggcccaaacgctgtccacacccgctcacctttgatgtcaacaatcccctgcatctggactatgtgatggctgctgccaacctgtttgcccagacctacgggctgacaggctctcaggaccgagctgctgtggccacattcctgcagtctgtgcaggtccccgaattcacccccaagtctggcgtcaagatccatgtttctgaccaggagctgcagagcgccaatgcctctgttgatgacagtcgtctagaggagctcaaagccactctgcccagcccagacaagctccctggattcaagatgtaccccattgactttgagaaggatgatgacagcaactttcatatggatttcatcgtggctgcatccaacctccgggcagaaaactatgacattccttctgcagaccggcacaagagcaagctgattgcagggaagatcatcccagccattgccacgaccacagcagccgtggttggccttgtgtgtctggagctgtacaaggttgtgcaggggcaccgacagcttgactcctacaagaatggtttcctcaacttggccctgcctttctttggtttctctgaaccccttgccgcaccacgtcaccagtactataaccaagagtggacattgtgggatcgctttgaggtacaagggctgcagcctaatggtgaggagatgaccctcaaacagttcctcgactattttaagacagagcacaaattagagatcaccatgctgtcccagggcgtgtccatgctctattccttcttcatgccagctgccaagctcaaggaacggttggatcagccgatgacagagattgtgagccgtgtgtcgaagcgaaagctgggccgccacgtgcgggcgctggtgcttgagctgtgctgtaacgacgagagcggcgaggatgtcgaggttccctatgtccgatacaccatccgctgaccccgtctgctcctctaggctggccccttgtccacccctctccacaccccttccagcccagggttcccagcttgctcagacccagccccaccccggcctaattattagcatcatccctctactattttttaacctatcaacaacaaccatatttagctgttcccagcttgctcagacgtacagtg

SEQ ID NO: 321485 - DNA, 3224 bp, Homo sapiens
  misc_feature (24)..(24): n is a, c, g, or t
  misc_feature (31)..(31): n is a, c, g, or t
  misc_feature (35)..(35): n is a, c, g, or t
  misc_feature (37)..(37): n is a, c, g, or t
  misc_feature (46)..(46): n is a, c, g, or t
  misc_feature (2759)..(2759): n is a, c, g, or t
  misc_feature (2782)..(2782): n is a, c, g, or t
  misc_feature (2784)..(2784): n is a, c, g, or t
cctctagacggatcccgcactgantgttcgntgangncttccttangtggtttccaggtggtggtgctcaccaacacccccctggaggaccagctgcgagtgggtgagttctgtcacaaccgtggcatcaagctggtggtggcagacacgcggggcctgtttgggcagctcttctgtgactttggagaggaaatgatcctcacagattccaatggggagcagccactcagtgctatggtttctatggttaccaaggacaaccccggtgtggttacctgcctggatgaggcccgacacgggtttgagagcggggactttgtctccttttcagaagtacagggcatggttgaactcaacggaaatcagcccatggagatcaaagtcctgggtccttatacctttagcatctgtgacacctccaacttctccgactacatccgtggaggcatcgtcagtcaggtcaaagtacctaagaagattagctttaaatccttggtggcctcactggcagaacctgactttgtggtgacggacttcgccaagttttctcgccctgcccagctgcacattggcttccaggccctgcaccagttctgtgctcagcatggccggccacctcggccccgcaatgaggaggatgcagcagaactggtagccttagcacaggctgtgaatgctcgagccctgccagcagtgcagcaaaataacctggacgaggacctcatccggaagctggcatatgtggctgctggggatctggcacccataaacgccttcattgggggcctggctgcccaggaagtcatgaaggcctgctccgggaagttcatgcccatcatgcagtggctatactttgatgcccttgagtgtctccctgaggacaaagaggtcctcacagaggacaagtgcctccagcgccagaaccgttatgacgggcaagtggctgtgtttggctcagacctgcaagagaagctgggcaagcagaagtatttcctggtgggtgcgggggccattggctgtgagctgctcaagaactttgccatgattgggctgggctgcggggagggtggagaaatcatcgttacagacatggacaccattgagaagtcaaatctgaatcgacagtttcttttccggccctgggatgtcacgaagttaaagtctgacacggctgctgcagctgtgcgccaaatgaatccacatatccgggtgacaagccaccagaaccgtgtgggtcctgacacggagcgcatctatgatgacgattttttccaaaacctagatggcgtggccaatgccctggacaacgtggatgcccgcatgtacatggaccgccgctgtgtctactaccggaagccactgctggagtcaggcacactgggcaccaaaggcaatgtgcaggtggtgatccccttcctgacagagtcgtacagttccagccaggacccacctgagaagtccatccccatctgtaccctgaagaacttccctaatgccatcgagcacaccctgcagtgggctcgggatgagtttgaaggcctcttcaagcagccagcagaaaatgtcaaccagtacctcacagaccccaagtttgtggagcgaacactgcggctggcaggcactcagcccttggaggtgctggaggctgtgcagcgcagcctggtgctgcagcgaccacagacctgggctgactgcgtgacctgggcctgccaccactggcacacccagtactcgaacaacatccggcagctgctgcacaacttccctcctgaccagctcacaagctcaggagcgccgttctggtctgggcccaaacgctgtccacacccgctcacctttgatgtcaacaatcccctgcatctggactatgtgatggctgctgccaacctgtttgcccagacctacgggctgacaggctctcaggaccgagctgctgtggccacattcctgcagtctgtgcaggtccccgaattcacccccaagtctggcgtcaagatccatgtttctgaccaggagctgcagagcgccaatgcctctgttgatgacagtcgtctagaggagctcaaagccactctgcccagcccagacaagctccctggattcaagatgtaccccattgactttgagaaggatgatgacagcaactttcatatggatttcatcgtggctgcatccaacctccgggcagaaaactatgacattccttctgcagaccggcacaagagcaagctgattgcagggaagatcatcccagccattgccacgaccacagcagccgtggttggccttgtgtgtctggagctgtacaaggttgtgcaggggcaccgacagcttgactcctacaagaatggtttcctcaacttggccctgcctttctttggtttctctgaaccccttgccgcaccacgtcaccagtactataaccaagagtggacattgtgggatcgctttgaggtacaagggctgcagcctaatggtgaggagatgaccctcaaacagttcctcgactattttaagacagagcacaaattagagatcaccatgctgtcccagggcgtgtccatgctctattccttcttcatgccagctgccaagctcaaggaacggttggatcagccatgacagagattgtgagccgtgtgtcgaagcgaaagctgggccgccacgtgcgggcgctggtgcttgagctgtgctgtaacgacgagagcggcgaggatgtcgaggttccctatgtccgatacacatccgctgaccccgtntgctcctctaggctggccccttntnacccctctccacaccccttccagccagctgccaagctcaaggaacggttgtatcagccgatgacagagattgtgagccgtgtgtcgaagcgaaagctgggccgccacgtgcgggcgctggtgcttgagctgtgctgtaacgacgagagcggcgaggatgtcgaggttccctatgtccgatacaccatccgctgaccccgtctgctcctctaggctggccccttgtccacccctctccacaccccttccagcccagggttcccatttggcttctggcagtggcccaactagccaagtctggtgttccctcatcatccccctacctgaacccctcttgccactgccttctaccttgtttgaaacctgaatcctaataaagaattaataactcccacatcgcctgccctgctggttccagggaaggaagggacttcctggagc

SEQ ID NO: 321486 - DNA, 3172 bp, Homo sapiens
  misc_feature (24)..(24): n is a, c, g, or t
  misc_feature (31)..(31): n is a, c, g, or t
  misc_feature (35)..(35): n is a, c, g, or t
  misc_feature (37)..(37): n is a, c, g, or t
  misc_feature (46)..(46): n is a, c, g, or t
  misc_feature (2759)..(2759): n is a, c, g, or t
  misc_feature (2782)..(2782): n is a, c, g, or t
  misc_feature (2784)..(2784): n is a, c, g, or t
cctctagacggatcccgcactgantgttcgntgangncttccttangtggtttccaggtggtggtgctcaccaacacccccctggaggaccagctgcgagtgggtgagttctgtcacaaccgtggcatcaagctggtggtggcagacacgcggggcctgtttgggcagctcttctgtgactttggagaggaaatgatcctcacagattccaatggggagcagccactcagtgctatggtttctatggttaccaaggacaaccccggtgtggttacctgcctggatgaggcccgacacgggtttgagagcggggactttgtctccttttcagaagtacagggcatggttgaactcaacggaaatcagcccatggagatcaaagtcctgggtccttatacctttagcatctgtgacacctccaacttctccgactacatccgtggaggcatcgtcagtcaggtcaaagtacctaagaagattagctttaaatccttggtggcctcactggcagaacctgactttgtggtgacggacttcgccaagttttctcgccctgcccagctgcacattggcttccaggccctgcaccagttctgtgctcagcatggccggccacctcggccccgcaatgaggaggatgcagcagaactggtagccttagcacaggctgtgaatgctcgagccctgccagcagtgcagcaaaataacctggacgaggacctcatccggaagctggcatatgtggctgctggggatctggcacccataaacgccttcattgggggcctggctgcccaggaagtcatgaaggcctgctccgggaagttcatgcccatcatgcagtggctatactttgatgcccttgagtgtctccctgaggacaaagaggtcctcacagaggacaagtgcctccagcgccagaaccgttatgacgggcaagtggctgtgtttggctcagacctgcaagagaagctgggcaagcagaagtatttcctggtgggtgcgggggccattggctgtgagctgctcaagaactttgccatgattgggctgggctgcggggagggtggagaaatcatcgttacagacatggacaccattgagaagtcaaatctgaatcgacagtttcttttccggccctgggatgtcacgaagttaaagtctgacacggctgctgcagctgtgcgccaaatgaatccacatatccgggtgacaagccaccagaaccgtgtgggtcctgacacggagcgcatctatgatgacgattttttccaaaacctagatggcgtggccaatgccctggacaacgtggatgcccgcatgtacatggaccgccgctgtgtctactaccggaagccactgctggagtcaggcacactgggcaccaaaggcaatgtgcaggtggtgatccccttcctgacagagtcgtacagttccagccaggacccacctgagaagtccatccccatctgtaccctgaagaacttccctaatgccatcgagcacaccctgcagtgggctcgggatgagtttgaaggcctcttcaagcagccagcagaaaatgtcaaccagtacctcacagaccccaagtttgtggagcgaacactgcggctggcaggcactcagcccttggaggtgctggaggctgtgcagcgcagcctggtgctgcagcgaccacagacctgggctgactgcgtgacctgggcctgccaccactggcacacccagtactcgaacaacatccggcagctgctgcacaacttccctcctgaccagctcacaagctcaggagcgccgttctggtctgggcccaaacgctgtccacacccgctcacctttgatgtcaacaatcccctgcatctggactatgtgatggctgctgccaacctgtttgcccagacctacgggctgacaggctctcaggaccgagctgctgtggccacattcctgcagtctgtgcaggtccccgaattcacccccaagtctggcgtcaagatccatgtttctgaccaggagctgcagagcgccaatgcctctgttgatgacagtcgtctagaggagctcaaagccactctgcccagcccagacaagctccctggattcaagatgtaccccattgactttgagaaggatgatgacagcaactttcatatggatttcatcgtggctgcatccaacctccgggcagaaaactatgacattccttctgcagaccggcacaagagcaagctgattgcagggaagatcatcccagccattgccacgaccacagcagccgtggttggccttgtgtgtctggagctgtacaaggttgtgcaggggcaccgacagcttgactcctacaagaatggtttcctcaacttggccctgcctttctttggtttctctgaaccccttgccgcaccacgtcaccagtactataaccaagagtggacattgtgggatcgctttgaggtacaagggctgcagcctaatggtgaggagatgaccctcaaacagttcctcgactattttaagacagagcacaaattagagatcaccatgctgtcccagggcgtgtccatgctctattccttcttcatgccagctgccaagctcaaggaacggttggatcagccatgacagagattgtgagccgtgtgtcgaagcgaaagctgggccgccacgtgcgggcgctggtgcttgagctgtgctgtaacgacgagagcggcgaggatgtcgaggttccctatgtccgatacacatccgctgaccccgtntgctcctctaggctggccccttntnacccctctccacaccccttccagccagctgccaagctcaaggaacggttgtatcagccgatgacagagattgtgagccgtgtgtcgaagcgaaagctgggccgccacgtgcgggcgctggtgcttgagctgtgctgtaacgacgagagcggcgaggatgtcgaggttccctatgtccgatacaccatccgctgaccccgtctgctcctctaggctggccccttgtccacccctctccacaccccttccagcccagggttcccatttggcttctggcagtggcccaactagccaagtctggtgttccctcatcatccccctacctgaacccctcttgccactgccttctaccttgtttgaaacctgaatcctaataaagaattaataac

SEQ ID NO: 321487 - DNA, 2845 bp, Homo sapiens
  misc_feature (24)..(24): n is a, c, g, or t
  misc_feature (31)..(31): n is a, c, g, or t
  misc_feature (35)..(35): n is a, c, g, or t
  misc_feature (37)..(37): n is a, c, g, or t
  misc_feature (46)..(46): n is a, c, g, or t
cctctagacggatcccgcactgantgttcgntgangncttccttangtggtttccaggtggtggtgctcaccaacacccccctggaggaccagctgcgagtgggtgagttctgtcacaaccgtggcatcaagctggtggtggcagacacgcggggcctgtttgggcagctcttctgtgactttggagaggaaatgatcctcacagattccaatggggagcagccactcagtgctatggtttctatggttaccaaggacaaccccggtgtggttacctgcctggatgaggcccgacacgggtttgagagcggggactttgtctccttttcagaagtacagggcatggttgaactcaacggaaatcagcccatggagatcaaagtcctgggtccttatacctttagcatctgtgacacctccaacttctccgactacatccgtggaggcatcgtcagtcaggtcaaagtacctaagaagattagctttaaatccttggtggcctcactggcagaacctgactttgtggtgacggacttcgccaagttttctcgccctgcccagctgcacattggcttccaggccctgcaccagttctgtgctcagcatggccggccacctcggccccgcaatgaggaggatgcagcagaactggtagccttagcacaggctgtgaatgctcgagccctgccagcagtgcagcaaaataacctggacgaggacctcatccggaagctggcatatgtggctgctggggatctggcacccataaacgccttcattgggggcctggctgcccaggaagtcatgaaggcctgctccgggaagttcatgcccatcatgcagtggctatactttgatgcccttgagtgtctccctgaggacaaagaggtcctcacagaggacaagtgcctccagcgccagaaccgttatgacgggcaagtggctgtgtttggctcagacctgcaagagaagctgggcaagcagaagtatttcctggtgggtgcgggggccattggctgtgagctgctcaagaactttgccatgattgggctgggctgcggggagggtggagaaatcatcgttacagacatggacaccattgagaagtcaaatctgaatcgacagtttcttttccggccctgggatgtcacgaagttaaagtctgacacggctgctgcagctgtgcgccaaatgaatccacatatccgggtgacaagccaccagaaccgtgtgggtcctgacacggagcgcatctatgatgacgattttttccaaaacctagatggcgtggccaatgccctggacaacgtggatgcccgcatgtacatggaccgccgctgtgtctactaccggaagccactgctggagtcaggcacactgggcaccaaaggcaatgtgcaggtggtgatccccttcctgacagagtcgtacagttccagccaggacccacctgagaagtccatccccatctgtaccctgaagaacttccctaatgccatcgagcacaccctgcagtgggctcgggatgagtttgaaggcctcttcaagcagccagcagaaaatgtcaaccagtacctcacagaccccaagtttgtggagcgaacactgcggctggcaggcactcagcccttggaggtgctggaggctgtgcagcgcagcctggtgctgcagcgaccacagacctgggctgactgcgtgacctgggcctgccaccactggcacacccagtactcgaacaacatccggcagctgctgcacaacttccctcctgaccagctcacaagctcaggagcgccgttctggtctgggcccaaacgctgtccacacccgctcacctttgatgtcaacaatcccctgcatctggactatgtgatggctgctgccaacctgtttgcccagacctacgggctgacaggctctcaggaccgagctgctgtggccacattcctgcagtctgtgcaggtccccgaattcacccccaagtctggcgtcaagatccatgtttctgaccaggagctgcagagcgccaatgcctctgttgatgacagtcgtctagaggagctcaaagccactctgcccagcccagacaagctccctggattcaagatgtaccccattgactttgagaaggatgatgacagcaactttcatatggatttcatcgtggctgcatccaacctccgggcagaaaactatgacattccttctgcagaccggcacaagagcaagctgattgcagggaagatcatcccagccattgccacgaccacagcagccgtggttggccttgtgtgtctggagctgtacaaggttgtgcaggggcaccgacagcttgactcctacaagaatggtttcctcaacttggccctgcctttctttggtttctctgaaccccttgccgcaccacgtcaccagtactataaccaagagtggacattgtgggatcgctttgaggtacaagggctgcagcctaatggtgaggagatgaccctcaaacagttcctcgactattttaagacagagcacaaattagagatcaccatgctgtcccagggcgtcgccacgtgcgggcgctggtgcttgagctgtgctgtaacgacgagagcggcgaggatgtcgaggttccctatgtccgatacaccatccgctgaccccgtctgctcctctaggctggccccttgtccacccctctccacaccccttccagcccagggttcccatttggcttctggcagtggcccaactagccaagtctggtgttccctcatcatccccctacctgaacccctcttgccactgccttctaccttgtttgaaacctgaatcctaataaagaattaataac

SEQ ID NO: 321488 - DNA, 804 bp, Homo sapiens
tagcggaccgaactctggcaggcacagagcaagctgattgcagggaagatcatcccagccattgccacgaccacagcagccgtggttggccttgtgtgtctggagctgtacaaggttgtgcaggggcaccgacagcttgactcctacaagaatggtttcctcaacttggccctgcctttctttggtttctctgaaccccttgccgcaccacgtcaccagtactataaccaagagtggacattgtgggatcgctttgaggtacaagggctgcagcctaatggtgaggagatgaccctcaaacagttcctcgactattttaagacagagcacaaattagagatcaccatgctgtcccagggcgtgtccatgctctattccttcttcatgccagctgccaagctcaaggaacggttggatcagccgatgacagagattgtgagccgtgtgtcgaagcgaaagctgggccgccacgtgcgggcgctggtgcttgagctgtgctgtaacgacgagagcggcgaggatgtcgaggttccctatgtccgatacaccatccgctgaccccgtctgctcctctaggctggccccttgtccacccctctccacaccccttccagcccagggttcccatttggcttctggcagtggcccaactagccaagtctggtgttccctcatcatccccctacctgaacccctcttgccactgccttctaccttgtttgaaacctgaatcctaataaagaattaataactcccacatcgcctgccctgctggttccagggaaggaagggacttcctggagc

SEQ ID NO: 321489 - DNA, 2805 bp, Homo sapiens
  misc_feature (24)..(24): n is a, c, g, or t
  misc_feature (31)..(31): n is a, c, g, or t
  misc_feature (35)..(35): n is a, c, g, or t
  misc_feature (37)..(37): n is a, c, g, or t
  misc_feature (46)..(46): n is a, c, g, or t
cctctagacggatcccgcactgantgttcgntgangncttccttangtggtttccaggtggtggtgctcaccaacacccccctggaggaccagctgcgagtgggtgagttctgtcacaaccgtggcatcaagctggtggtggcagacacgcggggcctgtttgggcagctcttctgtgactttggagaggaaatgatcctcacagattccaatggggagcagccactcagtgctatggtttctatggttaccaaggacaaccccggtgtggttacctgcctggatgaggcccgacacgggtttgagagcggggactttgtctccttttcagaagtacagggcatggttgaactcaacggaaatcagcccatggagatcaaagtcctgggtccttatacctttagcatctgtgacacctccaacttctccgactacatccgtggaggcatcgtcagtcaggtcaaagtacctaagaagattagctttaaatccttggtggcctcactggcagaacctgactttgtggtgacggacttcgccaagttttctcgccctgcccagctgcacattggcttccaggccctgcaccagttctgtgctcagcatggccggccacctcggccccgcaatgaggaggatgcagcagaactggtagccttagcacaggctgtgaatgctcgagccctgccagcagtgcagcaaaataacctggacgaggacctcatccggaagctggcatatgtggctgctggggatctggcacccataaacgccttcattgggggcctggctgcccaggaagtcatgaaggcctgctccgggaagttcatgcccatcatgcagtggctatactttgatgcccttgagtgtctccctgaggacaaagaggtcctcacagaggacaagtgcctccagcgccagaaccgttatgacgggcaagtggctgtgtttggctcagacctgcaagagaagctgggcaagcagaagtatttcctggtgggtgcgggggccattggctgtgagctgctcaagaactttgccatgattgggctgggctgcggggagggtggagaaatcatcgttacagacatggacaccattgagaagtcaaatctgaatcgacagtttcttttccggccctgggatgtcacgaagttaaagtctgacacggctgctgcagctgtgcgccaaatgaatccacatatccgggtgacaagccaccagaaccgtgtgggtcctgacacggagcgcatctatgatgacgattttttccaaaacctagatggcgtggccaatgccctggacaacgtggatgcccgcatgtacatggaccgccgctgtgtctactaccggaagccactgctggagtcaggcacactgggcaccaaaggcaatgtgcaggtggtgatccccttcctgacagagtcgtacagttccagccaggacccacctgagaagtccatccccatctgtaccctgaagaacttccctaatgccatcgagcacaccctgcagtgggctcgggatgagtttgaaggcctcttcaagcagccagcagaaaatgtcaaccagtacctcacagaccccaagtttgtggagcgaacactgcggctggcaggcactcagcccttggaggtgctggaggctgtgcagcgcagcctggtgctgcagcgaccacagacctgggctgactgcgtgacctgggcctgccaccactggcacacccagtactcgaacaacatccggcagctgctgcacaacttccctcctgaccagctcacaagctcaggagcgccgttctggtctgggcccaaacgctgtccacacccgctcacctttgatgtcaacaatcccctgcatctggactatgtgatggctgctgccaacctgtttgcccagacctacgggctgacaggctctcaggaccgagctgctgtggccacattcctgcagtctgtgcaggtccccgaattcacccccaagtctggcgtcaagatccatgtttctgaccaggagctgcagagcgccaatgcctctgttgatgacagtcgtctagaggagctcaaagccactctgcccagcccagacaagctccctggattcaagatgtaccccattgactttgagaaggatgatgacagcaactttcatatggatttcatcgtggctgcatccaacctccgggcagaaaactatgacattccttctgcagaccggcacaagagcaagctgattgcagggaagatcatcccagccattgccacgaccacagcagccgtggttggccttgtgtgtctggagctgtacaaggttgtgcaggggcaccgacagcttgactcctacaagaatggtttcctcaacttggccctgcctttctttggtttctctgaaccccttgccgcaccacgtcaccaggtccatgctctattccttcttcatgccagctgccaagctcaaggaacggttggatcagccgatgacagagattgtgagccgtgtgtcgaagcgaaagctgggccgccacgtgcgggcgctggtgcttgagctgtgctgtaacgacgagagcggcgaggatgtcgaggttccctatgtccgatacaccatccgctgaccccgtctgctcctctaggctggccccttgtccacccctctccacaccccttccagcccagggttcccatttggcttctggcagtggcccaactagccaagtctggtgttccctcatcatccccctacctgaacccctcttgccactgccttctaccttgtttgaaacctgaatcctaataaagaattaataac

SEQ ID NO: 321490 - DNA, 2629 bp, Homo sapiens
  misc_feature (24)..(24): n is a, c, g, or t
  misc_feature (31)..(31): n is a, c, g, or t
  misc_feature (35)..(35): n is a, c, g, or t
  misc_feature (37)..(37): n is a, c, g, or t
  misc_feature (46)..(46): n is a, c, g, or t
cctctagacggatcccgcactgantgttcgntgangncttccttangtggtttccaggtggtggtgctcaccaacacccccctggaggaccagctgcgagtgggtgagttctgtcacaaccgtggcatcaagctggtggtggcagacacgcggggcctgtttgggcagctcttctgtgactttggagaggaaatgatcctcacagattccaatggggagcagccactcagtgctatggtttctatggttaccaaggacaaccccggtgtggttacctgcctggatgaggcccgacacgggtttgagagcggggactttgtctccttttcagaagtacagggcatggttgaactcaacggaaatcagcccatggagatcaaagtcctgggtccttatacctttagcatctgtgacacctccaacttctccgactacatccgtggaggcatcgtcagtcaggtcaaagtacctaagaagattagctttaaatccttggtggcctcactggcagaacctgactttgtggtgacggacttcgccaagttttctcgccctgcccagctgcacattggcttccaggccctgcaccagttctgtgctcagcatggccggccacctcggccccgcaatgaggaggatgcagcagaactggtagccttagcacaggctgtgaatgctcgagccctgccagcagtgcagcaaaataacctggacgaggacctcatccggaagctggcatatgtggctgctggggatctggcacccataaacgccttcattgggggcctggctgcccaggaagtcatgaaggcctgctccgggaagttcatgcccatcatgcagtggctatactttgatgcccttgagtgtctccctgaggacaaagaggtcctcacagaggacaagtgcctccagcgccagaaccgttatgacgggcaagtggctgtgtttggctcagacctgcaagagaagctgggcaagcagaagtatttcctggtgggtgcgggggccattggctgtgagctgctcaagaactttgccatgattgggctgggctgcggggagggtggagaaatcatcgttacagacatggacaccattgagaagtcaaatctgaatcgacagtttcttttccggccctgggatgtcacgaagttaaagtctgacacggctgctgcagctgtgcgccaaatgaatccacatatccgggtgacaagccaccagaaccgtgtgggtcctgacacggagcgcatctatgatgacgattttttccaaaacctagatggcgtggccaatgccctggacaacgtggatgcccgcatgtacatggaccgccgctgtgtctactaccggaagccactgctggagtcaggcacactgggcaccaaaggcaatgtgcaggtggtgatccccttcctgacagagtcgtacagttccagccaggacccacctgagaagtccatccccatctgtaccctgaagaacttccctaatgccatcgagcacaccctgcagtgggctcgggatgagtttgaaggcctcttcaagcagccagcagaaaatgtcaaccagtacctcacagaccccaagtttgtggagcgaacactgcggctggcaggcactcagcccttggaggtgctggaggctgtgcagcgcagcctggtgctgcagcgaccacagacctgggctgactgcgtgacctgggcctgccaccactggcacacccagtactcgaacaacatccggcagctgctgcacaacttccctcctgaccagctcacaagctcaggagcgccgttctggtctgggcccaaacgctgtccacacccgctcacctttgatgtcaacaatcccctgcatctggactatgtgatggctgctgccaacctgtttgcccagacctacgggctgacaggctctcaggaccgagctgctgtggccacattcctgcagtctgtgcaggtccccgaattcacccccaagtctggcgtcaagatccatgtttctgaccaggagctgcagagcgccaatgcctctgttgatgacagtcgtctagaggagctcaaagccactctgcccagcccagacaagctccctggattcaagatgtaccccattgactttgagaaggatgatgacagcaactttcatatggatttcatcgtggctgcatccaacctccgggcagaaaactatgacattccttctgcagaccggcacaagagcaagctgattgcagggaagatcatcccagccattgccacgaccacagcagccgtggttggccttgtgtgtctggagctgtacaaggttgtgcaggggcaccgacagcttgactcctacaagaatggtttcctcaacttggccctgcctttctttggtttctctgaaccccttgccgcaccacgtcaccagtccgatacaccatccgctgaccccgtctgctcctctaggctggccccttgtccacccctctccacaccccttccagcccagggttcccatttggcttctggcagtggcccaactagccaagtctggtgttccctcatcatccccctacctgaacccctcttgccactgccttctaccttgtttgaaacctgaatcctaataaagaattaataac

SEQ ID NO: 321491 - DNA, 3170 bp, Homo sapiens
  misc_feature (24)..(24): n is a, c, g, or t
  misc_feature (31)..(31): n is a, c, g, or t
  misc_feature (35)..(35): n is a, c, g, or t
  misc_feature (37)..(37): n is a, c, g, or t
  misc_feature (46)..(46): n is a, c, g, or t
  misc_feature (2705)..(2705): n is a, c, g, or t
  misc_feature (2728)..(2728): n is a, c, g, or t
  misc_feature (2730)..(2730): n is a, c, g, or t
cctctagacggatcccgcactgantgttcgntgangncttccttangtggtttccaggtggtggtgctcaccaacacccccctggaggaccagctgcgagtgggtgagttctgtcacaaccgtggcatcaagctggtggtggcagacacgcggggcctgtttgggcagctcttctgtgactttggagaggaaatgatcctcacagattccaatggggagcagccactcagtgctatggtttctatggttaccaaggacaaccccggtgtggttacctgcctggatgaggcccgacacgggtttgagagcggggactttgtctccttttcagaagtacagggcatggttgaactcaacggaaatcagcccatggagatcaaagtcctgggtccttatacctttagcatctgtgacacctccaacttctccgactacatccgtggaggcatcgtcagtcaggtcaaagtacctaagaagattagctttaaatccttggtggcctcactggcagaacctgactttgtggtgacggacttcgccaagttttctcgccctgcccagctgcacattggcttccaggccctgcaccagttctgtgctcagcatggccggccacctcggccccgcaatgaggaggatgcagcagaactggtagccttagcacaggctgtgaatgctcgagccctgccagcagtgcagcaaaataacctggacgaggacctcatccggaagctggcatatgtggctgctggggatctggcacccataaacgccttcattgggggcctggctgcccaggaagtcatgaaggcctgctccgggaagttcatgcccatcatgcagtggctatactttgatgcccttgagtgtctccctgaggacaaagaggtcctcacagaggacaagtgcctccagcgccagaaccgttatgacgggcaagtggctgtgtttggctcagacctgcaagagaagctgggcaagcagaagtatttcctggtgggtgcgggggccattggctgtgagctgctcaagaactttgccatgattgggctgggctgcggggagggtggagaaatcatcgttacagacatggacaccattgagaagtcaaatctgaatcgacagtttcttttccggccctgggatgtcacgaagttaaagtctgacacggctgctgcagctgtgcgccaaatgaatccacatatccgggtgacaagccaccagaaccgtgtgggtcctgacacggagcgcatctatgatgacgattttttccaaaacctagatggcgtggccaatgccctggacaacgtggatgcccgcatgtacatggaccgccgctgtgtctactaccggaagccactgctggagtcaggcacactgggcaccaaaggcaatgtgcaggtggtgatccccttcctgacagagtcgtacagttccagccaggacccacctgagaagtccatccccatctgtaccctgaagaacttccctaatgccatcgagcacaccctgcagtgggctcgggatgagtttgaaggcctcttcaagcagccagcagaaaatgtcaaccagtacctcacagaccccaagtttgtggagcgaacactgcggctggcaggcactcagcccttggaggtgctggaggctgtgcagcgcagcctggtgctgcagcgaccacagacctgggctgactgcgtgacctgggcctgccaccactggcacacccagtactcgaacaacatccggcagctgctgcacaacttccctcctgaccagctcacaagctcaggagcgccgttctggtctgggcccaaacgctgtccacacccgctcacctttgatgtcaacaatcccctgcatctggactatgtgatggctgctgccaacctgtttgcccagacctacgggctgacaggctctcaggaccgagctgctgtggccacattcctgcagtctgtgcaggtccccgaattcacccccaagtctggcgtcaagatccatgtttctgaccaggagctgcagagcgccaatgcctctgttgatgacagtcgtctagaggagctcaaagccactctgcccagcccagacaagctccctggattcaagatgtaccccattgactttgagaaggatgatgacagcaactttcatatggatttcatcgtggctgcatccaacctccgggcagaaatcatcccagccattgccacgaccacagcagccgtggttggccttgtgtgtctggagctgtacaaggttgtgcaggggcaccgacagcttgactcctacaagaatggtttcctcaacttggccctgcctttctttggtttctctgaaccccttgccgcaccacgtcaccagtactataaccaagagtggacattgtgggatcgctttgaggtacaagggctgcagcctaatggtgaggagatgaccctcaaacagttcctcgactattttaagacagagcacaaattagagatcaccatgctgtcccagggcgtgtccatgctctattccttcttcatgccagctgccaagctcaaggaacggttggatcagccatgacagagattgtgagccgtgtgtcgaagcgaaagctgggccgccacgtgcgggcgctggtgcttgagctgtgctgtaacgacgagagcggcgaggatgtcgaggttccctatgtccgatacacatccgctgaccccgtntgctcctctaggctggccccttntnacccctctccacaccccttccagccagctgccaagctcaaggaacggttgtatcagccgatgacagagattgtgagccgtgtgtcgaagcgaaagctgggccgccacgtgcgggcgctggtgcttgagctgtgctgtaacgacgagagcggcgaggatgtcgaggttccctatgtccgatacaccatccgctgaccccgtctgctcctctaggctggccccttgtccacccctctccacaccccttccagcccagggttcccatttggcttctggcagtggcccaactagccaagtctggtgttccctcatcatccccctacctgaacccctcttgccactgccttctaccttgtttgaaacctgaatcctaataaagaattaataactcccacatcgcctgccctgctggttccagggaaggaagggacttcctggagc

SEQ ID NO: 321492 - DNA, 2458 bp, Homo sapiens
  misc_feature (24)..(24): n is a, c, g, or t
  misc_feature (31)..(31): n is a, c, g, or t
  misc_feature (35)..(35): n is a, c, g, or t
  misc_feature (37)..(37): n is a, c, g, or t
  misc_feature (46)..(46): n is a, c, g, or t
cctctagacggatcccgcactgantgttcgntgangncttccttangtggtttccaggtggtggtgctcaccaacacccccctggaggaccagctgcgagtgggtgagttctgtcacaaccgtggcatcaagctggtggtggcagacacgcggggcctgtttgggcagctcttctgtgactttggagaggaaatgatcctcacagattccaatggggagcagccactcagtgctatggtttctatggttaccaaggacaaccccggtgtggttacctgcctggatgaggcccgacacgggtttgagagcggggactttgtctccttttcagaagtacagggcatggttgaactcaacggaaatcagcccatggagatcaaagtcctgggtccttatacctttagcatctgtgacacctccaacttctccgactacatccgtggaggcatcgtcagtcaggtcaaagtacctaagaagattagctttaaatccttggtggcctcactggcagaacctgactttgtggtgacggacttcgccaagttttctcgccctgcccagctgcacattggcttccaggccctgcaccagttctgtgctcagcatggccggccacctcggccccgcaatgaggaggatgcagcagaactggtagccttagcacaggctgtgaatgctcgagccctgccagcagtgcagcaaaataacctggacgaggacctcatccggaagctggcatatgtggctgctggggatctggcacccataaacgccttcattgggggcctggctgcccaggaagtcatgaaggcctgctccgggaagttcatgcccatcatgcagtggctatactttgatgcccttgagtgtctccctgaggacaaagaggtcctcacagaggacaagtgcctccagcgccagaaccgttatgacgggcaagtggctgtgtttggctcagacctgcaagagaagctgggcaagcagaagtatttcctggtgggtgcgggggccattggctgtgagctgctcaagaactttgccatgattgggctgggctgcggggagggtggagaaatcatcgttacagacatggacaccattgagaagtcaaatctgaatcgacagtttcttttccggccctgggatgtcacgaagttaaagtctgacacggctgctgcagctgtgcgccaaatgaatccacatatccgggtgacaagccaccagaaccgtgtgggtcctgacacggagcgcatctatgatgacgattttttccaaaacctagatggcgtggccaatgccctggacaacgtggatgcccgcatgtacatggaccgccgctgtgtctactaccggaagccactgctggagtcaggcacactgggcaccaaaggcaatgtgcaggtggtgatccccttcctgacagagtcgtacagttccagccaggacccacctgagaagtccatccccatctgtaccctgaagaacttccctaatgccatcgagcacaccctgcaggtgataagctgtgggagaagggaaagaggccaggcatctggccaggctgctgcctctccgcccccaggcccttgccttgccttcagatgttgcatgcctaagtgtaagatgtgccttttctccaaacctccctccctcacttcccaccaggcagcctaggtttctagaatgactcattcttttttcacttttattttgatttttttttcaacacatagacaaatattaagaatattatgatgaatactcaaataccattcctcacctaaatttaacaattcttaatgttttgccacattttcttcttagatttatgtagatttttcttctttgtgcttaaatgtgtcacagacatcacagccctttactccctactatttcagtgcctctgccaagtgaggatatgttgctgtagaacagggtttcttagcttcagcactactgacatttggggctggttatttatttgtcatgggagaggggatgccctgtgcactgtaggatgtttctcagcattcctgacttctgcccactagatgccaatagcactctccctccatcatgacatctcaaaatgtctccagacattgccagatgtccccaggggtgccacatcactcccagttgagaactacttctgtctaacagaaacatcattttcatgctcagcaaaattaacaatcattcttaccatctcttctagttatttatttgtctctaatggtccatattcaggttttccccagctgttactcaaaatgagtttaacagctggtttgtcaggatgattctgtgtgtatggtgcatttatctacagaacagtgcatatattatctagctcggggtgtccaatcatttggcttccctgggccacattggaagaagaattgtctcgggccacacataaaatatactaatactaacgatagctgatgagctgaaa

SEQ ID NO: 321493 - DNA, 1494 bp, Homo sapiens
  misc_feature (24)..(24): n is a, c, g, or t
  misc_feature (31)..(31): n is a, c, g, or t
  misc_feature (35)..(35): n is a, c, g, or t
  misc_feature (37)..(37): n is a, c, g, or t
  misc_feature (46)..(46): n is a, c, g, or t
cctctagacggatcccgcactgantgttcgntgangncttccttangtggtttccaggtggtggtgctcaccaacacccccctggaggaccagctgcgagtgggtgagttctgtcacaaccgtggcatcaagctggtggtggcagacacgcggggcctgtttgggcagctcttctgtgactttggagaggaaatgatcctcacagattccaatggggagcagccactcagtgctatggtttctatggttaccaaggacaaccccggtgtggttacctgcctggatgaggcccgacacgggtttgagagcggggactttgtctccttttcagaagtacagggcatggttgaactcaacggaaatcagcccatggagatcaaagtcctgggtccttatacctttagcatctgtgacacctccaacttctccgactacatccgtggaggcatcgtcagtcaggtcaaagtacctaagaagattagctttaaatccttggtggcctcactggcagaacctgactttgtggtgacggacttcgccaagttttctcgccctgcccagctgcacattggcttccaggccctgcaccagttctgtgctcagcatggccggccacctcggccccgcaatgaggaggatgcagcagaactggtagccttagcacaggctgtgaatgctcgagccctgccagcagtgcagcaaaataacctggacgaggacctcatccggaagctggcatatgtggctgctggggatctggcacccataaacgccttcattgggggcctggctgcccaggaagtcatgaaggcctgctccgggaagttcatgcccatcatgcagtggctatactttgatgcccttgagtgtctccctgaggacaaagaggtcctcacagaggacaagtgcctccagcgccagaaccgttatgacgggcaagtggctgtgtttggctcagacctgcaagagaagctgggcaagcagaagtatttcctggtgggtgcgggggccattggctgtgagctgctcaagaactttgccatgattgggctgggctgcggggagggtggagaaatcatcgttacagacatggacaccattgagaagtcaaatctgaatcgacagtttcttttccggccctgggatgtcacgaagttaaagtctgacacggctgctgcagctgtgcgccaaatgaatccacatatccgggtgacaagccaccagaaccgtgtgggtcctgacacggagcgcatctatgatgacgattttttccaaaacctagatggcgtggccaatgccctggacaacgtggatgcccgcatgtacatggaccgccgctgtgtctactaccggaagccactgctggagtcaggcacactgggcaccaaaggcaatgtgcaggtggtgatccccttcctgacagagtcgtacagttccagccaggacccacctatatgacctggataactagaagaaaagatgtgcttggtgagt

SEQ ID NO: 321494 - DNA, 236 bp, Homo sapiens
cctcaaaccctctggtttgggaatagagaatgcttacgcttgaaaatcttcagtttggagactcaggtatgtttagaaactaagccacagctcagctttgccaaacagttcacagtgtgtatgttatggtgggggcctgagcaaatgttgaggtaggaagggtgtagattgtttttctgctgggggtgggggatctttagctcctctgcagagtttctgtcccagactcctgcttg

SEQ ID NO: 321495 - DNA, 252 bp, Homo sapiens
tagctgggactacaggcatgcgccaccacgcccggctgattttgcattttaagtagagacagggtttctccatgttggtcaggctggtctcgaattcccgacctcaggtgatctgcctgcttcagcctcccaaagtgttggtattacaggcgtgagccaccacacctcacccctcctttttcttgttcccattctttctgtcagagatctttctgcctctgccagaagcccttctttttggcctttctttcc

SEQ ID NO: 321496 - DNA, 260 bp, Homo sapiens
ctgtaacgacgagagcggcgaggatgtcgaggttccctatgtccgatacaccatccgctgaccccgtctgctcctctaggctggccccttgtccacccctctccacaccccttccagcccagggttcccatttggcttctggcagtggcccaactagccaagtctggtgttccctcatcatccccctacctgaacccctcttgccactgccttctaccttgtttgaaacctgaatcctaataaagaattaataactccca

SEQ ID NO: 321497 - DNA, 358 bp, Homo sapiens
gacagatgggggctggaccctctgggatggtctccatcttacactcccctctttgtcttgcagtactataaccaagagtggacattgtgggatcgctttgaggtacaagggctgcagcctaatggtgaggagatgaccctcaaacagttcctcgactattttaaggtaaggcccctcccttactctgtcaccccacctcagggggcgaggtgtacacggtgacttgctggcctgtccacctccatgaccctgctgttccccctccctctccagacagagcacaaattagagatcaccatgctgtcccagggcgtgtccatgctctattccttcttcatgccagctgccaagctcaagg

SEQ ID NO: 321498 - DNA, 355 bp, Homo sapiens
gtgggaaggaggtggcggctccccactcgagggctgatgtgctcacccttccctgccctgccttctcctagcccctgcatctggactatgtgatggctgctgccaacctgtttgcccagacctacgggctgacaggctctcaggaccgagctgctgtggccacattcctgcagtctgtgcaggtccccgaattcacccccaagtctggcgtcaagatccatgtttctgaccaggagctgcagagcgccaatgcctctgttggtgagggtgtttggccagttggccaggagtcaccccacatgtccccggcctagtccagcctccccaccagtcctctacccctggttctgctctg

SEQ ID NO: 321499 - DNA, 366 bp, Homo sapiens
gctgctgcagctgtgcgccaaatgaatccacatatccgggtgacaagccaccagaaccgtgtgggtcctgacacggagcgcatctatgatgacgattttttccaaaacctagatggcgtggccaatgccctggacaacgtggatgcccgtgagtttggaggcgggtgaggtggtcacgggcaaagttgtgtgtgtttcggtgtgtatataccaagaggggtgtccgtctttctgtcctctcctgatgtttctttcctagctctcgctttgtgctccccacaggcatgtacatggaccgccgctgtgtctactaccggaagccactgctggagtcaggcacactgggcaccaaaggcaatgtgcagg

SEQ ID NO: 321500 - DNA, 896 bp, Homo sapiens
tggagaaaacaggagtatctggagccagccccgggcctttgtggggatcagattgtgggcctgccatatggctctgaatgagtaggtgttcccagccatccctttgtgatctgggagagtccagcaggcaattgcagtggaggatacacatcttctttatctgatcctctccccactgccttcacaccctccccactcataacaggatgatgacagcaactttcatatggatttcatcgtggctgcatccaacctccgggcagaaaactatgacattccttctgcagaccggcacaagagcaagctgattgcagggaagatcatcccagccattgccacgaccacagcagccgtggttggccttgtgcatatggcaaggccaaggactctgaactcactttccctggaggtgggggtgctatcagctgcttaatggagcatcatggaaaatgtgggactcaaggcctgaaggactccattcctaagagatgggagcaggagacatgctacggagtttgaatcttgcctagcacagggatttctgcctgctggaagggctctgtcagggcctagtggaagcccctgcctcagtggggcaaactgccactggacacacccatcattcatcatcacctctctgggacagtagtagcagccaggcacctccaaagagcttgacaacagaggaacccgcttcggcccctcctctgaagacaggatcctgcgctactccaactctgaactggttcaaggtgagagacgtcatccacagaggccacaaaaccaagaggtggatgcctcattgttacttcatgctgtctgggagcaaagagagggccttaggcacaaatcctccaacccgcatctgccctggcgggatcctcagatcacccgcc

SEQ ID NO: 321501 - DNA, 3000 bp, Homo sapiens
  misc_feature (24)..(24): n is a, c, g, or t
  misc_feature (31)..(31): n is a, c, g, or t
  misc_feature (35)..(35): n is a, c, g, or t
  misc_feature (37)..(37): n is a, c, g, or t
  misc_feature (46)..(46): n is a, c, g, or t
cctctagacggatcccgcactgantgttcgntgangncttccttangtggtttccaggtggtggtgctcaccaacacccccctggaggaccagctgcgagtgggtgagttctgtcacaaccgtggcatcaagctggtggtggcagacacgcggggcctgtttgggcagctcttctgtgactttggagaggaaatgatcctcacagattccaatggggagcagccactcagtgctatggtttctatggttaccaaggacaaccccggtgtggttacctgcctggatgaggcccgacacgggtttgagagcggggactttgtctccttttcagaagtacagggcatggttgaactcaacggaaatcagcccatggagatcaaagtcctgggtccttatacctttagcatctgtgacacctccaacttctccgactacatccgtggaggcatcgtcagtcaggtcaaagtacctaagaagattagctttaaatccttggtggcctcactggcagaacctgactttgtggtgacggacttcgccaagttttctcgccctgcccagctgcacattggcttccaggccctgcaccagttctgtgctcagcatggccggccacctcggccccgcaatgaggaggatgcagcagaactggtagccttagcacaggctgtgaatgctcgagccctgccagcagtgcagcaaaataacctggacgaggacctcatccggaagctggcatatgtggctgctggggatctggcacccataaacgccttcattgggggcctggctgcccaggaagtcatgaaggcctgctccgggaagttcatgcccatcatgcagtggctatactttgatgcccttgagtgtctccctgaggacaaagaggtcctcacagaggacaagtgcctccagcgccagaaccgttatgacgggcaagtggctgtgtttggctcagacctgcaagagaagctgggcaagcagaagtatttcctggtgggtgcgggggccattggctgtgagctgctcaagaactttgccatgattgggctgggctgcggggagggtggagaaatcatcgttacagacatggacaccattgagaagtcaaatctgaatcgacagtttcttttccggccctgggatgtcacgaagttaaagtctgacacggctgctgcagctgtgcgccaaatgaatccacatatccgggtgacaagccaccagaaccgtgtgggtcctgacacggagcgcatctatgatgacgattttttccaaaacctagatggcgtggccaatgccctggacaacgtggatgcccgcatgtacatggaccgccgctgtgtctactaccggaagccactgctggagtcaggcacactgggcaccaaaggcaatgtgcaggtggtgatccccttcctgacagagtcgtacagttccagccaggacccacctgagaagtccatccccatctgtaccctgaagaacttccctaatgccatcgagcacaccctgcagtgggctcgggatgagtttgaaggcctcttcaagcagccagcagaaaatgtcaaccagtacctcacagaccccaagtttgtggagcgaacactgcggctggcaggcactcagcccttggaggtgctggaggctgtgcagcgcagcctggtgctgcagcgaccacagacctgggctgactgcgtgacctgggcctgccaccactggcacacccagtactcgaacaacatccggcagctgctgcacaacttccctcctgaccagctcacaagctcaggagcgccgttctggtctgggcccaaacgctgtccacacccgctcacctttgatgtcaacaatcccctgcatctggactatgtgatggctgctgccaacctgtttgcccagacctacgggctgacaggctctcaggaccgagctgctgtggccacattcctgcagtctgtgcaggtccccgaattcacccccaagtctggcgtcaagatccatgtttctgaccaggagctgcagagcgccaatgcctctgttgatgacagtcgtctagaggagctcaaagccactctgcccagcccagacaagctccctggattcaagatgtaccccattgactttgagaaggatgatgacagcaactttcatatggatttcatcgtggctgcatccaacctccgggcagaaaactatgacattccttctgcagaccggcacaagagcaagctgattgcagggaagatcatcccagccattgccacgaccacagcagccgtggttggccttgtgtgtctggagctgtacaaggttgtgcaggggcaccgacagcttgactcctacaagaatggtttcctcaacttggccctgcctttctttggtttctctgaaccccttgccgcaccacgtcaccagtactataaccaagagtggacattgtgggatcgctttgaggtacaagggctgcagcctaatggtgaggagatgaccctcaaacagttcctcgactattttaagacagagcacaaattagagatcaccatgctgtcccagggcgtgtccatgctctattccttcttcatgccagctgccaagctcaaggaacggttggatcagccgatgacagagattgtgagccgtgtgtcgaagcgaaagctgggccgccacgtgcgggcgctggtgcttgagctgtgctgtaacgacgagagcggcgaggatgtcgaggttccctatgtccgatacaccatccgctgaccccgtctgctcctctaggctggccccttgtccacccctctccacaccccttccagcccagggttcccatttggcttctggcagtggcccaactagccaagtctggtgttccctcatcatccccctacctgaacccctcttgccactgccttctaccttgtttgaaacctgaatcctaataaagaattaataactcccacatcgcctgccctgctggttccagggaaggaagggacttcctggagc

SEQ ID NO: 321502 - DNA, 2572 bp, Homo sapiens
  misc_feature (14)..(14): n is a, c, g, or t
  misc_feature (17)..(17): n is a, c, g, or t
  misc_feature (22)..(22): n is a, c, g, or t
  misc_feature (30)..(30): n is a, c, g, or t
agctaggtagaggncgngtgtnaatcggcngagggtcaagtactatgaagatagctttaaatccttggtggcctcactggcagaacctgactttgtggtgacggacttcgccaagttttctcgccctgcccagctgcacattggcttccaggccctgcaccagttctgtgctcagcatggccggccacctcggccccgcaatgaggaggatgcagcagaactggtagccttagcacaggctgtgaatgctcgagccctgccagcagtgcagcaaaataacctggacgaggacctcatccggaagctggcatatgtggctgctggggatctggcacccataaacgccttcattgggggcctggctgcccaggaagtcatgaaggcctgctccgggaagttcatgcccatcatgcagtggctatactttgatgcccttgagtgtctccctgaggacaaagaggtcctcacagaggacaagtgcctccagcgccagaaccgttatgacgggcaagtggctgtgtttggctcagacctgcaagagaagctgggcaagcagaagtatttcctggtgggtgcgggggccattggctgtgagctgctcaagaactttgccatgattgggctgggctgcggggagggtggagaaatcatcgttacagacatggacaccattgagaagtcaaatctgaatcgacagtttcttttccggccctgggatgtcacgaagttaaagtctgacacggctgctgcagctgtgcgccaaatgaatccacatatccgggtgacaagccaccagaaccgtgtgggtcctgacacggagcgcatctatgatgacgattttttccaaaacctagatggcgtggccaatgccctggacaacgtggatgcccgcatgtacatggaccgccgctgtgtctactaccggaagccactgctggagtcaggcacactgggcaccaaaggcaatgtgcaggtggtgatccccttcctgacagagtcgtacagttccagccaggacccacctgagaagtccatccccatctgtaccctgaagaacttccctaatgccatcgagcacaccctgcagtgggctcgggatgagtttgaaggcctcttcaagcagccagcagaaaatgtcaaccagtacctcacagaccccaagtttgtggagcgaacactgcggctggcaggcactcagcccttggaggtgctggaggctgtgcagcgcagcctggtgctgcagcgaccacagacctgggctgactgcgtgacctgggcctgccaccactggcacacccagtactcgaacaacatccggcagctgctgcacaacttccctcctgaccagctcacaagctcaggagcgccgttctggtctgggcccaaacgctgtccacacccgctcacctttgatgtcaacaatcccctgcatctggactatgtgatggctgctgccaacctgtttgcccagacctacgggctgacaggctctcaggaccgagctgctgtggccacattcctgcagtctgtgcaggtccccgaattcacccccaagtctggcgtcaagatccatgtttctgaccaggagctgcagagcgccaatgcctctgttgatgacagtcgtctagaggagctcaaagccactctgcccagcccagacaagctccctggattcaagatgtaccccattgactttgagaaggatgatgacagcaactttcatatggatttcatcgtggctgcatccaacctccgggcagaaaactatgacattccttctgcagaccggcacaagagcaagctgattgcagggaagatcatcccagccattgccacgaccacagcagccgtggttggccttgtgtgtctggagctgtacaaggttgtgcaggggcaccgacagcttgactcctacaagaatggtttcctcaacttggccctgcctttctttggtttctctgaaccccttgccgcaccacgtcaccagtactataaccaagagtggacattgtgggatcgctttgaggtacaagggctgcagcctaatggtgaggagatgaccctcaaacagttcctcgactattttaagacagagcacaaattagagatcaccatgctgtcccagggcgtgtccatgctctattccttcttcatgccagctgccaagctcaaggaacggttggatcagccgatgacagagattgtgagccgtgtgtcgaagcgaaagctgggccgccacgtgcgggcgctggtgcttgagctgtgctgtaacgacgagagcggcgaggatgtcgaggttccctatgtccgatacaccatccgctgaccccgtctgctcctctaggctggccccttgtccacccctctccacaccccttccagcccagggttcccatttggcttctggcagtggcccaactagccaagtctggtgttccctcatcatccccctacctgaacccctcttgccactgccttctaccttgtttgaaacctgaatcctaataaagaattaataactcccacatcgcctgccctgctggttccagggaaggaagggacttcctggagc

SEQ ID NO: 321503 - DNA, 2443 bp, Homo sapiens
  misc_feature (14)..(14): n is a, c, g, or t
  misc_feature (17)..(17): n is a, c, g, or t
  misc_feature (22)..(22): n is a, c, g, or t
  misc_feature (30)..(30): n is a, c, g, or t
agctaggtagaggncgngtgtnaatcggcngaggttctgtgctcagcatggccggccacctcggccccgcaatgaggaggatgcagcagaactggtagccttagcacaggctgtgaatgctcgagccctgccagcagtgcagcaaaataacctggacgaggacctcatccggaagctggcatatgtggctgctggggatctggcacccataaacgccttcattgggggcctggctgcccaggaagtcatgaaggcctgctccgggaagttcatgcccatcatgcagtggctatactttgatgcccttgagtgtctccctgaggacaaagaggtcctcacagaggacaagtgcctccagcgccagaaccgttatgacgggcaagtggctgtgtttggctcagacctgcaagagaagctgggcaagcagaagtatttcctggtgggtgcgggggccattggctgtgagctgctcaagaactttgccatgattgggctgggctgcggggagggtggagaaatcatcgttacagacatggacaccattgagaagtcaaatctgaatcgacagtttcttttccggccctgggatgtcacgaagttaaagtctgacacggctgctgcagctgtgcgccaaatgaatccacatatccgggtgacaagccaccagaaccgtgtgggtcctgacacggagcgcatctatgatgacgattttttccaaaacctagatggcgtggccaatgccctggacaacgtggatgcccgcatgtacatggaccgccgctgtgtctactaccggaagccactgctggagtcaggcacactgggcaccaaaggcaatgtgcaggtggtgatccccttcctgacagagtcgtacagttccagccaggacccacctgagaagtccatccccatctgtaccctgaagaacttccctaatgccatcgagcacaccctgcagtgggctcgggatgagtttgaaggcctcttcaagcagccagcagaaaatgtcaaccagtacctcacagaccccaagtttgtggagcgaacactgcggctggcaggcactcagcccttggaggtgctggaggctgtgcagcgcagcctggtgctgcagcgaccacagacctgggctgactgcgtgacctgggcctgccaccactggcacacccagtactcgaacaacatccggcagctgctgcacaacttccctcctgaccagctcacaagctcaggagcgccgttctggtctgggcccaaacgctgtccacacccgctcacctttgatgtcaacaatcccctgcatctggactatgtgatggctgctgccaacctgtttgcccagacctacgggctgacaggctctcaggaccgagctgctgtggccacattcctgcagtctgtgcaggtccccgaattcacccccaagtctggcgtcaagatccatgtttctgaccaggagctgcagagcgccaatgcctctgttgatgacagtcgtctagaggagctcaaagccactctgcccagcccagacaagctccctggattcaagatgtaccccattgactttgagaaggatgatgacagcaactttcatatggatttcatcgtggctgcatccaacctccgggcagaaaactatgacattccttctgcagaccggcacaagagcaagctgattgcagggaagatcatcccagccattgccacgaccacagcagccgtggttggccttgtgtgtctggagctgtacaaggttgtgcaggggcaccgacagcttgactcctacaagaatggtttcctcaacttggccctgcctttctttggtttctctgaaccccttgccgcaccacgtcaccagtactataaccaagagtggacattgtgggatcgctttgaggtacaagggctgcagcctaatggtgaggagatgaccctcaaacagttcctcgactattttaagacagagcacaaattagagatcaccatgctgtcccagggcgtgtccatgctctattccttcttcatgccagctgccaagctcaaggaacggttggatcagccgatgacagagattgtgagccgtgtgtcgaagcgaaagctgggccgccacgtgcgggcgctggtgcttgagctgtgctgtaacgacgagagcggcgaggatgtcgaggttccctatgtccgatacaccatccgctgaccccgtctgctcctctaggctggccccttgtccacccctctccacaccccttccagcccagggttcccatttggcttctggcagtggcccaactagccaagtctggtgttccctcatcatccccctacctgaacccctcttgccactgccttctaccttgtttgaaacctgaatcctaataaagaattaataactcccacatcgcctgccctgctggttccagggaaggaagggacttcctggagc

SEQ ID NO: 321504 - DNA, 2975 bp, Homo sapiens
  misc_feature (24)..(24): n is a, c, g, or t
  misc_feature (31)..(31): n is a, c, g, or t
  misc_feature (35)..(35): n is a, c, g, or t
  misc_feature (37)..(37): n is a, c, g, or t
  misc_feature (46)..(46): n is a, c, g, or t
cctctagacggatcccgcactgantgttcgntgangncttccttangtggtttccaggtggtggtgctcaccaacacccccctggaggaccagctgcgagtgggtgagttctgtcacaaccgtggcatcaagctggtggtggcagacacgcggggcctgtttgggcagctcttctgtgactttggagaggaaatgatcctcacagattccaatggggagcagccactcagtgctatggtttctatggttaccaaggacaaccccggtgtggttacctgcctggatgaggcccgacacgggtttgagagcggggactttgtctccttttcagaagtacagggcatggttgaactcaacggaaatcagcccatggagatcaaagtcctgggtccttatacctttagcatctgtgacacctccaacttctccgactacatccgtggaggcatcgtcagtcaggtcaaagtacctaagaagattagctttaaatccttggtggcctcactggcagaacctgactttgtggtgacggacttcgccaagttttctcgccctgcccagctgcacattggcttccaggccctgcaccagttctgtgctcagcatggccggccacctcggccccgcaatgaggaggatgcagcagaactggtagccttagcacaggctgtgaatgctcgagccctgccagcagtgcagcaaaataacctggacgaggacctcatccggaagctggcatatgtggctgctggggatctggcacccataaacgccttcattgggggcctggctgcccaggaagtcatgaaggcctgctccgggaagttcatgcccatcatgcagtggctatactttgatgcccttgagtgtctccctgaggacaaagaggtcctcacagaggacaagtgcctccagcgccagaaccgttatgacgggcaagtggctgtgtttggctcagacctgcaagagaagctgggcaagcagaagtatttcctggtgggtgcgggggccattggctgtgagctgctcaagaactttgccatgattgggctgggctgcggggagggtggagaaatcatcgttacagacatggacaccattgagaagtcaaatctgaatcgacagtttcttttccggccctgggatgtcacgaagttaaagtctgacacggctgctgcagctgtgcgccaaatgaatccacatatccgggtgacaagccaccagaaccgtgtgggtcctgacacggagcgcatctatgatgacgattttttccaaaacctagatggcgtggccaatgccctggacaacgtggatgcccgcatgtacatggaccgccgctgtgtctactaccggaagccactgctggagtcaggcacactgggcaccaaaggcaatgtgcaggtggtgatccccttcctgacagagtcgtacagttccagccaggacccacctgagaagtccatccccatctgtaccctgaagaacttccctaatgccatcgagcacaccctgcagtgggctcgggatgagtttgaaggcctcttcaagcagccagcagaaaatgtcaaccagtacctcacagaccccaagtttgtggagcgaacactgcggctggcaggcactcagcccttggaggtgctggaggctgtgcagcgcagcctggtgctgcagcgaccacagacctgggccactggcacacccagtactcgaacaacatccggcagctgctgcacaacttccctcctgaccagctcacaagctcaggagcgccgttctggtctgggcccaaacgctgtccacacccgctcacctttgatgtcaacaatcccctgcatctggactatgtgatggctgctgccaacctgtttgcccagacctacgggctgacaggctctcaggaccgagctgctgtggccacattcctgcagtctgtgcaggtccccgaattcacccccaagtctggcgtcaagatccatgtttctgaccaggagctgcagagcgccaatgcctctgttgatgacagtcgtctagaggagctcaaagccactctgcccagcccagacaagctccctggattcaagatgtaccccattgactttgagaaggatgatgacagcaactttcatatggatttcatcgtggctgcatccaacctccgggcagaaaactatgacattccttctgcagaccggcacaagagcaagctgattgcagggaagatcatcccagccattgccacgaccacagcagccgtggttggccttgtgtgtctggagctgtacaaggttgtgcaggggcaccgacagcttgactcctacaagaatggtttcctcaacttggccctgcctttctttggtttctctgaaccccttgccgcaccacgtcaccagtactataaccaagagtggacattgtgggatcgctttgaggtacaagggctgcagcctaatggtgaggagatgaccctcaaacagttcctcgactattttaagacagagcacaaattagagatcaccatgctgtcccagggcgtgtccatgctctattccttcttcatgccagctgccaagctcaaggaacggttggatcagccgatgacagagattgtgagccgtgtgtcgaagcgaaagctgggccgccacgtgcgggcgctggtgcttgagctgtgctgtaacgacgagagcggcgaggatgtcgaggttccctatgtccgatacaccatccgctgaccccgtctgctcctctaggctggccccttgtccacccctctccacaccccttccagcccagggttcccatttggcttctggcagtggcccaactagccaagtctggtgttccctcatcatccccctacctgaacccctcttgccactgccttctaccttgtttgaaacctgaatcctaataaagaattaataactcccacatcgcctgccctgctggttccagggaaggaagggacttcctggagc

SEQ ID NO: 321505 - DNA, 2251 bp, Homo sapiens
  misc_feature (24)..(24): n is a, c, g, or t
  misc_feature (31)..(31): n is a, c, g, or t
  misc_feature (35)..(35): n is a, c, g, or t
  misc_feature (37)..(37): n is a, c, g, or t
  misc_feature (46)..(46): n is a, c, g, or t
cctctagacggatcccgcactgantgttcgntgangncttccttangtggtttccaggtggtggtgctcaccaacacccccctggaggaccagctgcgagtgggtgagttctgtcacaaccgtggcatcaagctggtggtggcagacacgcggggcctgtttgggcagctcttctgtgactttggagaggaaatgatcctcacagattccaatggggagcagccactcagtgctatggtttctatggttaccaaggacaaccccggtgtggttacctgcctggatgaggcccgacacgggtttgagagcggggactttgtctccttttcagaagtacagggcatggttgaactcaacggaaatcagcccatggagatcaaagtcctgggtccttatacctttagcatctgtgacacctccaacttctccgactacatccgtggaggcatcgtcagtcaggtcaaagtacctaagaagattagctttaaatccttggtggcctcactggcagaacctgactttgtggtgacggacttcgccaagttttctcgccctgcccagctgcacattggcttccaggccctgcaccagttctgtgctcagcatggccggccacctcggccccgcaatgaggaggatgcagcagaactggtagccttagcacaggctgtgaatgctcgagccctgccagcagtgcagcaaaataacctggacgaggacctcatccggaagctggcatatgtggctgctggggatctggcacccataaacgccttcattgggggcctggctgcccaggaagtcatgaaggcctgctccgggaagttcatgcccatcatgcagtggctatactttgatgcccttgagtgtctccctgaggacaaagaggtcctcacagaggacaagtgcctccagcgccagaaccgttatgacgggcaatgactgcgtgacctgggcctgccaccactggcacacccagtactcgaacaacatccggcagctgctgcacaacttccctcctgaccagctcacaagctcaggagcgccgttctggtctgggcccaaacgctgtccacacccgctcacctttgatgtcaacaatcccctgcatctggactatgtgatggctgctgccaacctgtttgcccagacctacgggctgacaggctctcaggaccgagctgctgtggccacattcctgcagtctgtgcaggtccccgaattcacccccaagtctggcgtcaagatccatgtttctgaccaggagctgcagagcgccaatgcctctgttgatgacagtcgtctagaggagctcaaagccactctgcccagcccagacaagctccctggattcaagatgtaccccattgactttgagaaggatgatgacagcaactttcatatggatttcatcgtggctgcatccaacctccgggcagaaaactatgacattccttctgcagaccggcacaagagcaagctgattgcagggaagatcatcccagccattgccacgaccacagcagccgtggttggccttgtgtgtctggagctgtacaaggttgtgcaggggcaccgacagcttgactcctacaagaatggtttcctcaacttggccctgcctttctttggtttctctgaaccccttgccgcaccacgtcaccagtactataaccaagagtggacattgtgggatcgctttgaggtacaagggctgcagcctaatggtgaggagatgaccctcaaacagttcctcgactattttaagacagagcacaaattagagatcaccatgctgtcccagggcgtgtccatgctctattccttcttcatgccagctgccaagctcaaggaacggttggatcagccgatgacagagattgtgagccgtgtgtcgaagcgaaagctgggccgccacgtgcgggcgctggtgcttgagctgtgctgtaacgacgagagcggcgaggatgtcgaggttccctatgtccgatacaccatccgctgaccccgtctgctcctctaggctggccccttgtccacccctctccacaccccttccagcccagggttcccatttggcttctggcagtggcccaactagccaagtctggtgttccctcatcatccccctacctgaacccctcttgccactgccttctaccttgtttgaaacctgaatcctaataaagaattaataactcccacatcgcctgccctgctggttccagggaaggaagggacttcctggagc

SEQ ID NO: 321506 - DNA, 1129 bp, Homo sapiens
cactatcatattcatcggcgtaaatctaactttcttcccaccaggctctcaggaccgagctgctgtggccacattcctgcagtctgtgcaggtccccgaattcacccccaagtctggcgtcaagatccatgtttctgaccaggagctgcagagcgccaatgcctctgttgatgacagtcgtctagaggagctcaaagccactctgcccagcccagacaagctccctggattcaagatgtaccccattgactttgagaaggatgatgacagcaactttcatatggatttcatcgtggctgcatccaacctccgggcagaaaactatgacattccttctgcagaccggcacaagagcaagctgattgcagggaagatcatcccagccattgccacgaccacagcagccgtggttggccttgtgtgtctggagctgtacaaggttgtgcaggggcaccgacagcttgactcctacaagaatggtttcctcaacttggccctgcctttctttggtttctctgaaccccttgccgcaccacgtcaccagtactataaccaagagtggacattgtgggatcgctttgaggtacaagggctgcagcctaatggtgaggagatgaccctcaaacagttcctcgactattttaagacagagcacaaattagagatcaccatgctgtcccagggcgtgtccatgctctattccttcttcatgccagctgccaagctcaaggaacggttggatcagccgatgacagagattgtgagccgtgtgtcgaagcgaaagctgggccgccacgtgcgggcgctggtgcttgagctgtgctgtaacgacgagagcggcgaggatgtcgaggttccctatgtccgatacaccatccgctgaccccgtctgctcctctaggctggccccttgtccacccctctccacaccccttccagcccagggttcccatttggcttctggcagtggcccaactagccaagtctggtgttccctcatcatccccctacctgaacccctcttgccactgccttctaccttgtttgaaacctgaatcctaataaagaattaataactcccacatcgcctgccctgctggttccagggaaggaagggacttcctggagc

SEQ ID NO: 321507 - DNA, 2831 bp, Homo sapiens
  misc_feature (24)..(24): n is a, c, g, or t
  misc_feature (31)..(31): n is a, c, g, or t
  misc_feature (35)..(35): n is a, c, g, or t
  misc_feature (37)..(37): n is a, c, g, or t
  misc_feature (46)..(46): n is a, c, g, or t
cctctagacggatcccgcactgantgttcgntgangncttccttangtggtttccaggtggtggtgctcaccaacacccccctggaggaccagctgcgagtgggtgagttctgtcacaaccgtggcatcaagctggtggtggcagacacgcggggcctgtttgggcagctcttctgtgactttggagaggaaatgatcctcacagattccaatggggagcagccactcagtgctatggtttctatggttaccaaggacaaccccggtgtggttacctgcctggatgaggcccgacacgggtttgagagcggggactttgtctccttttcagaagtacagggcatggttgaactcaacggaaatcagcccatggagatcaaagtcctgggtccttatacctttagcatctgtgacacctccaacttctccgactacatccgtggaggcatcgtcagtcaggtcaaagtacctaagaagattagctttaaatccttggtggcctcactggcagaacctgactttgtggtgacggacttcgccaagttttctcgccctgcccagctgcacattggcttccaggccctgcaccagttctgtgctcagcatggccggccacctcggccccgcaatgaggaggatgcagcagaactggtagccttagcacaggctgtgaatgctcgagccctgccagcagtgcagcaaaataacctggacgaggacctcatccggaagctggcatatgtggctgctggggatctggcacccataaacgccttcattgggggcctggctgcccaggaagtcatgaaggcctgctccgggaagttcatgcccatcatgcagtggctatactttgatgcccttgagtgtctccctgaggacaaagaggtcctcacagaggacaagtgcctccagcgccagaaccgttatgacgggcaagtggctgtgtttggctcagacctgcaagagaagctgggcaagcagaagtatttcctggtgggtgcgggggccattggctgtgagctgctcaagaactttgccatgattgggctgggctgcggggagggtggagaaatcatcgttacagacatggacaccattgagaagtcaaatctgaatcgacagtttcttttccggccctgggatgtcacgaagttaaagtctgacacggctgctgcagctgtgcgccaaatgaatccacatatccgggtgacaagccaccagaaccgtgtgggtcctgacacggagcgcatctatgatgacgattttttccaaaacctagatggcgtggccaatgccctggacaacgtggatgcccgcatgtacatggaccgccgctgtgtctactaccggaagccactgctggagtcaggcacactgggcaccaaaggcaatgtgcaggtggtgatccccttcctgacagagtcgtacagttccagccaggacccacctgagaagtccatccccatctgtaccctgaagaacttccctaatgccatcgagcacaccctgcagtgggctcgggatgagtttgaaggcctcttcaagcagccagcagaaaatgtcaaccagtacctcacagaccccaagtttgtggagcgaacactgcggctggcaggcactcagcccttggaggtgctggaggctgtgcagcgcagcctggtgctgcagcgaccacagacctgggctgactgcgtgacctgggcctgccaccactggcacacccagtactcgaacaacatccggcagctgctgcacaacttccctcctgaccagctcacaagctcaggagcgccgttctggtctgggcccaaacgctgtccacacccgctcacctttgatgtcaacaatcccctgcatctggactatgtgatggctgctgccaacctgtttgcccagacctacgggctgacaggctctcaggaccgagctgctgtggccacattcctgcagtctgtgcaggtccccgaattcacccccaagtctggcgtcaagatccatgtttctgaccaggagctgcagagcgccaatgcctctgttgatgacagtcgtctagaggagctcaaagccactctgcccagcccagacaagctccctggattcaagatgtaccccattgactttgagaaggatgatgacagcaactttcatatggatttcatcgtggctgcatccaacctccgggcagaaaactatgacattccttctgcagaccggcacaagagcaagctgattgcagggaagatcatcccagccattgccacgaccacagcagccgtggttggccttgtgtgtctggagctgtacaaggttgtgcaggggcaccgacagcttgactcctacaagaatggtttcctcaacttggccctgcctttctttggtttctctgaaccccttgccgcaccacgtcaccagtactataaccaagagtggacattgtgggatcgctttgaggtacaagggctgcagcctaatggtgaggagatgaccctcaaacagttcctcgactattttaagacagagcacaaattagagatcaccatgctgtcccagggcgtgtccatgctctattccttcttcatgccagctgccaagctcaaggaacggttggatcagccgatgacagagattgtgagccgtgtgtcgaagcgaaagctgggccgccacgtgcgggcgctggtgcttgagctgtgctgtaacgacgagagcggcgaggatgtcgaggttccctatgtccgatacaccatccgctgacaggctctcaggaccgagctgctgtggccacattcctgcagtctgtgcaggtccccgaattcacccccaagtctggt

SEQ ID NO: 321508 - DNA, 949 bp, Homo sapiens
ctagaggatccctgtctttggcaggcaagccagcccagacaagctccggatcaagatgtaccccactgactttgagaaggatgatgacagcaactttcatatggatttcatcgtggctgcatccaacctccgggcagaaaactatgacattccttctgcagaccggcacaagagcaagctgattgcagggaagatcatcccagccattgccacgaccacagcagccgtggttggccttgtgtgtctggagctgtacaaggttgtgcaggggcaccgacagcttgactcctacaagaatggtttcctcaacttggccctgcctttctttggtttctctgaaccccttgccgcaccacgtcaccagtactataaccaagagtggacattgtgggatcgctttgaggtacaagggctgcagcctaatggtgaggagatgaccctcaaacagttcctcgactattttaagacagagcacaaattagagatcaccatgctgtcccagggcgtgtccatgctctattccttcttcatgccagctgccaagctcaaggaacggttggatcagccgatgacagagattgtgagccgtgtgtcgaagcgaaagctgggccgccacgtgcgggcgctggtgcttgagctgtgctgtaacgacgagagcggcgaggatgtcgaggttccctatgtccgatacaccatccgctgaccccgtctgctcctctaggctggccccttgtccacccctctccacaccccttccagcccagggttcccatttggcttctggcagtggcccaactagccaagtctggtgttccctcatcatccccctacctgaacccctcttgccactgccttctaccttgtttgaaacctgaatcctaataaagaattaataactcccacatcgcctgccctgctggttccagggaaggaagggacttcctggagc

SEQ ID NO: 321509 - DNA, 2758 bp, Homo sapiens
  misc_feature (24)..(24): n is a, c, g, or t
  misc_feature (31)..(31): n is a, c, g, or t
  misc_feature (35)..(35): n is a, c, g, or t
  misc_feature (37)..(37): n is a, c, g, or t
  misc_feature (46)..(46): n is a, c, g, or t
cctctagacggatcccgcactgantgttcgntgangncttccttangtggtttccaggtggtggtgctcaccaacacccccctggaggaccagctgcgagtgggtgagttctgtcacaaccgtggcatcaagctggtggtggcagacacgcggggcctgtttgggcagctcttctgtgactttggagaggaaatgatcctcacagattccaatggggagcagccactcagtgctatggtttctatggttaccaaggacaaccccggtgtggttacctgcctggatgaggcccgacacgggtttgagagcggggactttgtctccttttcagaagtacagggcatggttgaactcaacggaaatcagcccatggagatcaaagtcctgggtccttatacctttagcatctgtgacacctccaacttctccgactacatccgtggaggcatcgtcagtcaggtcaaagtacctaagaagattagctttaaatccttggtggcctcactggcagaacctgactttgtggtgacggacttcgccaagttttctcgccctgcccagctgcacattggcttccaggccctgcaccagttctgtgctcagcatggccggccacctcggccccgcaatgaggaggatgcagcagaactggtagccttagcacaggctgtgaatgctcgagccctgccagcagtgcagcaaaataacctggacgaggacctcatccggaagctggcatatgtggctgctggggatctggcacccataaacgccttcattgggggcctggctgcccaggaagtcatgaaggcctgctccgggaagttcatgcccatcatgcagtggctatactttgatgcccttgagtgtctccctgaggacaaagaggtcctcacagaggacaagtgcctccagcgccagaaccgttatgacgggcaagtggctgtgtttggctcagacctgcaagagaagctgggcaagcagaagtatttcctggtgggtgcgggggccattggctgtgagctgctcaagaactttgccatgattgggctgggctgcggggagggtggagaaatcatcgttacagacatggacaccattgagaagtcaaatctgaatcgacagtttcttttccggccctgggatgtcacgaagttaaagtctgacacggctgctgcagctgtgcgccaaatgaatccacatatccgggtgacaagccaccagaaccgtgtgggtcctgacacggagcgcatctatgatgacgattttttccaaaacctagatggcgtggccaatgccctggacaacgtggatgcccgcatgtacatggaccgccgctgtgtctactaccggaagccactgctggagtcaggcacactgggcaccaaaggcaatgtgcaggtggtgatccccttcctgacagagtcgtacagttccagccaggacccacctgagaagtccatccccatctgtaccctgaagaacttccctaatgccatcgagcacaccctgcagtgggctcgggatgagtttgaaggcctcttcaagcagccagcagaaaatgtcaaccagtacctcacagaccccaagtttgtggagcgaacactgcggctggcaggcactcagcccttggaggtgctggaggctgtgcagcgcagcctggtgctgcagcgaccacagacctgggctgactgcgtgacctgggcctgccaccactggcacacccagtactcgaacaacatccggcagctgctgcacaacttccctcctgaccagctcacaagctcaggagcgccgttctggtctgggcccaaacgctgtccacacccgctcacctttgatgtcaacaatcccctgcatctggactatgtgatggctgctgccaacctgtttgcccagacctacgggctgacaggctctcaggaccgagctgctgtggccacattcctgcagtctgtgcaggtccccgaattcacccccaagtctggcgtcaagatccatgtttctgaccaggagctgcagagcgccaatgcctctgttgatgacagtcgtctagaggagctcaaagccactctgcccagcccagacaagctccctggattcaagatgtaccccattgactttgagaaggatgatgacagcaactttcatatggatttcatcgtggctgcatccaacctccgggcagaaaactatgacattccttctgcagaccggcacaagagcaagctgattgcagggaagatcatcccagccattgccacgaccacagcagccgtggttggccttgtgtgtctggagctgtacaaggttgtgcaggggcaccgacagcttgactcctacaagaatggtttcctcaacttggccctgcctttctttggtttctctgaaccccttgccgcaccacgtcaccagtactataaccaagagtggacattgtgggatcgctttgaggtacaagggctgcagcctaatggtgaggagatgaccctcaaacagttcctcgactattttaaggcggcgaggatgtcgaggttccctatgtccgatacaccatccgctgaccccgtctgctcctctaggctggccccttgtccacccctctccacaccccttccagcccagggttcccatttggcttctggcagtggcccaactagccaagtctggtgttccctcatcatccccctacctgaacccctcttgccactgccttctaccttgtttgaaacctgaatcctaataaagaattaataac

SEQ ID NO: 321510 - DNA, 2890 bp, Homo sapiens
  misc_feature (24)..(24): n is a, c, g, or t
  misc_feature (31)..(31): n is a, c, g, or t
  misc_feature (35)..(35): n is a, c, g, or t
  misc_feature (37)..(37): n is a, c, g, or t
  misc_feature (46)..(46): n is a, c, g, or t
cctctagacggatcccgcactgantgttcgntgangncttccttangtggtttccaggtggtggtgctcaccaacacccccctggaggaccagctgcgagtgggtgagttctgtcacaaccgtggcatcaagctggtggtggcagacacgcggggcctgtttgggcagctcttctgtgactttggagaggaaatgatcctcacagattccaatggggagcagccactcagtgctatggtttctatggttaccaaggacaaccccggtgtggttacctgcctggatgaggcccgacacgggtttgagagcggggactttgtctccttttcagaagtacagggcatggttgaactcaacggaaatcagcccatggagatcaaagtcctgggtccttatacctttagcatctgtgacacctccaacttctccgactacatccgtggaggcatcgtcagtcaggtcaaagtacctaagaagattagctttaaatccttggtggcctcactggcagaacctgactttgtggtgacggacttcgccaagttttctcgccctgcccagctgcacattggcttccaggccctgcaccagttctgtgctcagcatggccggccacctcggccccgcaatgaggaggatgcagcagaactggtagccttagcacaggctgtgaatgctcgagccctgccagcagtgcagcaaaataacctggacgaggacctcatccggaagctggcatatgtggctgctggggatctggcacccataaacgccttcattgggggcctggctgcccaggaagtcatgaaggcctgctccgggaagttcatgcccatcatgcagtggctatactttgatgcccttgagtgtctccctgaggacaaagaggtcctcacagaggacaagtgcctccagcgccagaaccgttatgacgggcaagtggctgtgtttggctcagacctgcaagagaagctgggcaagcagaagtatttcctggtgggtgcgggggccattggctgtgagctgctcaagaactttgccatgattgggctgggctgcggggagggtggagaaatcatcgttacagacatggacaccattgagaagtcaaatctgaatcgacagtttcttttccggccctgggatgtcacgaagttaaagtctgacacggctgctgcagctgtgcgccaaatgaatccacatatccgggtgacaagccaccagaaccgtgtgggtcctgacacggagcgcatctatgatgacgattttttccaaaacctagatggcgtggccaatgccctggacaacgtggatgcccgcatgtacatggaccgccgctgtgtctactaccggaagccactgctggagtcaggcacactgggcaccaaaggcaatgtgcaggtggtgatccccttcctgacagagtcgtacagttccagccaggacccacctgagaagtccatccccatctgtaccctgaagaacttccctaatgccatcgagcacaccctgcagtgggctcgggatgagtttgaaggcctcttcaagcagccagcagaaaatgtcaaccagtacctcacagaccccaagtttgtggagcgaacactgcggctggcaggcactcagcccttggaggtgctggaggctgtgcagcgcagcctggtgctgcagcgaccacagacctgggctgactgcgtgacctgggcctgccaccactggcacacccagtactcgaacaacatccggcagctgctgcacaacttccctcctgaccagctcacaagctcaggagcgccgttctggtctgggcccaaacgctgtccacacccgctcacctttgatgtcaacaatcccctgcatctggactatgtgatggctgctgccaacctgtttgcccagacctacgggctgacaggctctcaggaccgagctgctgtggccacattcctgcagtctgtgcaggtccccgaattcacccccaagtctggcgtcaagatccatgtttctgaccaggagctgcagagcgccaatgcctctgttgatgacagtcgtctagaggagctcaaagccactctgcccagcccagacaagctccctggattcaagatgtaccccattgactttgagaaggatgatgacagcaactttcatatggatttcatcgtggctgcatccaacctccgggcagaaaactatgacattccttctgcagaccggcacaagagcaagctgattgcagggaagatcatcccagccattgccacgaccacagcagccgtggttggccttgtgtgtctggagctgtacaaggttgtgcaggggcaccgacagcttgactcctacaagaatggtttcctcaacttggccctgcctttctttggtttctctgaaccccttgccgcaccacgtcaccagtactataaccaagagtggacattgtgggatcgctttgaggtacaagggctgcagcctaatggtgaggagatgaccctcaaacagttcctcgactattttaagatagagcatggacacgcgcatgggcatgctggccgcaagggcagaagtcctgagcaccggatgcctgccagtctctgtgccgcagcatgtcgaagtcccacaaggaacacggggtggacacgagccagcaagacaccgaggatggggtgccgcggcgcggtcagcagccagcatagtgaggagccattcaacgtcgcagagagacgctgggagggcgaggcccgaagctgcgccatagggaacaaaacgaggcgagtcgacgggactgtgctgacgagttggcaccccgatggtccgagtaccaacctaatcccggagagaccacggcctggaacccacggacgcatggggcgccacgaaccggccatgcgca

SEQ ID NO: 321511 - DNA, 2681 bp, Homo sapiens
  misc_feature (24)..(24): n is a, c, g, or t
  misc_feature (31)..(31): n is a, c, g, or t
  misc_feature (35)..(35): n is a, c, g, or t
  misc_feature (37)..(37): n is a, c, g, or t
  misc_feature (46)..(46): n is a, c, g, or t
cctctagacggatcccgcactgantgttcgntgangncttccttangtggtttccaggtggtggtgctcaccaacacccccctggaggaccagctgcgagtgggtgagttctgtcacaaccgtggcatcaagctggtggtggcagacacgcggggcctgtttgggcagctcttctgtgactttggagaggaaatgatcctcacagattccaatggggagcagccactcagtgctatggtttctatggttaccaaggacaaccccggtgtggttacctgcctggatgaggcccgacacgggtttgagagcggggactttgtctccttttcagaagtacagggcatggttgaactcaacggaaatcagcccatggagatcaaagtcctgggtccttatacctttagcatctgtgacacctccaacttctccgactacatccgtggaggcatcgtcagtcaggtcaaagtacctaagaagattagctttaaatccttggtggcctcactggcagaacctgactttgtggtgacggacttcgccaagttttctcgccctgcccagctgcacattggcttccaggccctgcaccagttctgtgctcagcatggccggccacctcggccccgcaatgaggaggatgcagcagaactggtagccttagcacaggctgtgaatgctcgagccctgccagcagtgcagcaaaataacctggacgaggacctcatccggaagctggcatatgtggctgctggggatctggcacccataaacgccttcattgggggcctggctgcccaggaagtcatgaaggcctgctccgggaagttcatgcccatcatgcagtggctatactttgatgcccttgagtgtctccctgaggacaaagaggtcctcacagaggacaagtgcctccagcgccagaaccgttatgacgggcaagtggctgtgtttggctcagacctgcaagagaagctgggcaagcagaagtatttcctggtgggtgcgggggccattggctgtgagctgctcaagaactttgccatgattgggctgggctgcggggagggtggagaaatcatcgttacagacatggacaccattgagaagtcaaatctgaatcgacagtttcttttccggccctgggatgtcacgaagttaaagtctgacacggctgctgcagctgtgcgccaaatgaatccacatatccgggtgacaagccaccagaaccgtgtgggtcctgacacggagcgcatctatgatgacgattttttccaaaacctagatggcgtggccaatgccctggacaacgtggatgcccgcatgtacatggaccgccgctgtgtctactaccggaagccactgctggagtcaggcacactgggcaccaaaggcaatgtgcaggtggtgatccccttcctgacagagtcgtacagttccagccaggacccacctgagaagtccatccccatctgtaccctgaagaacttccctaatgccatcgagcacaccctgcagtgggctcgggatgagtttgaaggcctcttcaagcagccagcagaaaatgtcaaccagtacctcacagaccccaagtttgtggagcgaacactgcggctggcaggcactcagcccttggaggtgctggaggctgtgcagcgcagcctggtgctgcagcgaccacagacctgggctgactgcgtgacctgggcctgccaccactggcacacccagtactcgaacaacatccggcagctgctgcacaacttccctcctgaccagctcacaagctcaggagcgccgttctggtctgggcccaaacgctgtccacacccgctcacctttgatgtcaacaatcccctgcatctggactatgtgatggctgctgccaacctgtttgcccagacctacgggctgacaggctctcaggaccgagctgctgtggccacattcctgcagtctgtgcaggtccccgaattcacccccaagtctggcgtcaagatccatgtttctgaccaggagctgcagagcgccaatgcctctgttgatgacagtcgtctagaggagctcaaagccactctgcccagcccagacaagctccctggattcaagatgtaccccattgactttgagaaggatgatgacagcaactttcatatggatttcatcgtggctgcatccaacctccgggcagaaaactatgacattccttctgcagaccggcacaagagcaagctgattgcagggaagatcatcccagccattgccacgaccacagcagccgtggttggccttgtgtgtctggagctgtacaaggttgtgcaggggcaccgacagcttgactcctacaagaatggtttcctcaacttggccctgcctttctttggtttctctgaaccccttgccgcaccacgtcaccagtccgatacaccatccgctgaccccgtctgctcctctaggctggccccttgtccacccctctccacaccccttccagcccagggttcccatttggcttctggcagtggcccaactagccaagtctggtgttccctcatcatccccctacctgaacccctcttgccactgccttctaccttgtttgaaacctgaatcctaataaagaattaataactcccacatcgcctgccctgctggttccagggaaggaagggacttcctggagc

SEQ ID NO: 321512 - DNA, 1848 bp, Homo sapiens
  misc_feature (24)..(24): n is a, c, g, or t
  misc_feature (31)..(31): n is a, c, g, or t
  misc_feature (35)..(35): n is a, c, g, or t
  misc_feature (37)..(37): n is a, c, g, or t
  misc_feature (46)..(46): n is a, c, g, or t
  misc_feature (1782)..(1782): n is a, c, g, or t
  misc_feature (1784)..(1784): n is a, c, g, or t
  misc_feature (1790)..(1790): n is a, c, g, or t
  misc_feature (1795)..(1795): n is a, c, g, or t
  misc_feature (1799)..(1799): n is a, c, g, or t
  misc_feature (1802)..(1802): n is a, c, g, or t
cctctagacggatcccgcactgantgttcgntgangncttccttangtggtttccaggtggtggtgctcaccaacacccccctggaggaccagctgcgagtgggtgagttctgtcacaaccgtggcatcaagctggtggtggcagacacgcggggcctgtttgggcagctcttctgtgactttggagaggaaatgatcctcacagattccaatggggagcagccactcagtgctatggtttctatggttaccaaggacaaccccggtgtggttacctgcctggatgaggcccgacacgggtttgagagcggggactttgtctccttttcagaagtacagggcatggttgaactcaacggaaatcagcccatggagatcaaagtcctgggtccttatacctttagcatctgtgacacctccaacttctccgactacatccgtggaggcatcgtcagtcaggtcaaagtacctaagaagattagctttaaatccttggtggcctcactggcagaacctgactttgtggtgacggacttcgccaagttttctcgccctgcccagctgcacattggcttccaggccctgcaccagttctgtgctcagcatggccggccacctcggccccgcaatgaggaggatgcagcagaactggtagccttagcacaggctgtgaatgctcgagccctgccagcagtgcagcaaaataacctggacgaggacctcatccggaagctggcatatgtggctgctggggatctggcacccataaacgccttcattgggggcctggctgcccaggaagtcatgaaggcctgctccgggaagttcatgcccatcatgcagtggctatactttgatgcccttgagtgtctccctgaggacaaagaggtcctcacagaggacaagtgcctccagcgccagaaccgttatgacgggcaagtggctgtgtttggctcagacctgcaagagaagctgggcaagcagaagtatttcctggtgggtgcgggggccattggctgtgagctgctcaagaactttgccatgattgggctgggctgcggggagggtggagaaatcatcgttacagacatggacaccattgagaagtcaaatctgaatcgacagtttcttttccggccctgggatgtcacgaagttaaagtctgacacggctgctgcagctgtgcgccaaatgaatccacatatccgggtgacaagccaccagaaccgtgtgggtcctgacacggagcgcatctatgatgacgattttttccaaaacctagatggcgtggccaatgccctggacaacgtggatgcccgcatgtacatggaccgccgctgtgtctactaccggaagccactgctggagtcaggcacactgggcaccaaaggcaatgtgcaggtggtgatccccttcctgacagagtcgtacagttccagccaggacccacctgagaagtccatccccatctgtaccctgaagaacttccctaatgccatcgagcacaccctgcagtgggctcgggatgagtttgaaggcctcttcaagcagccagcagaaaatgtcaaccagtacctcacagaccccaagtttgtggagcgaacactgcggctggcaggcactcagcccttggaggtgctggaggctgtgcagcgcagcctggtgctgcagcgaccacagacctgggctgactgcgtgacctgggcctgccaccactggcacacccagtactcgaacaacatccggcagctgctgcacaacttccctcctgaccagctcacnanctcagnagcgncgtnctnccttggtcctatttttttcctcaggagtcagctgtgaccatagtcg

SEQ ID NO: 321513 - DNA, 1462 bp, Homo sapiens
  misc_feature (24)..(24): n is a, c, g, or t
  misc_feature (31)..(31): n is a, c, g, or t
  misc_feature (35)..(35): n is a, c, g, or t
  misc_feature (37)..(37): n is a, c, g, or t
  misc_feature (46)..(46): n is a, c, g, or t
cctctagacggatcccgcactgantgttcgntgangncttccttangtggtttccaggtggtggtgctcaccaacacccccctggaggaccagctgcgagtgggtgagttctgtcacaaccgtggcatcaagctggtggtggcagacacgcggggcctgtttgggcagctcttctgtgactttggagaggaaatgatcctcacagattccaatggggagcagccactcagtgctatggtttctatggttaccaaggacaaccccggtgtggttacctgcctggatgaggcccgacacgggtttgagagcggggactttgtctccttttcagaagtacagggcatggttgaactcaacggaaatcagcccatggagatcaaagtcctgggtccttatacctttagcatctgtgacacctccaacttctccgactacatccgtggaggcatcgtcagtcaggtcaaagtacctaagaagattagctttaaatccttggtggcctcactggcagaacctgactttgtggtgacggacttcgccaagttttctcgccctgcccagctgcacattggcttccaggccctgcaccagttctgtgctcagcatggccggccacctcggccccgcaatgaggaggatgcagcagaactggtagccttagcacaggctgtgaatgctcgagccctgccagcagtgcagcaaaataacctggacgaggacctcatccggaagctggcatatgtggctgctggggatctggcacccataaacgccttcattgggggcctggctgcccaggaagtcatgaaggcctgctccgggaagttcatgcccatcatgcagtggctatactttgatgcccttgagtgtctccctgaggacaaagaggtcctcacagaggacaagtgcctccagcgccagaaccgttatgacgggcaagtggctgtgtttggctcagacctgcaagagaagctgggcaagcagaagtatttcctggtgggtgcgggggccattggctgtgagctgctcaagaactttgccatgattgggctgggctgcggggagggtggagaaatcatcgttacagacatggacaccattgagaagtcaaatctgaatcgacagtttcttttccggccctgggatgtcacgaagttaaagtctgacacggctgctgcagctgtgcgccaaatgaatccacatatccgggtgacaagccaccagaaccgtgtgggtcctgacacggagcgcatctatgatgacgattttttccaaaacctagatggcgtggccaatgccctggacaacgtggatgcccgcatgtacatggaccgccgctgtgtctactaccggaagccactgctggagtcaggcacactgggcaccaaaggcaatgtgcaggtggtgatccccttcctgacagagtcgtacagttccagctccgttataaggatccgctaga

SEQ ID NO: 321514 - DNA, 1397 bp, Homo sapiens
  misc_feature (24)..(24): n is a, c, g, or t
  misc_feature (31)..(31): n is a, c, g, or t
  misc_feature (35)..(35): n is a, c, g, or t
  misc_feature (37)..(37): n is a, c, g, or t
  misc_feature (46)..(46): n is a, c, g, or t
cctctagacggatcccgcactgantgttcgntgangncttccttangtggtttccaggtggtggtgctcaccaacacccccctggaggaccagctgcgagtgggtgagttctgtcacaaccgtggcatcaagctggtggtggcagacacgcggggcctgtttgggcagctcttctgtgactttggagaggaaatgatcctcacagattccaatggggagcagccactcagtgctatggtttctatggttaccaaggacaaccccggtgtggttacctgcctggatgaggcccgacacgggtttgagagcggggactttgtctccttttcagaagtacagggcatggttgaactcaacggaaatcagcccatggagatcaaagtcctgggtccttatacctttagcatctgtgacacctccaacttctccgactacatccgtggaggcatcgtcagtcaggtcaaagtacctaagaagattagctttaaatccttggtggcctcactggcagaacctgactttgtggtgacggacttcgccaagttttctcgccctgcccagctgcacattggcttccaggccctgcaccagttctgtgctcagcatggccggccacctcggccccgcaatgaggaggatgcagcagaactggtagccttagcacaggctgtgaatgctcgagccctgccagcagtgcagcaaaataacctggacgaggacctcatccggaagctggcatatgtggctgctggggatctggcacccataaacgccttcattgggggcctggctgcccaggaagtcatgaaggcctgctccgggaagttcatgcccatcatgcagtggctatactttgatgcccttgagtgtctccctgaggacaaagaggtcctcacagaggacaagtgcctccagcgccagaaccgttatgacgggcaagtggctgtgtttggctcagacctgcaagagaagctgggcaagcagaagtatttcctggtgggtgcgggggccattggctgtgagctgctcaagaactttgccaagctcaaggaacggttggatcagccgatgacagagattgtgagccgtgtgtcgaagcgaaagctgggccgccacgtgcgggcgctggtgcttgagctgtgctgtaacgacgagagcggcgaggatgtcgaggttccctatgtccgatacaccatccgctgaccccgtctgctcctctaggctggccccttgtccacccctctccacaccccttccagcccagggttcccatttggcttctggcagtggcccaactagccaagtctggtgttccctcatcatccccctacctgaacccctcttgccactgccttctaccttgtttgaaacctgaatcctaataaagaattaataac

SEQ ID NO: 321515 - DNA, 483 bp, Homo sapiens
gccggccgcccaacagggacgcgagccgggaccacgccgacccagcgtgcccaggccgaggaaagcgcggcggcggcagtccgaagacccaccgggactgaaagagaaggacgaggtcatcttcggacgggaggggcaagccagccatcctgggaccccaggcgtgcaggttctctttgagggtattccaccctgcaaaaagcatgtattcatggtcagctctcagcaaggccagtagcagagtggtaaaggccttggccctccaaggctgggaaaagacaatgacaagtcaaatccagacctatgttggatgttggtctactaggtgactgtctcctggaaatgttatgcagctcagcaaggtgaaggtgagaatatctttgctttttgataaaacacagaatgcatagatttcacatctcactatgtgagcccccacaaaacaaaacctagaggagcatgtgagaaaaacgcatctctagg

SEQ ID NO: 321516 - DNA, 1269 bp, Homo sapiens
cctgcgccgccgccgtcaaactcccgcagacttctctgtagattgtagatcgctgagcgatactttcggcagcacctccttgattctcagttttgctggaggccgcaaccaggcccgcgccgccaccatgtttcgaaatcagtatgacaatgatgtcactgtttggagcccccagggcaggattcatcaaattgaatatgcaatggaagctgttaaacaaggttcagccacagttggtctgaaatcaaaaactcatgcagttttggttgcattgaaaagggcgcaatcagagcttgcagctcatcagaaaaaaattctccatgttgacaaccatattggtatctcaattgcggggcttactgctgatgctagactgttatgtaattttatgcgtcaggagtgtttggattccagatttgtattcgatagaccactgcctgtgtctcgtcttgtatctctaattggaagcaagacccagataccaacacaacgatatggccggagaccatatggtgttggtctccttattgctggttatgatgatatgggccctcacattttccaaacctgtccatctgctaactattttgactgcagagccatgtccattggagcccgttcccaatcagctcgtacttacttggagagacatatgtctgaatttatggagtgtaatttaaatgaactagttaaacatggtctgcgtgccttaagagagacgcttcctgcagaacaggacctgactacaaagaatgtttccattggaattgttggtaaagacttggagtttacaatctatgatgatgatgatgtgtctccattcctggaaggtcttgaagaaagaccacagagaaaggcacagcctgctcaacctgctgatgaacctgcagaaaaggctgatgaaccaatggaacattaagtgataagccagtctatatatgtattatcaaatatgtaagaatacaggcaccacatactgatgacaataatctatactttgaaccaaaagttgcagagtggtggaatgctatgttttaggaatcagtccagatgtgagttttttccaagcaacctcactgaaacctatataatggaatacatttttctttgaaagggtctgtataatcattttctagaaagtatgggtatctatactaatgtttttatatgaagaacataggtgtctttgtggttttaaagacaactgtgaaataaagaatgatgcgtacagttttgtctagctgttttaaatattcccgatacgcgggc

SEQ ID NO: 321517 - DNA, 1916 bp, Homo sapiens
  misc_feature (1496)..(1496): n is a, c, g, or t
gccggccgcccaacagggacgcgagccgggaccacgccgacccagcgtgcccaggccgaggaaagcgcggcggcggcagtccgaagacccaccgggactgaaagagaaggacgaggtcatcttcggacgggaggggcaagccagccatcctgggaccccaggcgtgcaggttctctttgagggtattccaccctgcaaaaagcatgtattcatggtcagctctcagcaaggccagtagcagagtggtaaaggccttggccctccaaggctgggaaaagacaatgacaagtcaaatccagacctatgttggatgttggtctactaggtgactgtctcctggaaatgttatgcagctcagcaaggtgaagtttcgaaatcagtatgacaatgatgtcactgtttggagcccccagggcaggattcatcaaattgaatatgcaatggaagctgttaaacaaggttcagccacagttggtctgaaatcaaaaactcatgcagttttggttgcattgaaaagggcgcaatcagagcttgcagctcatcagaaaaaaattctccatgttgacaaccatattggtatctcaattgcggggcttactgctgatgctagactgttatgtaattttatgcgtcaggagtgtttggattccagatttgtattcgatagaccactgcctgtgtctcgtcttgtatctctaattggaagcaagacccagataccaacacaacgatatggccggagaccatatggtgttggtctccttattgctggttatgatgatatgggccctcacattttccaaacctgtccatctgctaactattttgactgcagagccatgtccattggagcccgttcccaatcagctcgtacttacttggagagacatatgtctgaatttatggagtgtaatttaaatgaactagttaaacatggtctgcgtgccttaagagagacgcttcctgcagaacaggacctgactacaaagaatgtttccattggaattgttggtaaagacttggagtttacaatctatgatgatgatgatgtgtctccattcctggaaggtcttgaagaaagaccacagagaaaggcacagcctgctcaacctgctgatgaacctgcagaaaaggctgatgaaccaatggaacattaagtgataagccagtctatatatgtattatcaaatatgtaagaatacaggcaccacatactgatgacaataatctatactttgaaccaaaagttgcagagtggtggaatgctatgttttaggaatcagtccagatgtgagttttttccaagcaacctcactgaaacctatataatggaatacatttttctttgaaagggtctgtataatcattttctagaaagtatgggtatctatactaatgtttttatatgaagaacataggtgtctttgtggttttaaagacaactgtgaaataaaattgtttcaccgcctggtaaaaaaaaaaaaaaaaaaaaaaanaaaaaaaaaaaaaaaaaaaaaaagaaaaaaaagaggaaaaacgaaaagtacaaaagaatataataacagaaagaaaaggacacaataagagatgaacacaagaaacaacacaacaaaaagaaaaacaaaagaaggcaacacacacaaaaaaagaacaagacaacagaagacagagagagacagcgcgggagcaggagccgacgggacgagctactatccaacaacaagagaagagcgccaccagcgcagaacaaagccacagagccgccaccactggacgagccacatcttggaagaacggagagcaagacacaaactaaagatcaggcgggacgagcgacaacaaaaaagggcgaggaacaaacgcaccaactaaccacgaaggacatcaacagacggctaccagaggcaccacattac

SEQ ID NO: 321518 - DNA, 2069 bp, Homo sapiens
  misc_feature (1649)..(1649): n is a, c, g, or t
acccacgcgtcgcggacgcgtgggtcgacccacgcgtccgactgtagatcgctgagcgatactttcggcagcacctccttgattctcagttttgctggaggccgcaaccaggcccgcgccgccaccatggtacgttgaatcccgatctctggaaggtttagggcagagctctggtgactgggggatgacgagccacctctcctgtcatccttagcgtcgcccggtgccacgaggtatgagagcctcggcagacggccgggctccggcagtgattcagcatctccggcctggccgggctaggggttatcggtagccagtgcggcctttccaccgctttcgcttcccggggagcctccgacacttcctcctcggtcagctagatgagttcgcccctcaggttccttcagtggagtagattctgagcggtccagaatagctcctagtgctgtgtatgggagaggagaagacagagacttgacttggaggcctacctgtaccaccagtgcggacttgacccccagtttcgaaatcagtatgacaatgatgtcactgtttggagcccccagggcaggattcatcaaattgaatatgcaatggaagctgttaaacaaggttcagccacagttggtctgaaatcaaaaactcatgcagttttggttgcattgaaaagggcgcaatcagagcttgcagctcatcagaaaaaaattctccatgttgacaaccatattggtatctcaattgcggggcttactgctgatgctagactgttatgtaattttatgcgtcaggagtgtttggattccagatttgtattcgatagaccactgcctgtgtctcgtcttgtatctctaattggaagcaagacccagataccaacacaacgatatggccggagaccatatggtgttggtctccttattgctggttatgatgatatgggccctcacattttccaaacctgtccatctgctaactattttgactgcagagccatgtccattggagcccgttcccaatcagctcgtacttacttggagagacatatgtctgaatttatggagtgtaatttaaatgaactagttaaacatggtctgcgtgccttaagagagacgcttcctgcagaacaggacctgactacaaagaatgtttccattggaattgttggtaaagacttggagtttacaatctatgatgatgatgatgtgtctccattcctggaaggtcttgaagaaagaccacagagaaaggcacagcctgctcaacctgctgatgaacctgcagaaaaggctgatgaaccaatggaacattaagtgataagccagtctatatatgtattatcaaatatgtaagaatacaggcaccacatactgatgacaataatctatactttgaaccaaaagttgcagagtggtggaatgctatgttttaggaatcagtccagatgtgagttttttccaagcaacctcactgaaacctatataatggaatacatttttctttgaaagggtctgtataatcattttctagaaagtatgggtatctatactaatgtttttatatgaagaacataggtgtctttgtggttttaaagacaactgtgaaataaaattgtttcaccgcctggtaaaaaaaaaaaaaaaaaaaaaaanaaaaaaaaaaaaaaaaaaaaaaagaaaaaaaagaggaaaaacgaaaagtacaaaagaatataataacagaaagaaaaggacacaataagagatgaacacaagaaacaacacaacaaaaagaaaaacaaaagaaggcaacacacacaaaaaaagaacaagacaacagaagacagagagagacagcgcgggagcaggagccgacgggacgagctactatccaacaacaagagaagagcgccaccagcgcagaacaaagccacagagccgccaccactggacgagccacatcttggaagaacggagagcaagacacaaactaaagatcaggcgggacgagcgacaacaaaaaagggcgaggaacaaacgcaccaactaaccacgaaggacatcaacagacggctaccagaggcaccacattac

SEQ ID NO: 321519 - DNA, 2107 bp, Homo sapiens
  misc_feature (1687)..(1687): n is a, c, g, or t
acccacgcgtcgcggacgcgtgggtcgacccacgcgtccgactgtagatcgctgagcgatactttcggcagcacctccttgattctcagttttgctggaggccgcaaccaggcccgcgccgccaccatggtacgttgaatcccgatctctggaaggtttagggcagagctctggtgactgggggatgacgagccacctctcctgtcatccttagcgtcgcccggtgccacgaggtatgagagcctcggcagacggccgggctccggcagtgattcagcatctccggcctggccgggctaggggttatcggtagccagtgcggcctttccaccgctttcgcttcccggggagcctccgacacttcctcctcggtcagctagatgagttcgcccctcaggttccttcagtggagtagattctgagcggtccagaatagctcctagtgctgtgtatgggagaggagaagacagagacttgacttggaggcctacctgtaccaccagtgcggacttgacccccaggtttgtgttcctggacagcgtccgttttcctggtgggttttcgaaatcagtatgacaatgatgtcactgtttggagcccccagggcaggattcatcaaattgaatatgcaatggaagctgttaaacaaggttcagccacagttggtctgaaatcaaaaactcatgcagttttggttgcattgaaaagggcgcaatcagagcttgcagctcatcagaaaaaaattctccatgttgacaaccatattggtatctcaattgcggggcttactgctgatgctagactgttatgtaattttatgcgtcaggagtgtttggattccagatttgtattcgatagaccactgcctgtgtctcgtcttgtatctctaattggaagcaagacccagataccaacacaacgatatggccggagaccatatggtgttggtctccttattgctggttatgatgatatgggccctcacattttccaaacctgtccatctgctaactattttgactgcagagccatgtccattggagcccgttcccaatcagctcgtacttacttggagagacatatgtctgaatttatggagtgtaatttaaatgaactagttaaacatggtctgcgtgccttaagagagacgcttcctgcagaacaggacctgactacaaagaatgtttccattggaattgttggtaaagacttggagtttacaatctatgatgatgatgatgtgtctccattcctggaaggtcttgaagaaagaccacagagaaaggcacagcctgctcaacctgctgatgaacctgcagaaaaggctgatgaaccaatggaacattaagtgataagccagtctatatatgtattatcaaatatgtaagaatacaggcaccacatactgatgacaataatctatactttgaaccaaaagttgcagagtggtggaatgctatgttttaggaatcagtccagatgtgagttttttccaagcaacctcactgaaacctatataatggaatacatttttctttgaaagggtctgtataatcattttctagaaagtatgggtatctatactaatgtttttatatgaagaacataggtgtctttgtggttttaaagacaactgtgaaataaaattgtttcaccgcctggtaaaaaaaaaaaaaaaaaaaaaaanaaaaaaaaaaaaaaaaaaaaaaagaaaaaaaagaggaaaaacgaaaagtacaaaagaatataataacagaaagaaaaggacacaataagagatgaacacaagaaacaacacaacaaaaagaaaaacaaaagaaggcaacacacacaaaaaaagaacaagacaacagaagacagagagagacagcgcgggagcaggagccgacgggacgagctactatccaacaacaagagaagagcgccaccagcgcagaacaaagccacagagccgccaccactggacgagccacatcttggaagaacggagagcaagacacaaactaaagatcaggcgggacgagcgacaacaaaaaagggcgaggaacaaacgcaccaactaaccacgaaggacatcaacagacggctaccagaggcaccacattac

SEQ ID NO: 321520 - DNA, 1631 bp, Homo sapiens
  misc_feature (1211)..(1211): n is a, c, g, or t
aatgacggctaggtacgaggcctgggggtaaaatcggccgagggttttgctggaggtcgcaaccaggccgcgccgccaccatgtttcgaaatcagtatgacaatgatgtcactgtttggagcccccagggcaggattcatcaaattgaatatgcaatggaagctgttaaacaaggttcagccacagttggtctgaaatcaaaaactcatgcagttttggttgcattgaaaagggcgcaatcagagcttgcagctcatcagaaaaaaattctccatgttgacaaccatattggtatctcaattgcggggcttactgctgatgctagactgttatgtaattttatgcgtcaggagtgtttggattccagatttgtattcgatagaccactgcctgtgtctcgtcttgtatctctaattggaagcaagacccagataccaacacaacgatatggccggagaccatatggtgttggtctccttattgctggttatgatgatatgggccctcacattttccaaacctgtccatctgctaactattttgactgcagagccatgtccattggagcccgttcccaatcagctcgtacttacttggagagacatatgtctgaatttatggagtgtaatttaaatgaactagttaaacatggtctgcgtgccttaagagagacgcttcctgcagaacaggacctgactacaaagaatgtttccattggaattgttggtaaagacttggagtttacaatctatgatgatgatgatgtgtctccattcctggaaggtcttgaagaaagaccacagagaaaggcacagcctgctcaacctgctgatgaacctgcagaaaaggctgatgaaccaatggaacattaagtgataagccagtctatatatgtattatcaaatatgtaagaatacaggcaccacatactgatgacaataatctatactttgaaccaaaagttgcagagtggtggaatgctatgttttaggaatcagtccagatgtgagttttttccaagcaacctcactgaaacctatataatggaatacatttttctttgaaagggtctgtataatcattttctagaaagtatgggtatctatactaatgtttttatatgaagaacataggtgtctttgtggttttaaagacaactgtgaaataaaattgtttcaccgcctggtaaaaaaaaaaaaaaaaaaaaaaanaaaaaaaaaaaaaaaaaaaaaaagaaaaaaaagaggaaaaacgaaaagtacaaaagaatataataacagaaagaaaaggacacaataagagatgaacacaagaaacaacacaacaaaaagaaaaacaaaagaaggcaacacacacaaaaaaagaacaagacaacagaagacagagagagacagcgcgggagcaggagccgacgggacgagctactatccaacaacaagagaagagcgccaccagcgcagaacaaagccacagagccgccaccactggacgagccacatcttggaagaacggagagcaagacacaaactaaagatcaggcgggacgagcgacaacaaaaaagggcgaggaacaaacgcaccaactaaccacgaaggacatcaacagacggctaccagaggcaccacattac

SEQ ID NO: 321521 - DNA, 2191 bp, Homo sapiens
  misc_feature (1771)..(1771): n is a, c, g, or t
acccacgcgtcgcggacgcgtgggtcgacccacgcgtccgactgtagatcgctgagcgatactttcggcagcacctccttgattctcagttttgctggaggccgcaaccaggcccgcgccgccaccatgtttcgaaatcagtatgacaatgatgtcactgtttggagcccccagggcaggattcatcaaattgaatatgcaatggaagctgttaaacaaggttcagccacagttggtctgaaatcaaaaactcatgcagttttggttgcattgaaaagggcgcaatcagagcttgcagctcatcagaaaaaaattctccatgttgacaaccatattggtatctcaattgcggggcttactgctgatgctagactgttatgtaattttatgcgtcaggagtgtttggattccagatttgtattcgatagaccactgcctgtgtctcgtcttgtatctctaattggaagcagtatcctttttatgttagcatttatggatatgaactttgaagggtttgatacttgtgttaattattaggaatataataataatatgacataggtaagattgtgaaaactttaaaacaacaaattggattgctctttcattagcctttataagcaatttatatttgctagacacaaataagcccaacttcaggaaaatcatctaagcatctttttagaggggatttaaagtttcttaatggttctagatgtcccaagaaatcctagaccccttgtatccaaaacaaatcaggttttagatgggaagaaattattttgctggcactctttcttaggttcggtagaaagtcaaacattttatattaggccaaagaaatagtgtcctattgcattatttctctggtggattatgcaacaattaaagaataagccagagacctttgttaataatgtataatttgaaaataaagacagtacttcattccttgttaaaacaagctcgttaaccagtctaagagacccagataccaacacaacgatatggccggagaccatatggtgttggtctccttattgctggttatgatgatatgggccctcacattttccaaacctgtccatctgctaactattttgactgcagagccatgtccattggagcccgttcccaatcagctcgtacttacttggagagacatatgtctgaatttatggagtgtaatttaaatgaactagttaaacatggtctgcgtgccttaagagagacgcttcctgcagaacaggacctgactacaaagaatgtttccattggaattgttggtaaagacttggagtttacaatctatgatgatgatgatgtgtctccattcctggaaggtcttgaagaaagaccacagagaaaggcacagcctgctcaacctgctgatgaacctgcagaaaaggctgatgaaccaatggaacattaagtgataagccagtctatatatgtattatcaaatatgtaagaatacaggcaccacatactgatgacaataatctatactttgaaccaaaagttgcagagtggtggaatgctatgttttaggaatcagtccagatgtgagttttttccaagcaacctcactgaaacctatataatggaatacatttttctttgaaagggtctgtataatcattttctagaaagtatgggtatctatactaatgtttttatatgaagaacataggtgtctttgtggttttaaagacaactgtgaaataaaattgtttcaccgcctggtaaaaaaaaaaaaaaaaaaaaaaanaaaaaaaaaaaaaaaaaaaaaaagaaaaaaaagaggaaaaacgaaaagtacaaaagaatataataacagaaagaaaaggacacaataagagatgaacacaagaaacaacacaacaaaaagaaaaacaaaagaaggcaacacacacaaaaaaagaacaagacaacagaagacagagagagacagcgcgggagcaggagccgacgggacgagctactatccaacaacaagagaagagcgccaccagcgcagaacaaagccacagagccgccaccactggacgagccacatcttggaagaacggagagcaagacacaaactaaagatcaggcgggacgagcgacaacaaaaaagggcgaggaacaaacgcaccaactaaccacgaaggacatcaacagacggctaccagaggcaccacattac

SEQ ID NO: 321522 - DNA, 1618 bp, Homo sapiens
  misc_feature (1198)..(1198): n is a, c, g, or t
acccacgcgtcgcggacgcgtgggtcgacccacgcgtccgactgtagatcgctgagcgatactttcggcagcacctccttgattctcagttttgctggaggccgcaaccaggcccgcgccgccaccatgtttcgaaatcagtatgacaatgatgtcactgtttggagcccccagggcaggattcatcaaattgaatatgcaatggaagctgttaaacaaggttcagccacagttggtctgaaatcaaaaactcatgcagttttggttgcattgaaaagggcgcaatcagagcttgcagctcatcagaaaaaaattctccattaattttatgcgtcaggagtgtttggattccagatttgtattcgatagaccactgcctgtgtctcgtcttgtatctctaattggaagcaagacccagataccaacacaacgatatggccggagaccatatggtgttggtctccttattgctggttatgatgatatgggccctcacattttccaaacctgtccatctgctaactattttgactgcagagccatgtccattggagcccgttcccaatcagctcgtacttacttggagagacatatgtctgaatttatggagtgtaatttaaatgaactagttaaacatggtctgcgtgccttaagagagacgcttcctgcagaacaggacctgactacaaagaatgtttccattggaattgttggtaaagacttggagtttacaatctatgatgatgatgatgtgtctccattcctggaaggtcttgaagaaagaccacagagaaaggcacagcctgctcaacctgctgatgaacctgcagaaaaggctgatgaaccaatggaacattaagtgataagccagtctatatatgtattatcaaatatgtaagaatacaggcaccacatactgatgacaataatctatactttgaaccaaaagttgcagagtggtggaatgctatgttttaggaatcagtccagatgtgagttttttccaagcaacctcactgaaacctatataatggaatacatttttctttgaaagggtctgtataatcattttctagaaagtatgggtatctatactaatgtttttatatgaagaacataggtgtctttgtggttttaaagacaactgtgaaataaaattgtttcaccgcctggtaaaaaaaaaaaaaaaaaaaaaaanaaaaaaaaaaaaaaaaaaaaaaagaaaaaaaagaggaaaaacgaaaagtacaaaagaatataataacagaaagaaaaggacacaataagagatgaacacaagaaacaacacaacaaaaagaaaaacaaaagaaggcaacacacacaaaaaaagaacaagacaacagaagacagagagagacagcgcgggagcaggagccgacgggacgagctactatccaacaacaagagaagagcgccaccagcgcagaacaaagccacagagccgccaccactggacgagccacatcttggaagaacggagagcaagacacaaactaaagatcaggcgggacgagcgacaacaaaaaagggcgaggaacaaacgcaccaactaaccacgaaggacatcaacagacggctaccagaggcaccacattac

SEQ ID NO: 321523 - DNA, 1606 bp, Homo sapiens
  misc_feature (1186)..(1186): n is a, c, g, or t
acccacgcgtcgcggacgcgtgggtcgacccacgcgtccgactgtagatcgctgagcgatactttcggcagcacctccttgattctcagttttgctggaggccgcaaccaggcccgcgccgccaccatgtttcgaaatcagtatgacaatgatgtcactgtttggagcccccagggcaggattcatcaaattgaatatgcaatggaagctgttaaacaaggttcagccacagttggtctgaaatcaaaaactcatgcagttttggttgcattgaaaagggcgcaatcagagcttgcagctcatcagaaaaaaattctccatgttgacaaccatattggtatctcaattgcggggcttactgctgatgctagactgttatgtaattttatgcgtcaggagtgtttggattccagatttgtattcgatagaccactgcctgtgtctcgtcttgtatctctaattggaagcagatatgggccctcacattttccaaacctgtccatctgctaactattttgactgcagagccatgtccattggagcccgttcccaatcagctcgtacttacttggagagacatatgtctgaatttatggagtgtaatttaaatgaactagttaaacatggtctgcgtgccttaagagagacgcttcctgcagaacaggacctgactacaaagaatgtttccattggaattgttggtaaagacttggagtttacaatctatgatgatgatgatgtgtctccattcctggaaggtcttgaagaaagaccacagagaaaggcacagcctgctcaacctgctgatgaacctgcagaaaaggctgatgaaccaatggaacattaagtgataagccagtctatatatgtattatcaaatatgtaagaatacaggcaccacatactgatgacaataatctatactttgaaccaaaagttgcagagtggtggaatgctatgttttaggaatcagtccagatgtgagttttttccaagcaacctcactgaaacctatataatggaatacatttttctttgaaagggtctgtataatcattttctagaaagtatgggtatctatactaatgtttttatatgaagaacataggtgtctttgtggttttaaagacaactgtgaaataaaattgtttcaccgcctggtaaaaaaaaaaaaaaaaaaaaaaanaaaaaaaaaaaaaaaaaaaaaaagaaaaaaaagaggaaaaacgaaaagtacaaaagaatataataacagaaagaaaaggacacaataagagatgaacacaagaaacaacacaacaaaaagaaaaacaaaagaaggcaacacacacaaaaaaagaacaagacaacagaagacagagagagacagcgcgggagcaggagccgacgggacgagctactatccaacaacaagagaagagcgccaccagcgcagaacaaagccacagagccgccaccactggacgagccacatcttggaagaacggagagcaagacacaaactaaagatcaggcgggacgagcgacaacaaaaaagggcgaggaacaaacgcaccaactaaccacgaaggacatcaacagacggctaccagaggcaccacattac

SEQ ID NO: 321524 - DNA, 1969 bp, Homo sapiens
  misc_feature (1549)..(1549): n is a, c, g, or t
acccacgcgtcgcggacgcgtgggtcgacccacgcgtccgactgtagatcgctgagcgatactttcggcagcacctccttgattctcagttttgctggaggccgcaaccaggcccgcgccgccaccatggtacgttgaatcccgatctctggaaggtttagggcagagctctggtgactgggggatgacgagccacctctcctgtcatccttagcgtcgcccggtgccacgaggtatgagagcctcggcagacggccgggctccggcagtgattcagcatctccggcctggccgggctaggggttatcggtagccagtgcggcctttccaccgctttcgcttcccggggagcctccgacacttcctcctcggtcagctagatgagttcgcccctcaggttccttcagtggagtagattctgagcggtccagaatagctcctagtgctgtgtatgggagaggagaagacagagacttgacttggaggcctacctgtaccaccagtgcggacttgacccccagtttcgaaatcagtatgacaatgatgtcactgtttggagcccccagggcaggattcatcaaattgaatatgcaatggaagctgttaaacaaggttcagccacagttggtctgaaatcaaaaactcatgcagttttggttgcattgaaaagggcgcaatcagagcttgcagctcatcagaaaaaaattctccatgttgacaaccatattggtatctcaattgcggggcttactgctgatgctagactgttatgtaattttatgcgtcaggagtgtttggattccagatttgtattcgatagaccactgcctgtgtctcgtcttgtatctctaattggaagcatccatctgctaactattttgactgcagagccatgtccattggagcccgttcccaatcagctcgtacttacttggagagacatatgtctgaatttatggagtgtaatttaaatgaactagttaaacatggtctgcgtgccttaagagagacgcttcctgcagaacaggacctgactacaaagaatgtttccattggaattgttggtaaagacttggagtttacaatctatgatgatgatgatgtgtctccattcctggaaggtcttgaagaaagaccacagagaaaggcacagcctgctcaacctgctgatgaacctgcagaaaaggctgatgaaccaatggaacattaagtgataagccagtctatatatgtattatcaaatatgtaagaatacaggcaccacatactgatgacaataatctatactttgaaccaaaagttgcagagtggtggaatgctatgttttaggaatcagtccagatgtgagttttttccaagcaacctcactgaaacctatataatggaatacatttttctttgaaagggtctgtataatcattttctagaaagtatgggtatctatactaatgtttttatatgaagaacataggtgtctttgtggttttaaagacaactgtgaaataaaattgtttcaccgcctggtaaaaaaaaaaaaaaaaaaaaaaanaaaaaaaaaaaaaaaaaaaaaaagaaaaaaaagaggaaaaacgaaaagtacaaaagaatataataacagaaagaaaaggacacaataagagatgaacacaagaaacaacacaacaaaaagaaaaacaaaagaaggcaacacacacaaaaaaagaacaagacaacagaagacagagagagacagcgcgggagcaggagccgacgggacgagctactatccaacaacaagagaagagcgccaccagcgcagaacaaagccacagagccgccaccactggacgagccacatcttggaagaacggagagcaagacacaaactaaagatcaggcgggacgagcgacaacaaaaaagggcgaggaacaaacgcaccaactaaccacgaaggacatcaacagacggctaccagaggcaccacattac

SEQ ID NO: 321525 - DNA, 1045 bp, Homo sapiens
  misc_feature (625)..(625): n is a, c, g, or t
atgaaattaagaaataattgttaatttattacatataggtaatttaaatgaactagttaaacatggtctgcgtgccttaagagagacgcttcctgcagaacaggacctgactacaaagaatgtttccattggaattgttggtaaagacttggagtttacaatctatgatgatgatgatgtgtctccattcctggaaggtcttgaagaaagaccacagagaaaggcacagcctgctcaacctgctgatgaacctgcagaaaaggctgatgaaccaatggaacattaagtgataagccagtctatatatgtattatcaaatatgtaagaatacaggcaccacatactgatgacaataatctatactttgaaccaaaagttgcagagtggtggaatgctatgttttaggaatcagtccagatgtgagttttttccaagcaacctcactgaaacctatataatggaatacatttttctttgaaagggtctgtataatcattttctagaaagtatgggtatctatactaatgtttttatatgaagaacataggtgtctttgtggttttaaagacaactgtgaaataaaattgtttcaccgcctggtaaaaaaaaaaaaaaaaaaaaaaanaaaaaaaaaaaaaaaaaaaaaaagaaaaaaaagaggaaaaacgaaaagtacaaaagaatataataacagaaagaaaaggacacaataagagatgaacacaagaaacaacacaacaaaaagaaaaacaaaagaaggcaacacacacaaaaaaagaacaagacaacagaagacagagagagacagcgcgggagcaggagccgacgggacgagctactatccaacaacaagagaagagcgccaccagcgcagaacaaagccacagagccgccaccactggacgagccacatcttggaagaacggagagcaagacacaaactaaagatcaggcgggacgagcgacaacaaaaaagggcgaggaacaaacgcaccaactaaccacgaaggacatcaacagacggctaccagaggcaccacattac

SEQ ID NO: 321526 - DNA, 855 bp, Homo sapiens
  misc_feature (435)..(435): n is a, c, g, or t
tggtaaagagttggagtttatattcctggagggtcttgaagaaagacacagagaaactgacctgcagaaaaggctgatgaaccaatggaacattaagtgataagccagtctatatatgtattatcaaatatgtaagaatacaggcaccacatactgatgacaataatctatactttgaaccaaaagttgcagagtggtggaatgctatgttttaggaatcagtccagatgtgagttttttccaagcaacctcactgaaacctatataatggaatacatttttctttgaaagggtctgtataatcattttctagaaagtatgggtatctatactaatgtttttatatgaagaacataggtgtctttgtggttttaaagacaactgtgaaataaaattgtttcaccgcctggtaaaaaaaaaaaaaaaaaaaaaaanaaaaaaaaaaaaaaaaaaaaaaagaaaaaaaagaggaaaaacgaaaagtacaaaagaatataataacagaaagaaaaggacacaataagagatgaacacaagaaacaacacaacaaaaagaaaaacaaaagaaggcaacacacacaaaaaaagaacaagacaacagaagacagagagagacagcgcgggagcaggagccgacgggacgagctactatccaacaacaagagaagagcgccaccagcgcagaacaaagccacagagccgccaccactggacgagccacatcttggaagaacggagagcaagacacaaactaaagatcaggcgggacgagcgacaacaaaaaagggcgaggaacaaacgcaccaactaaccacgaaggacatcaacagacggctaccagaggcaccacattac

SEQ ID NO: 321527 - DNA, 455 bp, Homo sapiens
tctggtgactgggggatgacgagccacctctcctgtcatccttagcgtcgcccggtgccacgaggtatgagagcctcggcagacggccgggctccggcagtgattcagcatctccggcctggccgggctaggggttatcggtagccagtgcggcctttccaccgctttcgcttcccggggagcctccgacacttcctcctcggtcagctagatgagttcgcccctcaggttccttcagtggagtagattctgagcggtccagaatagctcctagtgctgtgtatgggagaggagaagacagagacttgacttggaggcctacctgtaccaccagtgcggacttgacccccaggtttgtgttcctggacagcgtccgttttcctggtgggtcgtctatttatctctcgcctagacttcgattagaagaggcccttttcaatcattttgtccagtca

SEQ ID NO: 321528 - DNA, 366 bp, Homo sapiens
tataatcattttctagaaagtatgggtatctatactaatgtttttatatgaagaacataggtgtctttgtggttttaaagacaactgtgaaataaaattgtttcaccgcctggtatattgggtttttgtttttttaagtagcttcaactctatatagtagtctgggattacaactggtcatttgcctaattaaattgccttatttttagtgatggagaaaaataatacctcttatctgtcatagccttataacagttctccagtgtatgaactggctgcatgagaatccatggagatttggtttagaatacaaatttcagggttcaactgtggtgattttaattaaaacttaagaaaccaccactt

SEQ ID NO: 321529 - DNA, 903 bp, Homo sapiens
  misc_feature (710)..(710): n is a, c, g, or t
  misc_feature (714)..(714): n is a, c, g, or t
  misc_feature (716)..(716): n is a, c, g, or t
  misc_feature (724)..(724): n is a, c, g, or t
  misc_feature (728)..(728): n is a, c, g, or t
  misc_feature (742)..(742): n is a, c, g, or t
  misc_feature (758)..(758): n is a, c, g, or t
  misc_feature (766)..(766): n is a, c, g, or t
  misc_feature (768)..(769): n is a, c, g, or t
  misc_feature (772)..(772): n is a, c, g, or t
  misc_feature (780)..(780): n is a, c, g, or t
  misc_feature (797)..(797): n is a, c, g, or t
  misc_feature (799)..(799): n is a, c, g, or t
  misc_feature (803)..(804): n is a, c, g, or t
  misc_feature (819)..(819): n is a, c, g, or t
  misc_feature (825)..(825): n is a, c, g, or t
  misc_feature (827)..(827): n is a, c, g, or t
  misc_feature (831)..(831): n is a, c, g, or t
  misc_feature (838)..(838): n is a, c, g, or t
  misc_feature (840)..(840): n is a, c, g, or t
  misc_feature (843)..(843): n is a, c, g, or t
acccacgcgtcgcggacgcgtgggtcgacccacgcgtccgactgtagatcgctgagcgatactttcggcagcacctccttgattctcagttttgctggaggccgcaaccaggcccgcgccgccaccatgtttcgaaatcagtatgacaatgatgtcactgtttggagcccccagggcaggattcatcaaattgaatatgcaatggaagctgttaaacaaggttcagccacagttggtctgaaatcaaaaactcatgcagttttggttgcattgaaaagggcgcaatcagagcttgcagctcatcagaaaaaaattctccatgttgacaaccatattggtatctcaattgcggggcttactgctgatgctagactgttatgtaattttatgcgtcaggagtgtttggattccagatttgtattcgatagaccactgcctgtgtctcgtcttgtatctctaattggaagcaagacccagataccaacacaacgatatggccggagaccatatggtgttggtctccttattgctggttatgatgatatgggccctcacattttccaaacctgtccatctgctaactattttgactgcagagccatgtccattggagcccgttcccaatcagctcgtacttacttggagagacatatgtctgaatttatggagtgtaatttaatgaactagttaacatgatctggtgcttaganagangnttctgganaaangactgatacaagangttcctggatgtgggnagctgggntnnacnttgtggtntgtgttcctctggggtngnaaanncaaaaagggggtacngtgtgngngaanggggacngngtnggaacggatttttaaattgaaaggcgagaaattgaaagaggggttgaggcacaggtaaca

SEQ ID NO: 321530 - DNA, 1677 bp, Homo sapiens
  misc_feature (1257)..(1257): n is a, c, g, or t
acccacgcgtcgcggacgcgtgggtcgacccacgcgtccgactgtagatcgctgagcgatactttcggcagcacctccttgattctcagttttgctggaggccgcaaccaggcccgcgccgccaccatgtttcgaaatcagtatgacaatgatgtcactgtttggagcccccagggcaggattcatcaaattgaatatgcaatggaagctgttaaacaaggttcagccacagttggtctgaaatcaaaaactcatgcagttttggttgcattgaaaagggcgcaatcagagcttgcagctcatcagaaaaaaattctccatgttgacaaccatattggtatctcaattgcggggcttactgctgatgctagactgttatgtaattttatgcgtcaggagtgtttggattccagatttgtattcgatagaccactgcctgtgtctcgtcttgtatctctaattggaagcaagacccagataccaacacaacgatatggccggagaccatatggtgttggtctccttattgctggttatgatgatatgggccctcacattttccaaacctgtccatctgctaactattttgactgcagagccatgtccattggagcccgttcccaatcagctcgtacttacttggagagacatatgtctgaatttatggagtgtaatttaaatgaactagttaaacatggtctgcgtgccttaagagagacgcttcctgcagaacaggacctgactacaaagaatgtttccattggaattgttggtaaagacttggagtttacaatctatgatgatgatgatgtgtctccattcctggaaggtcttgaagaaagaccacagagaaaggcacagcctgctcaacctgctgatgaacctgcagaaaaggctgatgaaccaatggaacattaagtgataagccagtctatatatgtattatcaaatatgtaagaatacaggcaccacatactgatgacaataatctatactttgaaccaaaagttgcagagtggtggaatgctatgttttaggaatcagtccagatgtgagttttttccaagcaacctcactgaaacctatataatggaatacatttttctttgaaagggtctgtataatcattttctagaaagtatgggtatctatactaatgtttttatatgaagaacataggtgtctttgtggttttaaagacaactgtgaaataaaattgtttcaccgcctggtaaaaaaaaaaaaaaaaaaaaaaanaaaaaaaaaaaaaaaaaaaaaaagaaaaaaaagaggaaaaacgaaaagtacaaaagaatataataacagaaagaaaaggacacaataagagatgaacacaagaaacaacacaacaaaaagaaaaacaaaagaaggcaacacacacaaaaaaagaacaagacaacagaagacagagagagacagcgcgggagcaggagccgacgggacgagctactatccaacaacaagagaagagcgccaccagcgcagaacaaagccacagagccgccaccactggacgagccacatcttggaagaacggagagcaagacacaaactaaagatcaggcgggacgagcgacaacaaaaaagggcgaggaacaaacgcaccaactaaccacgaaggacatcaacagacggctaccagaggcaccacattac

SEQ ID NO: 321531 - DNA, 1678 bp, Homo sapiens
  misc_feature (1258)..(1258): n is a, c, g, or t
cctgcgccgccgccgtcaaactcccgcagacttctctgtagattgtagatcgctgagcgatactttcggcagcacctccttgattctcagttttgctggaggccgcaaccaggcccgcgccgccaccatgtttcgaaatcagtatgacaatgatgtcactgtttggagcccccagggcaggattcatcaaattgaatatgcaatggaagctgttaaacaaggttcagccacagttggtctgaaatcaaaaactcatgcagttttggttgcattgaaaagggcgcaatcagagcttgcagctcatcagaaaaaaattctccatgttgacaaccatattggtatctcaattgcggggcttactgctgatgctagactgttatgtaattttatgcgtcaggagtgtttggattccagatttgtattcgatagaccactgcctgtgtctcgtcttgtatctctaattggaagcaagacccagataccaacacaacgatatggccggagaccatatggtgttggtctccttattgctggttatgatgatatgggccctcacattttccaaacctgtccatctgctaactattttgactgcagagccatgtccattggagcccgttcccaatcagctcgtacttacttggagagacatatgtctgaatttatggagtgtaatttaaatgaactagttaaacatggtctgcgtgccttaagagagacgcttcctgcagaacaggacctgactacaaagaatgtttccattggaattgttggtaaagacttggagtttacaatctatgatgatgatgatgtgtctccattcctggaaggtcttgaagaaagaccacagagaaaggcacagcctgctcaacctgctgatgaacctgcagaaaaggctgatgaaccaatggaacattaagtgataagccagtctatatatgtattatcaaatatgtaagaatacaggcaccacatactgatgacaataatctatactttgaaccaaaagttgcagagtggtggaatgctatgttttaggaatcagtccagatgtgagttttttccaagcaacctcactgaaacctatataatggaatacatttttctttgaaagggtctgtataatcattttctagaaagtatgggtatctatactaatgtttttatatgaagaacataggtgtctttgtggttttaaagacaactgtgaaataaaattgtttcaccgcctggtaaaaaaaaaaaaaaaaaaaaaaanaaaaaaaaaaaaaaaaaaaaaaagaaaaaaaagaggaaaaacgaaaagtacaaaagaatataataacagaaagaaaaggacacaataagagatgaacacaagaaacaacacaacaaaaagaaaaacaaaagaaggcaacacacacaaaaaaagaacaagacaacagaagacagagagagacagcgcgggagcaggagccgacgggacgagctactatccaacaacaagagaagagcgccaccagcgcagaacaaagccacagagccgccaccactggacgagccacatcttggaagaacggagagcaagacacaaactaaagatcaggcgggacgagcgacaacaaaaaagggcgaggaacaaacgcaccaactaaccacgaaggacatcaacagacggctaccagaggcaccacattac

SEQ ID NO: 321532 - DNA, 1781 bp, Homo sapiens
  misc_feature (1361)..(1361): n is a, c, g, or t
acccacgcgtcgcggacgcgtgggtcgacccacgcgtccgactgtagatcgctgagcgatactttcggcagcacctccttgattctcagttttgctggaggccgcaaccaggcccgcgccgccaccatggtacgttgaatcccgatctctggaaggtttagggcagagctctggtgactgggggatgacgagccacctctcctgtcatccttagcgtcgcccggtgccacgagtttcgaaatcagtatgacaatgatgtcactgtttggagcccccagggcaggattcatcaaattgaatatgcaatggaagctgttaaacaaggttcagccacagttggtctgaaatcaaaaactcatgcagttttggttgcattgaaaagggcgcaatcagagcttgcagctcatcagaaaaaaattctccatgttgacaaccatattggtatctcaattgcggggcttactgctgatgctagactgttatgtaattttatgcgtcaggagtgtttggattccagatttgtattcgatagaccactgcctgtgtctcgtcttgtatctctaattggaagcaagacccagataccaacacaacgatatggccggagaccatatggtgttggtctccttattgctggttatgatgatatgggccctcacattttccaaacctgtccatctgctaactattttgactgcagagccatgtccattggagcccgttcccaatcagctcgtacttacttggagagacatatgtctgaatttatggagtgtaatttaaatgaactagttaaacatggtctgcgtgccttaagagagacgcttcctgcagaacaggacctgactacaaagaatgtttccattggaattgttggtaaagacttggagtttacaatctatgatgatgatgatgtgtctccattcctggaaggtcttgaagaaagaccacagagaaaggcacagcctgctcaacctgctgatgaacctgcagaaaaggctgatgaaccaatggaacattaagtgataagccagtctatatatgtattatcaaatatgtaagaatacaggcaccacatactgatgacaataatctatactttgaaccaaaagttgcagagtggtggaatgctatgttttaggaatcagtccagatgtgagttttttccaagcaacctcactgaaacctatataatggaatacatttttctttgaaagggtctgtataatcattttctagaaagtatgggtatctatactaatgtttttatatgaagaacataggtgtctttgtggttttaaagacaactgtgaaataaaattgtttcaccgcctggtaaaaaaaaaaaaaaaaaaaaaaanaaaaaaaaaaaaaaaaaaaaaaagaaaaaaaagaggaaaaacgaaaagtacaaaagaatataataacagaaagaaaaggacacaataagagatgaacacaagaaacaacacaacaaaaagaaaaacaaaagaaggcaacacacacaaaaaaagaacaagacaacagaagacagagagagacagcgcgggagcaggagccgacgggacgagctactatccaacaacaagagaagagcgccaccagcgcagaacaaagccacagagccgccaccactggacgagccacatcttggaagaacggagagcaagacacaaactaaagatcaggcgggacgagcgacaacaaaaaagggcgaggaacaaacgcaccaactaaccacgaaggacatcaacagacggctaccagaggcaccacattac

SEQ ID NO: 321533 - DNA, 2137 bp, Homo sapiens
  misc_feature (1717)..(1717): n is a, c, g, or t
acccacgcgtcgcggacgcgtgggtcgacccacgcgtccgactgtagatcgctgagcgatactttcggcagcacctccttgattctcagttttgctggaggccgcaaccaggcccgcgccgccaccatgtttcgaaatcagtatgacaatgatgtcactgtttggagcccccagggcaggattcatcaaattgaatatgcaatggaagctgttaaacaaggttcagccacagttggtctgaaatcaaaaactcatgcagttttggttgcattgaaaagggcgcaatcagagcttgcagctcatcagaaaaaaattctccatgttgacaaccatattggtatctcaattgcggggcttactgctgatgctagactgttatgtaattttatgcgtcaggagtgtttggattccagatttgtattcgatagaccactgcctgtgtctcgtcttgtatctctaattggaagcagtatcctttttatgttagcatttatggatatgaactttgaagggtttgatacttgtgttaattattaggaatataataataatatgacataggtaagattgtgaaaactttaaaacaacaaattggattgctctttcattagcctttataagcaatttatatttgctagacacaaataagcccaacttcaggaaaatcatctaagcatctttttagaggggatttaaagtttcttaatggttctagatgtcccaagaaatcctagaccccttgtatccaaaacaaatcaggttttagatgggaagaaattattttgctggcactctttcttaggttcggtagaaagtcaaacattttatattaggccaaagaaatagtgtcctattgcattatttctctggtggattatgcaacaattaaagaataagccagagacctttgttaataatgtataatttgaaaataaagacagtacttcattccttgttccggagaccatatggtgttggtctccttattgctggttatgatgatatgggccctcacattttccaaacctgtccatctgctaactattttgactgcagagccatgtccattggagcccgttcccaatcagctcgtacttacttggagagacatatgtctgaatttatggagtgtaatttaaatgaactagttaaacatggtctgcgtgccttaagagagacgcttcctgcagaacaggacctgactacaaagaatgtttccattggaattgttggtaaagacttggagtttacaatctatgatgatgatgatgtgtctccattcctggaaggtcttgaagaaagaccacagagaaaggcacagcctgctcaacctgctgatgaacctgcagaaaaggctgatgaaccaatggaacattaagtgataagccagtctatatatgtattatcaaatatgtaagaatacaggcaccacatactgatgacaataatctatactttgaaccaaaagttgcagagtggtggaatgctatgttttaggaatcagtccagatgtgagttttttccaagcaacctcactgaaacctatataatggaatacatttttctttgaaagggtctgtataatcattttctagaaagtatgggtatctatactaatgtttttatatgaagaacataggtgtctttgtggttttaaagacaactgtgaaataaaattgtttcaccgcctggtaaaaaaaaaaaaaaaaaaaaaaanaaaaaaaaaaaaaaaaaaaaaaagaaaaaaaagaggaaaaacgaaaagtacaaaagaatataataacagaaagaaaaggacacaataagagatgaacacaagaaacaacacaacaaaaagaaaaacaaaagaaggcaacacacacaaaaaaagaacaagacaacagaagacagagagagacagcgcgggagcaggagccgacgggacgagctactatccaacaacaagagaagagcgccaccagcgcagaacaaagccacagagccgccaccactggacgagccacatcttggaagaacggagagcaagacacaaactaaagatcaggcgggacgagcgacaacaaaaaagggcgaggaacaaacgcaccaactaaccacgaaggacatcaacagacggctaccagaggcaccacattac

SEQ ID NO: 321534 - DNA, 1566 bp, Homo sapiens
  misc_feature (1146)..(1146): n is a, c, g, or t
acccacgcgtcgcggacgcgtgggtcgacccacgcgtccgactgtagatcgctgagcgatactttcggcagcacctccttgattctcagttttgctggaggccgcaaccaggcccgcgccgccaccatgtttcgaaatcagtatgacaatgatgtcactgtttggagcccccagggcaggattcatcaaattgaatatgcaatggaagctgttaaacaaggttcagccacagttggtctgaaatcaaaaactcatgcagttttggttgcattgaaaagggcgcaatcagagcttgcagctcatcagaaaaaaattctccatgttgacaaccatattggtatctcaattgcggggcttactgctgatgctagactgttatgtaattttatgcgtcaggagtgtttggattccagatttgtattcgatagaccactgcctgtgtctcgtcttgtatctctaattggaagcaagacccagataccaacacaacgatatggccggagaccatatggtgttggtctccttattgctggttatgatgatatgggccctcacattttccaaacctgtccatctgctaactattttgactgcagagccatgtccattggagcccgttcccaatcagctcgtacttacttggagagacatatgtctgaatttatggagtgtaatttaaatgaactagttaaacatggtctgcgtgccttaagagagacgcttcctgcagaacaggacctgactacaaagcctgctcaacctgctgatgaacctgcagaaaaggctgatgaaccaatggaacattaagtgataagccagtctatatatgtattatcaaatatgtaagaatacaggcaccacatactgatgacaataatctatactttgaaccaaaagttgcagagtggtggaatgctatgttttaggaatcagtccagatgtgagttttttccaagcaacctcactgaaacctatataatggaatacatttttctttgaaagggtctgtataatcattttctagaaagtatgggtatctatactaatgtttttatatgaagaacataggtgtctttgtggttttaaagacaactgtgaaataaaattgtttcaccgcctggtaaaaaaaaaaaaaaaaaaaaaaanaaaaaaaaaaaaaaaaaaaaaaagaaaaaaaagaggaaaaacgaaaagtacaaaagaatataataacagaaagaaaaggacacaataagagatgaacacaagaaacaacacaacaaaaagaaaaacaaaagaaggcaacacacacaaaaaaagaacaagacaacagaagacagagagagacagcgcgggagcaggagccgacgggacgagctactatccaacaacaagagaagagcgccaccagcgcagaacaaagccacagagccgccaccactggacgagccacatcttggaagaacggagagcaagacacaaactaaagatcaggcgggacgagcgacaacaaaaaagggcgaggaacaaacgcaccaactaaccacgaaggacatcaacagacggctaccagaggcaccacattac

SEQ ID NO: 321535 - DNA, 1416 bp, Homo sapiens
  misc_feature (996)..(996): n is a, c, g, or t
acccacgcgtcgcggacgcgtgggtcgacccacgcgtccgactgtagatcgctgagcgatactttcggcagcacctccttgattctcagttttgctggaggccgcaaccaggcccgcgccgccaccatgtttcgaaatcagtatgacaatgatgtcactgtttggagcccccagggcaggattcatcaaattgaatatgcaatggaagctgttaaacaaggttcagccacagttggtctgaaatcaaaaactcatgcagttttggttgcattgaaaagggcgcaatcagagcttgcagctcatcagaaaaaaattctccatgttgacaaccatattggtatctcaattgcggggcttactgctgatgctagactgttatgtaattttatgcgtcaggagtgtttggattccagatttgtattcgatagaccactgcctgtgtctcgtcttgtatctctaattggaagcaaacaggacctgactacaaagaatgtttccattggaattgttggtaaagacttggagtttacaatctatgatgatgatgatgtgtctccattcctggaaggtcttgaagaaagaccacagagaaaggcacagcctgctcaacctgctgatgaacctgcagaaaaggctgatgaaccaatggaacattaagtgataagccagtctatatatgtattatcaaatatgtaagaatacaggcaccacatactgatgacaataatctatactttgaaccaaaagttgcagagtggtggaatgctatgttttaggaatcagtccagatgtgagttttttccaagcaacctcactgaaacctatataatggaatacatttttctttgaaagggtctgtataatcattttctagaaagtatgggtatctatactaatgtttttatatgaagaacataggtgtctttgtggttttaaagacaactgtgaaataaaattgtttcaccgcctggtaaaaaaaaaaaaaaaaaaaaaaanaaaaaaaaaaaaaaaaaaaaaaagaaaaaaaagaggaaaaacgaaaagtacaaaagaatataataacagaaagaaaaggacacaataagagatgaacacaagaaacaacacaacaaaaagaaaaacaaaagaaggcaacacacacaaaaaaagaacaagacaacagaagacagagagagacagcgcgggagcaggagccgacgggacgagctactatccaacaacaagagaagagcgccaccagcgcagaacaaagccacagagccgccaccactggacgagccacatcttggaagaacggagagcaagacacaaactaaagatcaggcgggacgagcgacaacaaaaaagggcgaggaacaaacgcaccaactaaccacgaaggacatcaacagacggctaccagaggcaccacattac

SEQ ID NO: 321536 - DNA, 670 bp, Homo sapiens
agcgtgtaggtgacgtggccgcttccagtctttggtcgggtttcggcggcttcagtgctcggggaggaggcagtgacggccggtgagattggaagtggcggcggcggcaggcggcagaggggagtccgaggttatgcgtctcaatgatcccgcggaaacgctacgggtctaagaacacggatcagggtgtctacctgggtctctcaaagacacaggtcctgtcccctgcaactgctggcagtagcagcagcgacatcgcccctctgccccccccagtgaccctcgtccctccccctcccgacaccatgtcctgccgggatcggacccaggagtttctgtctgcctgcaagtcgctgcagacccgtcagaatggaatccagacaaataagccagctttgcgtgctgtccgacaacgcagtgaattcaccctcatggccaagcgcattgggaaagaccttagcaacacatttgccaagctggagaagctgacaatcttggcaaagcgcaagtccctctttgatgataaagcagtggaaattgaagagctaacatatatcatcaaacaggacatcattagcctcaccaaacatattgctcaggcctataaaacaaaaggttctagttttgactcttctgtaaggtacttgagggccaagcccatctgggccca

SEQ ID NO: 321537 - DNA, 845 bp, Homo sapiens
cccaccgaagtgtgtcagtctttggaggtccgtcactggccctcccggaggggccgaaggaaaccgcggaaacgaaagggctgggttagggcccggggcagttacacgggccgggccggagtctcaggaccacggggttggctctggccctgtctctgcttcagggtccccggcccgcgctctggccgccagagccaagttggaagaagagtctgaagcgggttcgacttgggacaggggaaaagcggggccctttccgctgctggtccgccccaggatttgcgagcgtcctgggcgcgaaagtccacgagaagtgcagaaggggctcggggatttgttgattggggtggggcgggggagtttgggtaaagaagttgcctggggaatgacactctcccctccacaacagtccgaggttatgcgtctcaatgatcccgcggaaacgctacgggtctaagaacacggatcagggtgtctacctgggtctctcaaagacacaggtcctgtcccctgcaactgctggcagtagcagcagcgacatcgcccctctgccccccccagtgaccctcgtccctccccctcccgacaccatgtcctgccgggatcggacccaggagtttctgtctgcctgcaagtcgctgcagacccgtcaggtaaggacctggagtggaaaaggcgaggagtgagccttactcaaatctaggaaggactgtgctccaccactgttaaccgaagtaattttggggggtacctgatggaactgataggcttggatggggcctgtagggtctgctataagcaacagagaagaggtcggctggctaactaggggcaaggacttagac

SEQ ID NO: 321538 - DNA, 394 bp, Homo sapiens
aatttgttgtttttgttttgttttgagatctgtttttcaactctgtcaacaggctggagtgtagtggtgtgatgatagctcacttgcagtcttgaactcctagactcaagggatcctctttcctcagcctcctgagcagctgggactacatggatgcaccactcagctaattttaaaattttttcgtacaggcagtgtctcactatgttgcccaggttggtctggacaccacacctggccctagatcagtaatttgtatcaaaatcacttagggttggatgtggtggctcatacctgtaattccagcactttgggaggcctaggccagaggatgacttgaggccaggagttagagaccagcaggagcaacaaagcaagaccctgtttctacagg

SEQ ID NO: 321539 - DNA, 1839 bp, Homo sapiens
agcgtgtaggtgacgtggccgcttccagtctttggtcgggtttcggcggcttcagtgctcggggaggaggcagtgacggccggtgagattggaagtggcggcggcggcaggcggcagaggggagtccgaggttatgcgtctcaatgatcccgcggaaacgctacgggtctaagaacacggatcagggtgtctacctgggtctctcaaagacacaggtcctgtcccctgcaactgctggcagtagcagcagcgacatcgcccctctgccccccccagtgaccctcgtccctccccctcccgacaccatgtcctgccgggatcggacccaggagtttctgtctgcctgcaagtcgctgcagacccgtcagaatggaatccagacaaataagccagctttgcgtgctgtccgacaacgcagtgaattcaccctcatggccaagcgcattgggaaagaccttagcaacacatttgccaagctggagaagctgacaatcttggcaaagcgcaagtccctctttgatgataaagcagtggaaattgaagagctaacatatatcatcaaacaggacatcaatagcctcaacaaacaaattgctcagctccaggatttcgtgagagccaagggcagccagagtggccggcacctgcagacccactccaacaccattgtggtctccttgcagtcgaaactggcttctatgtccaatgacttcaaatcggttttagaagtgaggacagagaacctgaagcagcagaggagccggagagagcagttctcccgggcacctgtgtcagccctgccccttgcccctaaccacctgggcggtggtgctgtggttctgggggcagagtcccatgcctccaaggatgtcgccatcgacatgatggactctcggaccagccagcagctgcagctcattgacgagcaggattcctacatccagagtcgggcagacaccatgcagaacattgagtcgacaattgttgagttgggctccatctttcagcagttggcacacatggttaaggaacaggaggaaaccattcagaggatcgacgagaacgtgctaggagcccagctggacgttgaggccgcccattcagagatcctcaagtacttccagtctgtcacctccaaccggtggctcatggtcaaaatcttcctcatcctcattgtcttcttcatcatctttgtggtcttccttgcttgaaccctctctactctgaggcactctgttggggtttgggaccctcctgggaaggcaagtggccagtgctgccactgagcctgtgcagggtacttgggagaaaggccctgtttccctggaactgctaagaatgaccactgcccctgatcccccaccccttgcctctggccaccctgtcctccccccaccaccctcaggcctatgaaacacacagggttctagatttgaactctgctgtgaagtgactggaagggagcagaggccagctgggggccagtgggggaggttgtttccactaggagatttttataaaccctctccagcctctcccaaaggaagcgttggcagcaaagggagatgatgcccttacccaccttcctgtgagtgaagagaggaagcagccccagggaccaattttcccaattgacctctttcttcctctttcaccatgtgaggcagggagccctgagcccttcagctgcctgcacaacccctgacattggctgctggtgactcaatctgccaaatgtgctgcagctcgttttctcccaattacagcaagactgtcagcctcactagccatgtcatcatttctgggtgggagcgtcgaagggcctaggcagcgagtgga

SEQ ID NO: 321540 - DNA, 1845 bp, Homo sapiens
agaaaaacaaatcaggctaaggtacgaggctcggggtggttcagggtttcggcggcttcagtgctcggggaggaggcagtgacggccggtgagattggaagtggcggcggcggcaggcggcagaggggagtccgaggttatgcgtctcaatgatcccgcggaaacgctacgggtctaagaacacggatcagggtgtctacctgggtctctcaaagacacaggtcctgtcccctgcaactgctggcagtagcagcagcgacatcgcccctctgccccccccagtgaccctcgtccctccccctcccgacaccatgtcctgccgggatcggacccaggagtttctgtctgcctgcaagtcgctgcagacccgtcagaatggaatccagacaaataagccagctttgcgtgctgtccgacaacgcagtgaattcaccctcatggccaagcgcattgggaaagaccttagcaacacatttgccaagctggagaagctgacaatcttggcaaagcgcaagtccctctttgatgataaagcagtggaaattgaagagctaacatatatcatcaaacaggacatcaatagcctcaacaaacaaattgctcagctccaggatttcgtgagagccaagggcagccagagtggccggcacctgcagacccactccaacaccattgtggtctccttgcagtcgaaactggcttctatgtccaatgacttcaaatcggttttagaagtgaggacagagaacctgaagcagcagaggagccggagagagcagttctcccgggcacctgtgtcagccctgccccttgcccctaaccacctgggcggtggtgctgtggttctgggggcagagtcccatgcctccaaggatgtcgccatcgacatgatggactctcggaccagccagcagctgcagctcattgacgagcaggattcctacatccagagtcgggcagacaccatgcagaacattgagtcgacaattgttgagttgggctccatctttcagcagttggcacacatggttaaggaacaggaggaaaccattcagaggatcgacgagaacgtgctaggagcccagctggacgttgaggccgcccattcagagatcctcaagtacttccagtctgtcacctccaaccggtggctcatggtcaaaatcttcctcatcctcattgtcttcttcatcatctttgtggtcttccttgcttgaaccctctctactctgaggcactctgttggggtttgggaccctcctgggaaggcaagtggccagtgctgccactgagcctgtgcagggtacttgggagaaaggccctgtttccctggaactgctaagaatgaccactgcccctgatcccccaccccttgcctctggccaccctgtcctccccccaccaccctcaggcctatgaaacacacagggttctagatttgaactctgctgtgaagtgactggaagggagcagaggccagctgggggccagtgggggaggttgtttccactaggagatttttataaaccctctccagcctctcccaaaggaagcgttggcagcaaagggagatgatgcccttacccaccttcctgtgagtgaagagaggaagcagccccagggaccaattttcccaattgacctctttcttcctctttcaccatgtgaggcagggagccctgagcccttcagctgcctgcacaacccctgacattggctgctggtgactcaatctgccaaatgtgctgcagctcgttttctcccaattacagcaagactgtcagcctcactagccatgtcatcatttctgggtgggagcgtcgaagggcctaggcagcgagtgga

SEQ ID NO: 321541 - DNA, 2124 bp, Homo sapiens
cccaccgaagtgtgtcagtctttggaggtccgtcactggccctcccggaggggccgaaggaaaccgcggaaacgaaagggctgggttagggcccggggcagttacacgggccgggccggagtctcaggaccacggggttggctctggccctgtctctgcttcagggtccccggcccgcgctctggccgccagagccaagttggaagaagagtctgaagcgggttcgacttgggacaggggaaaagcggggccctttccgctgctggtccgccccaggatttgcgagcgtcctgggcgcgaaagtccacgagaagtgcagaaggggctcggggatttgttgattggggtggggcgggggagtttgggtaaagaagttgcctggggaatgacactctcccctccacaacagtccgaggttatgcgtctcaatgatcccgcggaaacgctacgggtctaagaacacggatcagggtgtctacctgggtctctcaaagacacaggtcctgtcccctgcaactgctggcagtagcagcagcgacatcgcccctctgccccccccagtgaccctcgtccctccccctcccgacaccatgtcctgccgggatcggacccaggagtttctgtctgcctgcaagtcgctgcagacccgtcagaatggaatccagacaaataagccagctttgcgtgctgtccgacaacgcagtgaattcaccctcatggccaagcgcattgggaaagaccttagcaacacatttgccaagctggagaagctgacaatcttggcaaagcgcaagtccctctttgatgataaagcagtggaaattgaagagctaacatatatcatcaaacaggacatcaatagcctcaacaaacaaattgctcagctccaggatttcgtgagagccaagggcagccagagtggccggcacctgcagacccactccaacaccattgtggtctccttgcagtcgaaactggcttctatgtccaatgacttcaaatcggttttagaagtgaggacagagaacctgaagcagcagaggagccggagagagcagttctcccgggcacctgtgtcagccctgccccttgcccctaaccacctgggcggtggtgctgtggttctgggggcagagtcccatgcctccaaggatgtcgccatcgacatgatggactctcggaccagccagcagctgcagctcattgacgagcaggattcctacatccagagtcgggcagacaccatgcagaacattgagtcgacaattgttgagttgggctccatctttcagcagttggcacacatggttaaggaacaggaggaaaccattcagaggatcgacgagaacgtgctaggagcccagctggacgttgaggccgcccattcagagatcctcaagtacttccagtctgtcacctccaaccggtggctcatggtcaaaatcttcctcatcctcattgtcttcttcatcatctttgtggtcttccttgcttgaaccctctctactctgaggcactctgttggggtttgggaccctcctgggaaggcaagtggccagtgctgccactgagcctgtgcagggtacttgggagaaaggccctgtttccctggaactgctaagaatgaccactgcccctgatcccccaccccttgcctctggccaccctgtcctccccccaccaccctcaggcctatgaaacacacagggttctagatttgaactctgctgtgaagtgactggaagggagcagaggccagctgggggccagtgggggaggttgtttccactaggagatttttataaaccctctccagcctctcccaaaggaagcgttggcagcaaagggagatgatgcccttacccaccttcctgtgagtgaagagaggaagcagccccagggaccaattttcccaattgacctctttcttcctctttcaccatgtgaggcagggagccctgagcccttcagctgcctgcacaacccctgacattggctgctggtgactcaatctgccaaatgtgctgcagctcgttttctcccaattacagcaagactgtcagcctcactagccatgtcatcatttctgggtgggagcgtcgaagggcctaggcagcgagtgga

SEQ ID NO: 321542 - DNA, 1859 bp, Homo sapiens
agcgtgtaggtgacgtggccgcttccagtctttggtcgggtttcggcggcttcagtgctcggggaggaggcagtgacggccggtgagattggaagtggcggcggcggcaggcggcagaggggagtccgaggttatgcgtctcaatgatcccgcggaaacgctacgggtctaagaacacggatcagggtgtctacctgggtctctcaaagacacaggtcctgtcccctgcaactgctggcagtagcagcagcgacatcgcccctctgccccccccagtgaccctcgtccctccccctcccgacaccatgtcctgccgggatcggacccaggagtttctgtctgcctgcaagtcgctgcagacccgtcagaatggaatccagacaaataagccagctttgcgtgctgtccgacaacgcagtgaattcaccctcatggccaagcgcattgggaaagaccttagcaacacatttgccaagctggagaagctgacaatcttggcaaagcgcaagtccctctttgatgataaagcagtggaaattgaagagctaacatatatcatcaaacaggacatcaatagcctcaacaaacaaattgctcagctccaggatttcgtgagagccaagggcagccagagtggccggcacctgcagacccactccaacaccattgtggtctccttgcagtcgaaactggcttctatgtccaatgacttcaaatcggttttagaagtgaggacagagaacctgaagcagcagaggagccggagagagcagttctcccgggcacctgtgtcagccctgccccttgcccctaaccacctgggcggtggtgctgtggttctgggggcagagtcccatgcctccaaggatgtcgccatcgacatgatggactctcggaccagccagcagctgcagctcattgacgagcaggtacccaggctctgaactaggattcctacatccagagtcgggcagacaccatgcagaacattgagtcgacaattgttgagttgggctccatctttcagcagttggcacacatggttaaggaacaggaggaaaccattcagaggatcgacgagaacgtgctaggagcccagctggacgttgaggccgcccattcagagatcctcaagtacttccagtctgtcacctccaaccggtggctcatggtcaaaatcttcctcatcctcattgtcttcttcatcatctttgtggtcttccttgcttgaaccctctctactctgaggcactctgttggggtttgggaccctcctgggaaggcaagtggccagtgctgccactgagcctgtgcagggtacttgggagaaaggccctgtttccctggaactgctaagaatgaccactgcccctgatcccccaccccttgcctctggccaccctgtcctccccccaccaccctcaggcctatgaaacacacagggttctagatttgaactctgctgtgaagtgactggaagggagcagaggccagctgggggccagtgggggaggttgtttccactaggagatttttataaaccctctccagcctctcccaaaggaagcgttggcagcaaagggagatgatgcccttacccaccttcctgtgagtgaagagaggaagcagccccagggaccaattttcccaattgacctctttcttcctctttcaccatgtgaggcagggagccctgagcccttcagctgcctgcacaacccctgacattggctgctggtgactcaatctgccaaatgtgctgcagctcgttttctcccaattacagcaagactgtcagcctcactagccatgtcatcatttctgggtgggagcgtcgaagggcctaggcagcgagtgga

SEQ ID NO: 321543 - DNA, 1945 bp, Homo sapiens
  misc_feature (1744)..(1744): n is a, c, g, or t
  misc_feature (1878)..(1878): n is a, c, g, or t
  misc_feature (1908)..(1908): n is a, c, g, or t
  misc_feature (1912)..(1912): n is a, c, g, or t
  misc_feature (1914)..(1914): n is a, c, g, or t
  misc_feature (1919)..(1919): n is a, c, g, or t
  misc_feature (1922)..(1923): n is a, c, g, or t
agcgtgtaggtgacgtggccgcttccagtctttggtcgggtttcggcggcttcagtgctcggggaggaggcagtgacggccggtgagattggaagtggcggcggcggcaggcggcagaggggagtccgaggttatgcgtctcaatgatcccgcggaaacgctacgggtctaagaacacggatcagggtgtctacctgggtctctcaaagacacaggtcctgtcccctgcaactgctggcagtagcagcagcgacatcgcccctctgccccccccagtgaccctcgtccctccccctcccgacaccatgtcctgccgggatcggacccaggagtttctgtctgcctgcaagtcgctgcagacccgtcagaatggaatccagacaaataagccagctttgcgtgctgtccgacaacgcagtgaattcaccctcatggccaagcgcattgggaaagaccttagcaacacatttgccaagctggagaagctgacaatcttggcaaagcgcaagtccctctttgatgataaagcagtggaaattgaagagctaacatatatcatcaaacaggacatcaatagcctcaacaaacaaattgctcagctccaggatttcgtgagagccaagggcagccagagtggccggcacctgcagacccactccaacaccattgtggtctccttgcagtcgaaactggcttctatgtccaatgacttcaaatcggttttagaagtgaggacagagaacctgaagcagcagaggagccggagagagcagttctcccgggcacctgtgtcagccctgccccttgcccctaaccacctgggcggtggtgctgtggttctgggggcagagtcccatgcctccaaggatgtcgccatcgacatgatggactctcggaccagccagcagctgcagctcattgacgagcaggattcctacatccagagtcgggcagacaccatgcagaacattgagtcgacaattgttgagttgggctccatctttcagcagttggcacacatggttaaggaacaggaggaaaccattcagaggatcgacgagaacgtgctaggagcccagctggacgttgaggccgcccattcagagatcctcaagtacttccagtctgtcacctccaaccggtggctcatggtcaaaatcttgaaccctctctactctgaggcactctgttggggtttgggaccctcctgggaaggcaagtggccagtgctgccactgagcctgtgcagggtacttgggagaaaggccctgtttccctggaactgctaagaatgaccactgcccctgatcccccaccccttgcctctggccaccctgtcctccccccaccaccctcaggcctatgaaacacacagggttctagatttgaactctgctgtgaagtgactggaagggagcagaggccagctgggggccagtgggggaggttgtttccactaggagatttttataaaccctctccagcctctcccaaaggaagcgttggcagcaaagggagatgatgcccttacccaccttcctgtgagtgaagagaggaagcagccccagggaccaattttcccaattgacctctttcttcctctttcaccatgtgaggcagggagccctgagcccttcagctgcctgcacaacccctgacattggctgctggtgactcaatctgccaaatgtgctgcagctcgttttctcccaattacagcaagactgtcagcctcaaaaaaaanatcatgaatggacacttgggttgcttccacctcttggctattgtgaataatgctgctttaaacatggacgtacaaatagctctaagaacctttccattctttttggatatatacccagaagtagaattgctgantcatataattctaaatttttagctcatacntttntncatancanntgcccttttacatttccacgtg

SEQ ID NO: 321544 - DNA, 1029 bp, Homo sapiens
agcgtgtaggtgacgtggccgcttccagtctttggtcgggtttcggcggctccaaggatgtcgccatcgacatgatggactctcggaccagccagcagctgcagctcattgacgagcaggattcctacatccagagtcgggcagacaccatgcagaacattgagtcgacaattgttgagttgggctccatctttcagcagttggcacacatggttaaggaacaggaggaaaccattcagaggatcgacgagaacgtgctaggagcccagctggacgttgaggccgcccattcagagatcctcaagtacttccagtctgtcacctccaaccggtggctcatggtcaaaatcttcctcatcctcattgtcttcttcatcatctttgtggtcttccttgcttgaaccctctctactctgaggcactctgttggggtttgggaccctcctgggaaggcaagtggccagtgctgccactgagcctgtgcagggtacttgggagaaaggccctgtttccctggaactgctaagaatgaccactgcccctgatcccccaccccttgcctctggccaccctgtcctccccccaccaccctcaggcctatgaaacacacagggttctagatttgaactctgctgtgaagtgactggaagggagcagaggccagctgggggccagtgggggaggttgtttccactaggagatttttataaaccctctccagcctctcccaaaggaagcgttggcagcaaagggagatgatgcccttacccaccttcctgtgagtgaagagaggaagcagccccagggaccaattttcccaattgacctctttcttcctctttcaccatgtgaggcagggagccctgagcccttcagctgcctgcacaacccctgacattggctgctggtgactcaatctgccaaatgtgctgcagctcgttttctcccaattacagcaagactgtcagcctcactagccatgtcatcatttctgggtgggagcgtcgaagggcctaggcagcgagtgga

SEQ ID NO: 321545 - DNA, 1268 bp, Homo sapiens
gggattcaaacccagagcatgtgggctttgaacctgcttttaactgttaaggtgtgccacatcctgttttctcccccaggcggtggtgctgtggttctgggggcagagtcccatgcctccaaggatgtcgccatcgacatgatggactctcggaccagccagcagctgcagctcattgacgagcaggtacccaggctctgaactaggtagaatcagcttctccattatcctctgtggttcccgagagagtgtttggagtgtgccatgggcagaatggcaagctgggagggttgtaaaaatgcaggtctgaccctgaagaagctgttggtgctcatgtgctctctccctctcctgaagggattcctacatccagagtcgggcagacaccatgcagaacattgagtcgacaattgttgagttgggctccatctttcagcagttggcacacatggttaaggaacaggaggaaaccattcagaggatcgacgagaacgtgctaggagcccagctggacgttgaggccgcccattcagagatcctcaagtacttccagtctgtcacctccaaccggtggctcatggtcaaaatcttcctcatcctcattgtcttcttcatcatctttgtggtcttccttgcttgaaccctctctactctgaggcactctgttggggtttgggaccctcctgggaaggcaagtggccagtgctgccactgagcctgtgcagggtacttgggagaaaggccctgtttccctggaactgctaagaatgaccactgcccctgatcccccaccccttgcctctggccaccctgtcctccccccaccaccctcaggcctatgaaacacacagggttctagatttgaactctgctgtgaagtgactggaagggagcagaggccagctgggggccagtgggggaggttgtttccactaggagatttttataaaccctctccagcctctcccaaaggaagcgttggcagcaaagggagatgatgcccttacccaccttcctgtgagtgaagagaggaagcagccccagggaccaattttcccaattgacctctttcttcctctttcaccatgtgaggcagggagccctgagcccttcagctgcctgcacaacccctgacattggctgctggtgactcaatctgccaaatgtgctgcagctcgttttctcccaattacagcaagactgtcagcctcactagccatgtcatcatttctgggtgggagcgtcgaagggcctaggcagcgagtgga

SEQ ID NO: 321546 - DNA, 964 bp, Homo sapiens
tatagctgttcttgaggatcacctggatgtgctgtctcagcagtagagagggtcgattcctacatccagagtcgggcagacaccatgcagaacattgagtcgacaattgttgagttgggctccatctttcagcagttggcacacatggttaaggaacaggaggaaaccattcagaggatcgacgagaacgtgctaggagcccagctggacgttgaggccgcccattcagagatcctcaagtacttccagtctgtcacctccaaccggtggctcatggtcaaaatcttcctcatcctcattgtcttcttcatcatctttgtggtcttccttgcttgaaccctctctactctgaggcactctgttggggtttgggaccctcctgggaaggcaagtggccagtgctgccactgagcctgtgcagggtacttgggagaaaggccctgtttccctggaactgctaagaatgaccactgcccctgatcccccaccccttgcctctggccaccctgtcctccccccaccaccctcaggcctatgaaacacacagggttctagatttgaactctgctgtgaagtgactggaagggagcagaggccagctgggggccagtgggggaggttgtttccactaggagatttttataaaccctctccagcctctcccaaaggaagcgttggcagcaaagggagatgatgcccttacccaccttcctgtgagtgaagagaggaagcagccccagggaccaattttcccaattgacctctttcttcctctttcaccatgtgaggcagggagccctgagcccttcagctgcctgcacaacccctgacattggctgctggtgactcaatctgccaaatgtgctgcagctcgttttctcccaattacagcaagactgtcagcctcactagccatgtcatcatttctgggtgggagcgtcgaagggcctaggcagcgagtgga

SEQ ID NO: 321547 - DNA, 1225 bp, Homo sapiens
gcaatggtctgtgaacatttttccccttacaataaatataatacatactcaccagataaaaatgtaaatactgatgaggaaaaattgtaactaacattttcggggctcttgtgggttagggactttatactaactcattgaagacagcgacagtagcctgagagaaggtagggtttgggttatcctcattttgccggtgaggaaaatgaagcttgaagttagactaacttagagtcttaagctaataaatggcagagttggttttcaaaccagaaataacttgtttatagtacccttccaaagccttttctatacacaaatatatataagaatgggatcatattgtgaccatctttccatgtcaataaatggacttcaacagcattctttttaatccagtgtccttttgtttcctcttctcccggccttgtccccaggatcgacgagaacgtgctaggagcccagctggacgttgaggccgcccattcagagatcctcaagtacttccagtctgtcacctccaaccggtggctcatggtcaaaatcttcctcatcctcattgtcttcttcatcatctttgtggtcttccttgcttgaaccctctctactctgaggcactctgttggggtttgggaccctcctgggaaggcaagtggccagtgctgccactgagcctgtgcagggtacttgggagaaaggccctgtttccctggaactgctaagaatgaccactgcccctgatcccccaccccttgcctctggccaccctgtcctccccccaccaccctcaggcctatgaaacacacagggttctagatttgaactctgctgtgaagtgactggaagggagcagaggccagctgggggccagtgggggaggttgtttccactaggagatttttataaaccctctccagcctctcccaaaggaagcgttggcagcaaagggagatgatgcccttacccaccttcctgtgagtgaagagaggaagcagccccagggaccaattttcccaattgacctctttcttcctctttcaccatgtgaggcagggagccctgagcccttcagctgcctgcacaacccctgacattggctgctggtgactcaatctgccaaatgtgctgcagctcgttttctcccaattacagcaagactgtcagcctcactagccatgtcatcatttctgggtgggagcgtcgaagggcctaggcagcgagtgga

SEQ ID NO: 321548 - DNA, 2538 bp, Homo sapiens
agcgtgtaggtgacgtggccgcttccagtctttggtcgggtttcggcggcttcagtgctcggggaggaggcagtgacggccggtgagattggaagtggcggcggcggcaggcggcagaggggagtccgaggttatgcgtctcaatgatcccgcggaaacgctacgggtctaagaacacggatcagggtgtctacctgggtctctcaaagacacaggtcctgtcccctgcaactgctggcagtagcagcagcgacatcgcccctctgccccccccagtgaccctcgtccctccccctcccgacaccatgtcctgccgggatcggacccaggagtttctgtctgcctgcaagtcgctgcagacccgtcagaatggaatccagacaaataagccagctttgcgtgctgtccgacaacgcagtgaattcaccctcatggccaagcgcattgggaaagaccttagcaacacatttgccaagctggagaagctgacaatcttggcaaagcgcaagtccctctttgatgataaagcagtggaaattgaagagctaacatatatcatcaaacaggacatcaatagcctcaacaaacaaattgctcagctccaggatttcgtgagagccaagggcagccagagtggccggcacctgcagacccactccaacaccattgtggtctccttgcagtcgaaactggcttctatgtccaatgacttcaaatcggttttagaagtgaggacagagaacctgaagcagcagaggagccggagagagcagttctcccgggcacctgtgtcagccctgccccttgcccctaaccacctgggcggtggtgctgtggttctgggggcagagtcccatgcctccaaggatgtcgccatcgacatgatggactctcggaccagccagcagctgcagctcattgacgagcaggattcctacatccagagtcgggcagacaccatgcagaacattgagtcgacaattgttgagttgggctccatctttcagcagttggcacacatggttaaggaacaggaggaaaccattcagaggatcgacgagaacgtgctaggagcccagctggacgttgaggccgcccattcagagatcctcaagtacttccagtctgtcacctccaaccggtggctcatggtcaaaatcttcctcatcctcattgtcttcttcatcatctttgtggtcttccttgcttgaaccctctctactctgaggcactctgttggggtttgggaccctcctgggaaggcaagtggccagtgctgccactgagcctgtgcagggtacttgggagaaaggccctgtttccctggaactgctaagaatgaccactgcccctgatcccccaccccttgcctctggccaccctgtcctccccccaccaccctcaggcctatgaaacacacagggttctagatttgaactctgctgtgaagtgactggaagggagcagaggccagctgggggccagtgggggaggttgtttccactaggagatttttataaaccctctccagcctctcccaaaggaagcgttggcagcaaagggagatgatgcccttcactcactgtgaaggtggctccgtcgtgccgaattcggcacggaggggccggcttcagctcgctcggggcatcgtaatgtgctatgcccgtactgtgccgcgctgtagtataggcaaggtggccgcgctggcatggcctggcggctgcactgggagtcccgccggtgtactgtcgtctcgcttggttccctccaggtctgcgcctactggtgtcttgcagatctgcctggatctccgcatgtctcacgctgggatccttgcttcaagcacgaccaacataggataccttgtttcccccacttgacaaagcataggctacgggcaaggcaacgccaaggcaaatggccgaacaatttctggccgcgcatccatggattgctgtggcggtgtgggaaagaaaataaagagagagtgacgcaagagaaggtggcgcagagagaggagaaacaaggacgagaaaacacacgagagagccacagaagagattgtttctgtgaacaaagggtcgtggggaaaaacacacagcggcgggcgccacaccaaccaacaaagaatgagagggcaaaagacaaaagaaggacacaagacaatagaacaccagcctgaagccaacaaccagggcaaagtataagagatgcagagcaagaaacagagcaacagcaagaatggagcaacagcagcacagaagcaaagcaaaagaagaccactgaaacagagacaaaagacagaaagacagaagaaagagaaaaagacgcaaagaaagaacaacggaaaagacaacacagagtgcgcaaaagagtagagaagaaagagagaacacaaaagacaccagaagagaagcaaagaacacagagcagaaaaagacaaaggatataaaaaaatagaggaggagacgaatacacagaaagaacacaagcaaggaagaaagcgaaaaaaagagtgactgtgcgaagctgcaaccg

SEQ ID NO: 321549 - DNA, 974 bp, Homo sapiens
  misc_feature (773)..(773): n is a, c, g, or t
  misc_feature (907)..(907): n is a, c, g, or t
  misc_feature (937)..(937): n is a, c, g, or t
  misc_feature (941)..(941): n is a, c, g, or t
  misc_feature (943)..(943): n is a, c, g, or t
  misc_feature (948)..(948): n is a, c, g, or t
  misc_feature (951)..(952): n is a, c, g, or t
agaaggtgaaaggaagtgggctccggggcataaatcaaggcttggctctaagaggagctggcgataggtgggaagacagaggctattgtagcaatgctcggggtggagcggcatttatcttcagaccacttcagtcttctcagtcctcatcctcattgtcttcttcatcatctttgtggtcttccttgcttgaaccctctctactctgaggcactctgttggggtttgggaccctcctgggaaggcaagtggccagtgctgccactgagcctgtgcagggtacttgggagaaaggccctgtttccctggaactgctaagaatgaccactgcccctgatcccccaccccttgcctctggccaccctgtcctccccccaccaccctcaggcctatgaaacacacagggttctagatttgaactctgctgtgaagtgactggaagggagcagaggccagctgggggccagtgggggaggttgtttccactaggagatttttataaaccctctccagcctctcccaaaggaagcgttggcagcaaagggagatgatgcccttacccaccttcctgtgagtgaagagaggaagcagccccagggaccaattttcccaattgacctctttcttcctctttcaccatgtgaggcagggagccctgagcccttcagctgcctgcacaacccctgacattggctgctggtgactcaatctgccaaatgtgctgcagctcgttttctcccaattacagcaagactgtcagcctcaaaaaaaanatcatgaatggacacttgggttgcttccacctcttggctattgtgaataatgctgctttaaacatggacgtacaaatagctctaagaacctttccattctttttggatatatacccagaagtagaattgctgantcatataattctaaatttttagctcatacntttntncatancanntgcccttttacatttccacgtg

SEQ ID NO: 321550 - DNA, 1543 bp, Homo sapiens
agcgtgtaggtgacgtggccgcttccagtctttggtcgggtttcggcggcttcagtgctcggggaggaggcagtgacggccggtgagattggaagtggcggcggcggcaggcggcagaggggagtccgaggttatgcgtctcaatgatcccgcggaaacgctacgggtctaagaacacggatcagggtgtctacctgggtctctcaaagacacaggtcctgtcccctgcaactgctggcagtagcagcagcgacatcgcccctctgccccccccagtgaccctcgtccctccccctcccgacaccatgtcctgccgggatcggacccaggagtttctgtctgcctgcaagtcgctgcagacccgtcagaatggaatccagacaaataagccagctttgcgtgctgtccgacaacgcagtgaattcaccctcatggccaagcgcattgggaaagaccttagcaacacatttgccaagctggagaagctgacaatcttggcaaagcgcaagtccctctttgatgataaagcagtggaaattgaagagctaacatatatcatcaaacaggacatcaatagcctcaacaaacaaattgctcagctccaggatttcgtgagagccaagggcagccagagtggccggcacctgcagacccactccaacaccattgtggtctccttgcagtcgaaactggcttctatgtccaatgacttcaaatcggttttagaagtgaggacagagaacctgaagcagcagaggagccggagagagcagttctcccgggcacctgtgtcagccctgccccttgcccctaaccacctgggcggtggtgctgtggttctgggggcagagtcccatgcctccaaggatgtcgccatcgacatgatggactctcggaccagccagcagctgcagctcattgacgagcaggattcctacatccagagtcgggcagacaccatgcagaacattgagtcgacaattgttgagttgggctccatctttcagcagttggcacacatggttaaggaacaggaggaaaccattcagaggtgagatacactctctcgccccaaacagaggagctttctcttccccgtggattggcatcttaaagtccccagggactgcttgatgccttttggaagatagagtgaattctgcccacccatgggacccagttcacctgcttccatccacccaacaagtttttattgagcacctgttcatgtgaggcactgttccaggtgcgggagatacagtggcaagtagaacagtaaagtctgtctggagctgctttgtagcatgtgtaagtgtatggaatttgatagggcagatgaggacagctgtggaaaagaactgacaaggctggcacagtgactcacacctgtaatcccataggcagcactttgggaggccgagcaatgcagatcgcttgagttcaggaattcaagaccagtttgggcaacaaagcaagaccctgtctctacaaaaaaatacaaaaactagctgggcatggtggcatgggcctgtagtcccagcta

SEQ ID NO: 321551 - DNA, 1715 bp, Homo sapiens
agcgtgtaggtgacgtggccgcttccagtctttggtcgggtttcggcggcttcagtgctcggggaggaggcagtgacggccggtgagattggaagtggcggcggcggcaggcggcagaggggagtccgaggttatgcgtctcaatgatcccgcggaaacgctacgggtctaagaacacggatcagggtgtctacctgggtctctcaaagacacaggtcctgtcccctgcaactgctggcagtagcagcagcgacatcgcccctctgccccccccagtgaccctcgtccctccccctcccgacaccatgtcctgccgggatcggacccaggagtttctgtctgcctgcaagtcgctgcagacccgtcagaatggaatccagacaaataagccagctttgcgtgctgtccgacaacgcagtgaattcaccctcatggccaagcgcattgggaaagaccttagcaacacatttgccaagctggagaagctgacaatcttggcaaagcgcaagtccctctttgatgataaagcagtggaaattgaagagctaacatatatcatcaaacaggacatcaatagcctcaacaaacaaattgctcagctccaggatttcgtgagagccaagggcagccagagtggccggcacctgcagacccactccaacaccattgtggtctccttgcagtcgaaactggcttctatgtccaatgacttcaaatcggttttagaagtgaggacagagaacctgaagcagcagaggagccggagagagcagttctcccgggcacctgtgtcagccctgccccttgcccctaaccacctgggcggtggtgctgtggttctgggggcagagtcccatgcctccaaggatgtcgccatcgacatgatggactctcggaccagccagcagctgcagctcattgacgagcaggtacccaggctctgaactaggtagaatcagcttctccattatcctctgtggttcccgagagagtgtttggagtgtgccatgggcagaatggcaagctgggagggttgtaaaaatgcaggtctgaccctgaagaagctgttggtgctcatgtgctctctccctctcctgaagggattcctacatccagagtcgggcagacaccatgcagaacattgagtcgacaattgttgagttgggctccatctttcagcagttggcacacatggttaaggaacaggaggaaaccattcagaggtgagatacactctctcgccccaaacagaggagctttctcttccccgtggattggcatcttaaagtccccagggactgcttgatgccttttggaagatagagtgaattctgcccacccatgggacccagttcacctgcttccatccacccaacaagtttttattgagcacctgttcatgtgaggcactgttccaggtgcgggagatacagtggcaagtagaacagtaaagtctgtctggagctgctttgtagcatgtgtaagtgtatggaatttgatagggcagatgaggacagctgtggaaaagaactgacaaggctggcacagtgactcacacctgtaatcccataggcagcactttgggaggccgagcaatgcagatcgcttgagttcaggaattcaagaccagtttgggcaacaaagcaagaccctgtctctacaaaaaaatacaaaaactagctgggcatggtggcatgggcctgtagtcccagcta

SEQ ID NO: 321552 - DNA, 560 bp, Homo sapiens
agcgtgtaggtgacgtggccgcttccagtctttggtcgggtttcggcggcttcagtgctcggggaggaggcagtgacggccggtgagattggaagtggcggcggcggcaggcggcagaggggagtccgaggttatgcgtctcaatgatcccgcggaaacgctacgggtctaagaacacggatcagggtgtctacctgggtctctcaaagacacaggtcctgtcccctgcaactgctggcagtagcagcagcgacatcgcccctctgccccccccagtgaccctcgtccctccccctcccgacaccatgtcctgccgggatcggacccaggagtttctgtctgcctgcaagtcgctgcagacccgtcaggtaaggacctggagtggaaaaggcgaggagtgagccttactcaaatctaggaaggactgtgctccaccactgttaaccgaagtaattttggggggtacctgatggaactgataggcttggatggggcctgtagggtctgctataagcaacagagaagaggtcggctggctaactaggggcaaggacttagac

SEQ ID NO: 321553 - DNA, 304 bp, Homo sapiens
tggcaaagcgcaagtccctctttgatgataaagcagtggaaattgaagagctaacatatatcatcaaacaggtgagctactagccatcaggagagcccagcattccaatcagatcacttctgtcttcctgtcattttccattgccatggggacccagagcaagtttctttttttagagaggggggtctcactgtgttgaccagtctggagtgtagtggtgtgacctagctcactgcagcccttaactcctggcctcaagctttcctccagcctgagcctcctgagtggtagagactacagggac

SEQ ID NO: 321554 - DNA, 1992 bp, Homo sapiens
  misc_feature (1791)..(1791): n is a, c, g, or t
  misc_feature (1925)..(1925): n is a, c, g, or t
  misc_feature (1955)..(1955): n is a, c, g, or t
  misc_feature (1959)..(1959): n is a, c, g, or t
  misc_feature (1961)..(1961): n is a, c, g, or t
  misc_feature (1966)..(1966): n is a, c, g, or t
  misc_feature (1969)..(1970): n is a, c, g, or t
agcgtgtaggtgacgtggccgcttccagtctttggtcgggtttcggcggcttcagtgctcggggaggaggcagtgacggccggtgagattggaagtggcggcggcggcaggcggcagaggggagtccgaggttatgcgtctcaatgatcccgcggaaacgctacgggtctaagaacacggatcagggtgtctacctgggtctctcaaagacacaggtcctgtcccctgcaactgctggcagtagcagcagcgacatcgcccctctgccccccccagtgaccctcgtccctccccctcccgacaccatgtcctgccgggatcggacccaggagtttctgtctgcctgcaagtcgctgcagacccgtcagaatggaatccagacaaataagccagctttgcgtgctgtccgacaacgcagtgaattcaccctcatggccaagcgcattgggaaagaccttagcaacacatttgccaagctggagaagctgacaatcttggcaaagcgcaagtccctctttgatgataaagcagtggaaattgaagagctaacatatatcatcaaacaggacatcaatagcctcaacaaacaaattgctcagctccaggatttcgtgagagccaagggcagccagagtggccggcacctgcagacccactccaacaccattgtggtctccttgcagtcgaaactggcttctatgtccaatgacttcaaatcggttttagaagtgaggacagagaacctgaagcagcagaggagccggagagagcagttctcccgggcacctgtgtcagccctgccccttgcccctaaccacctgggcggtggtgctgtggttctgggggcagagtcccatgcctccaaggatgtcgccatcgacatgatggactctcggaccagccagcagctgcagctcattgacgagcaggattcctacatccagagtcgggcagacaccatgcagaacattgagtcgacaattgttgagttgggctccatctttcagcagttggcacacatggttaaggaacaggaggaaaccattcagaggatcgacgagaacgtgctaggagcccagctggacgttgaggccgcccattcagagatcctcaagtacttccagtctgtcacctccaaccggtggctcatggtcaaaatcttcctcatcctcattgtcttcttcatcatctttgtggtcttccttgcttgaaccctctctactctgaggcactctgttggggtttgggaccctcctgggaaggcaagtggccagtgctgccactgagcctgtgcagggtacttgggagaaaggccctgtttccctggaactgctaagaatgaccactgcccctgatcccccaccccttgcctctggccaccctgtcctccccccaccaccctcaggcctatgaaacacacagggttctagatttgaactctgctgtgaagtgactggaagggagcagaggccagctgggggccagtgggggaggttgtttccactaggagatttttataaaccctctccagcctctcccaaaggaagcgttggcagcaaagggagatgatgcccttacccaccttcctgtgagtgaagagaggaagcagccccagggaccaattttcccaattgacctctttcttcctctttcaccatgtgaggcagggagccctgagcccttcagctgcctgcacaacccctgacattggctgctggtgactcaatctgccaaatgtgctgcagctcgttttctcccaattacagcaagactgtcagcctcaaaaaaaanatcatgaatggacacttgggttgcttccacctcttggctattgtgaataatgctgctttaaacatggacgtacaaatagctctaagaacctttccattctttttggatatatacccagaagtagaattgctgantcatataattctaaatttttagctcatacntttntncatancanntgcccttttacatttccacgtg

SEQ ID NO: 321555 - DNA, 2044 bp, Homo sapiens
  misc_feature (1784)..(1784): n is a, c, g, or t
  misc_feature (1835)..(1835): n is a, c, g, or t
  misc_feature (1843)..(1843): n is a, c, g, or t
  misc_feature (1977)..(1977): n is a, c, g, or t
  misc_feature (2007)..(2007): n is a, c, g, or t
  misc_feature (2011)..(2011): n is a, c, g, or t
  misc_feature (2013)..(2013): n is a, c, g, or t
  misc_feature (2018)..(2018): n is a, c, g, or t
  misc_feature (2021)..(2022): n is a, c, g, or t
agcgtgtaggtgacgtggccgcttccagtctttggtcgggtttcggcggcttcagtgctcggggaggaggcagtgacggccggtgagattggaagtggcggcggcggcaggcggcagaggggagtccgaggttatgcgtctcaatgatcccgcggaaacgctacgggtctaagaacacggatcagggtgtctacctgggtctctcaaagacacaggtcctgtcccctgcaactgctggcagtagcagcagcgacatcgcccctctgccccccccagtgaccctcgtccctccccctcccgacaccatgtcctgccgggatcggacccaggagtttctgtctgcctgcaagtcgctgcagacccgtcagaatggaatccagacaaataagccagctttgcgtgctgtccgacaacgcagtgaattcaccctcatggccaagcgcattgggaaagaccttagcaacacatttgccaagctggagaagctgacaatcttggcaaagcgcaagtccctctttgatgataaagcagtggaaattgaagagctaacatatatcatcaaacaggacatcaatagcctcaacaaacaaattgctcagctccaggatttcgtgagagccaagggcagccagagtggccggcacctgcagacccactccaacaccattgtggtctccttgcagtcgaaactggcttctatgtccaatgacttcaaatcggttttagaagtgaggacagagaacctgaagcagcagaggagccggagagagcagttctcccgggcacctgtgtcagccctgccccttgcccctaaccacctgggcggtggtgctgtggttctgggggcagagtcccatgcctccaaggatgtcgccatcgacatgatggactctcggaccagccagcagctgcagctcattgacgagcaggattcctacatccagagtcgggcagacaccatgcagaacattgagtcgacaattgttgagttgggctccatctttcagcagttggcacacatggttaaggaacaggaggaaaccattcagaggatcgacgagaacgtgctaggagcccagctggacgttgaggccgcccattcagagatcctcaagtacttccagtctgtcacctccaaccggtggctcatggtcaaaatcttcctcatcctcattgtcttcttcatcatctttgtggtcttccttgcttgaaccctctctactctgaggcactctgttggggtttgggaccctcctgggaaggcaagtggccagtgctgccactgagcctgtgcagggtacttgggagaaaggccctgtttccctggaactgctaagaatgaccactgcccctgatcccccaccccttgcctctggccaccctgtcctccccccaccaccctcaggcctatgaaacacacagggttctagatttgaactctgctgtgaagtgactggaagggagcagaggccagctgggggccagtgggggaggttgtttccactaggagatttttataaaccctctccagcctctcccaaaggaagcgttggcagcaaagggagatgatgcccttacccaccttcctgtgagtgaagagaggaagcagccccagggaccaattttcccaattgacctctttcttcctctttcaccatgtgaggcagggagccctgagcccttcagctgcctgcacaacccctgacattggctgctggtgactcaatctgccaaatgtgctgcagctcgttttctcccaattacagcaagactgtcagcctcanaaaaaaaaaaaactcgagtttttttttttttttttatatcacattttggtnaaaaaaanatcatgaatggacacttgggttgcttccacctcttggctattgtgaataatgctgctttaaacatggacgtacaaatagctctaagaacctttccattctttttggatatatacccagaagtagaattgctgantcatataattctaaatttttagctcatacntttntncatancanntgcccttttacatttccacgtg

SEQ ID NO: 321556 - DNA, 1987 bp, Homo sapiens
  misc_feature (1784)..(1784): n is a, c, g, or t
  misc_feature (1835)..(1835): n is a, c, g, or t
  misc_feature (1843)..(1843): n is a, c, g, or t
agcgtgtaggtgacgtggccgcttccagtctttggtcgggtttcggcggcttcagtgctcggggaggaggcagtgacggccggtgagattggaagtggcggcggcggcaggcggcagaggggagtccgaggttatgcgtctcaatgatcccgcggaaacgctacgggtctaagaacacggatcagggtgtctacctgggtctctcaaagacacaggtcctgtcccctgcaactgctggcagtagcagcagcgacatcgcccctctgccccccccagtgaccctcgtccctccccctcccgacaccatgtcctgccgggatcggacccaggagtttctgtctgcctgcaagtcgctgcagacccgtcagaatggaatccagacaaataagccagctttgcgtgctgtccgacaacgcagtgaattcaccctcatggccaagcgcattgggaaagaccttagcaacacatttgccaagctggagaagctgacaatcttggcaaagcgcaagtccctctttgatgataaagcagtggaaattgaagagctaacatatatcatcaaacaggacatcaatagcctcaacaaacaaattgctcagctccaggatttcgtgagagccaagggcagccagagtggccggcacctgcagacccactccaacaccattgtggtctccttgcagtcgaaactggcttctatgtccaatgacttcaaatcggttttagaagtgaggacagagaacctgaagcagcagaggagccggagagagcagttctcccgggcacctgtgtcagccctgccccttgcccctaaccacctgggcggtggtgctgtggttctgggggcagagtcccatgcctccaaggatgtcgccatcgacatgatggactctcggaccagccagcagctgcagctcattgacgagcaggattcctacatccagagtcgggcagacaccatgcagaacattgagtcgacaattgttgagttgggctccatctttcagcagttggcacacatggttaaggaacaggaggaaaccattcagaggatcgacgagaacgtgctaggagcccagctggacgttgaggccgcccattcagagatcctcaagtacttccagtctgtcacctccaaccggtggctcatggtcaaaatcttcctcatcctcattgtcttcttcatcatctttgtggtcttccttgcttgaaccctctctactctgaggcactctgttggggtttgggaccctcctgggaaggcaagtggccagtgctgccactgagcctgtgcagggtacttgggagaaaggccctgtttccctggaactgctaagaatgaccactgcccctgatcccccaccccttgcctctggccaccctgtcctccccccaccaccctcaggcctatgaaacacacagggttctagatttgaactctgctgtgaagtgactggaagggagcagaggccagctgggggccagtgggggaggttgtttccactaggagatttttataaaccctctccagcctctcccaaaggaagcgttggcagcaaagggagatgatgcccttacccaccttcctgtgagtgaagagaggaagcagccccagggaccaattttcccaattgacctctttcttcctctttcaccatgtgaggcagggagccctgagcccttcagctgcctgcacaacccctgacattggctgctggtgactcaatctgccaaatgtgctgcagctcgttttctcccaattacagcaagactgtcagcctcanaaaaaaaaaaaactcgagtttttttttttttttttatatcacattttggtnaaaaaaanatcatgaatggacacttgggttgcttccacctcttggctattgtgaataatgctgctttaaacatggacgtacaaatagctctatctaaattttagaaactaaactttcttcataacacctgaacccctttaacttttccgtgc

SEQ ID NO: 321557 - DNA, 1936 bp, Homo sapiens
cccaccgaagtgtgtcagtctttggaggtccgtcactggccctcccggaggggccgaaggaaaccgcggaaacgaaagggctgggttagggcccggggcagttacacgggccgggccggagtctcaggaccacggggttggctctggccctgtctctgcttcagggtccccggcccgcgctctggccgccagagccaagttggaagaagagtctgaagcggtccgaggttatgcgtctcaatgatcccgcggaaacgctacgggtctaagaacacggatcagggtgtctacctgggtctctcaaagacacaggtcctgtcccctgcaactgctggcagtagcagcagcgacatcgcccctctgccccccccagtgaccctcgtccctccccctcccgacaccatgtcctgccgggatcggacccaggagtttctgtctgcctgcaagtcgctgcagacccgtcagaatggaatccagacaaataagccagctttgcgtgctgtccgacaacgcagtgaattcaccctcatggccaagcgcattgggaaagaccttagcaacacatttgccaagctggagaagctgacaatcttggcaaagcgcaagtccctctttgatgataaagcagtggaaattgaagagctaacatatatcatcaaacaggacatcaatagcctcaacaaacaaattgctcagctccaggatttcgtgagagccaagggcagccagagtggccggcacctgcagacccactccaacaccattgtggtctccttgcagtcgaaactggcttctatgtccaatgacttcaaatcggttttagaagtgaggacagagaacctgaagcagcagaggagccggagagagcagttctcccgggcacctgtgtcagccctgccccttgcccctaaccacctgggcggtggtgctgtggttctgggggcagagtcccatgcctccaaggatgtcgccatcgacatgatggactctcggaccagccagcagctgcagctcattgacgagcaggattcctacatccagagtcgggcagacaccatgcagaacattgagtcgacaattgttgagttgggctccatctttcagcagttggcacacatggttaaggaacaggaggaaaccattcagaggatcgacgagaacgtgctaggagcccagctggacgttgaggccgcccattcagagatcctcaagtacttccagtctgtcacctccaaccggtggctcatggtcaaaatcttcctcatcctcattgtcttcttcatcatctttgtggtcttccttgcttgaaccctctctactctgaggcactctgttggggtttgggaccctcctgggaaggcaagtggccagtgctgccactgagcctgtgcagggtacttgggagaaaggccctgtttccctggaactgctaagaatgaccactgcccctgatcccccaccccttgcctctggccaccctgtcctccccccaccaccctcaggcctatgaaacacacagggttctagatttgaactctgctgtgaagtgactggaagggagcagaggccagctgggggccagtgggggaggttgtttccactaggagatttttataaaccctctccagcctctcccaaaggaagcgttggcagcaaagggagatgatgcccttacccaccttcctgtgagtgaagagaggaagcagccccagggaccaattttcccaattgacctctttcttcctctttcaccatgtgaggcagggagccctgagcccttcagctgcctgcacaacccctgacattggctgctggtgactcaatctgccaaatgtgctgcagctcgttttctcccaattacagcaagactgtcagcctcactagccatgtcatcatttctgggtgggagcgtcgaagggcctaggcagcgagtgga

SEQ ID NO: 321558 - DNA, 1690 bp, Homo sapiens
agcgtgtaggtgacgtggccgcttccagtctttggtcgggtttcggcggcttcagtgctcggggaggaggcagtgacggccggtgagattggaagtggcggcggcggcaggcggcagaggggagcagtgaccctcgtccctccccctcccgacaccatgtcctgccgggatcggacccaggagtttctgtctgcctgcaagtcgctgcagacccgtcagaatggaatccagacaaataagccagctttgcgtgctgtccgacaacgcagtgaattcaccctcatggccaagcgcattgggaaagaccttagcaacacatttgccaagctggagaagctgacaatcttggcaaagcgcaagtccctctttgatgataaagcagtggaaattgaagagctaacatatatcatcaaacaggacatcaatagcctcaacaaacaaattgctcagctccaggatttcgtgagagccaagggcagccagagtggccggcacctgcagacccactccaacaccattgtggtctccttgcagtcgaaactggcttctatgtccaatgacttcaaatcggttttagaagtgaggacagagaacctgaagcagcagaggagccggagagagcagttctcccgggcacctgtgtcagccctgccccttgcccctaaccacctgggcggtggtgctgtggttctgggggcagagtcccatgcctccaaggatgtcgccatcgacatgatggactctcggaccagccagcagctgcagctcattgacgagcaggattcctacatccagagtcgggcagacaccatgcagaacattgagtcgacaattgttgagttgggctccatctttcagcagttggcacacatggttaaggaacaggaggaaaccattcagaggatcgacgagaacgtgctaggagcccagctggacgttgaggccgcccattcagagatcctcaagtacttccagtctgtcacctccaaccggtggctcatggtcaaaatcttcctcatcctcattgtcttcttcatcatctttgtggtcttccttgcttgaaccctctctactctgaggcactctgttggggtttgggaccctcctgggaaggcaagtggccagtgctgccactgagcctgtgcagggtacttgggagaaaggccctgtttccctggaactgctaagaatgaccactgcccctgatcccccaccccttgcctctggccaccctgtcctccccccaccaccctcaggcctatgaaacacacagggttctagatttgaactctgctgtgaagtgactggaagggagcagaggccagctgggggccagtgggggaggttgtttccactaggagatttttataaaccctctccagcctctcccaaaggaagcgttggcagcaaagggagatgatgcccttacccaccttcctgtgagtgaagagaggaagcagccccagggaccaattttcccaattgacctctttcttcctctttcaccatgtgaggcagggagccctgagcccttcagctgcctgcacaacccctgacattggctgctggtgactcaatctgccaaatgtgctgcagctcgttttctcccaattacagcaagactgtcagcctcactagccatgtcatcatttctgggtgggagcgtcgaagggcctaggcagcgagtgga

SEQ ID NO: 321559 - DNA, 2002 bp, Homo sapiens
agcgtgtaggtgacgtggccgcttccagtctttggtcgggtttcggcggcttcagtgctcggggaggaggcagtgacggccggtgagattggaagtggcggcggcggcaggcggcagaggggagtccgaggttatgcgtctcaatgatcccgcggaaacgctacgggtctaagaacacggatcagggtgtctacctgggtctctcaaagacacaggtcctgtcccctgcaactgctggcagtagcagcagcgacatcgcccctctgccccccccagtgaccctcgtccctccccctcccgacaccatgtcctgccgggatcggacccaggagtttctgtctgcctgcaagtcgctgcagacccgtcaggctggagtgtagtggtgtgatgatagctcacttgcagtcttgaactcctagactcaagggatcctctttcctcagcctcctgagcagctgggactacatggatgcaccactcagctaattttaaaattttttcgtacaggcagtgtctcactatgttgcccagaatggaatccagacaaataagccagctttgcgtgctgtccgacaacgcagtgaattcaccctcatggccaagcgcattgggaaagaccttagcaacacatttgccaagctggagaagctgacaatcttggcaaagcgcaagtccctctttgatgataaagcagtggaaattgaagagctaacatatatcatcaaacaggacatcaatagcctcaacaaacaaattgctcagctccaggatttcgtgagagccaagggcagccagagtggccggcacctgcagacccactccaacaccattgtggtctccttgcagtcgaaactggcttctatgtccaatgacttcaaatcggttttagaagtgaggacagagaacctgaagcagcagaggagccggagagagcagttctcccgggcacctgtgtcagccctgccccttgcccctaaccacctgggcggtggtgctgtggttctgggggcagagtcccatgcctccaaggatgtcgccatcgacatgatggactctcggaccagccagcagctgcagctcattgacgagcaggattcctacatccagagtcgggcagacaccatgcagaacattgagtcgacaattgttgagttgggctccatctttcagcagttggcacacatggttaaggaacaggaggaaaccattcagaggatcgacgagaacgtgctaggagcccagctggacgttgaggccgcccattcagagatcctcaagtacttccagtctgtcacctccaaccggtggctcatggtcaaaatcttcctcatcctcattgtcttcttcatcatctttgtggtcttccttgcttgaaccctctctactctgaggcactctgttggggtttgggaccctcctgggaaggcaagtggccagtgctgccactgagcctgtgcagggtacttgggagaaaggccctgtttccctggaactgctaagaatgaccactgcccctgatcccccaccccttgcctctggccaccctgtcctccccccaccaccctcaggcctatgaaacacacagggttctagatttgaactctgctgtgaagtgactggaagggagcagaggccagctgggggccagtgggggaggttgtttccactaggagatttttataaaccctctccagcctctcccaaaggaagcgttggcagcaaagggagatgatgcccttacccaccttcctgtgagtgaagagaggaagcagccccagggaccaattttcccaattgacctctttcttcctctttcaccatgtgaggcagggagccctgagcccttcagctgcctgcacaacccctgacattggctgctggtgactcaatctgccaaatgtgctgcagctcgttttctcccaattacagcaagactgtcagcctcactagccatgtcatcatttctgggtgggagcgtcgaagggcctaggcagcgagtgga

SEQ ID NO: 321560 - DNA, 1853 bp, Homo sapiens
agcgtgtaggtgacgtggccgcttccagtctttggtcgggtttcggcggcttcagtgctcggggaggaggcagtgacggccggtgagattggaagtggcggcggcggcaggcggcagaggggagcagtgaccctcgtccctccccctcccgacaccatgtcctgccgggatcggacccaggagtttctgtctgcctgcaagtcgctgcagacccgtcaggctggagtgtagtggtgtgatgatagctcacttgcagtcttgaactcctagactcaagggatcctctttcctcagcctcctgagcagctgggactacatggatgcaccactcagctaattttaaaattttttcgtacaggcagtgtctcactatgttgcccagaatggaatccagacaaataagccagctttgcgtgctgtccgacaacgcagtgaattcaccctcatggccaagcgcattgggaaagaccttagcaacacatttgccaagctggagaagctgacaatcttggcaaagcgcaagtccctctttgatgataaagcagtggaaattgaagagctaacatatatcatcaaacaggacatcaatagcctcaacaaacaaattgctcagctccaggatttcgtgagagccaagggcagccagagtggccggcacctgcagacccactccaacaccattgtggtctccttgcagtcgaaactggcttctatgtccaatgacttcaaatcggttttagaagtgaggacagagaacctgaagcagcagaggagccggagagagcagttctcccgggcacctgtgtcagccctgccccttgcccctaaccacctgggcggtggtgctgtggttctgggggcagagtcccatgcctccaaggatgtcgccatcgacatgatggactctcggaccagccagcagctgcagctcattgacgagcaggattcctacatccagagtcgggcagacaccatgcagaacattgagtcgacaattgttgagttgggctccatctttcagcagttggcacacatggttaaggaacaggaggaaaccattcagaggatcgacgagaacgtgctaggagcccagctggacgttgaggccgcccattcagagatcctcaagtacttccagtctgtcacctccaaccggtggctcatggtcaaaatcttcctcatcctcattgtcttcttcatcatctttgtggtcttccttgcttgaaccctctctactctgaggcactctgttggggtttgggaccctcctgggaaggcaagtggccagtgctgccactgagcctgtgcagggtacttgggagaaaggccctgtttccctggaactgctaagaatgaccactgcccctgatcccccaccccttgcctctggccaccctgtcctccccccaccaccctcaggcctatgaaacacacagggttctagatttgaactctgctgtgaagtgactggaagggagcagaggccagctgggggccagtgggggaggttgtttccactaggagatttttataaaccctctccagcctctcccaaaggaagcgttggcagcaaagggagatgatgcccttacccaccttcctgtgagtgaagagaggaagcagccccagggaccaattttcccaattgacctctttcttcctctttcaccatgtgaggcagggagccctgagcccttcagctgcctgcacaacccctgacattggctgctggtgactcaatctgccaaatgtgctgcagctcgttttctcccaattacagcaagactgtcagcctcactagccatgtcatcatttctgggtgggagcgtcgaagggcctaggcagcgagtgga

SEQ ID NO: 321561 - DNA, 1883 bp, Homo sapiens
agaaaaacaaatcaggctaaggtacgaggctcggggtggttcagggtttcggcggcttcagtgctcggggaggaggcagtgacggccggtgagattggaagtggcggcggcggcaggcggcagaggggagtccgaggttatgcgtctcaatgatcccgcggaaacgctacgggtctaagaacacggatcagggtgtctacctgggtctctcaaagacacaggtcctgtcccctgcaactgctggcagtagcagcagcgacatcgcccctctgccccccccagtgaccctcgtccctccccctcccgacaccatgtcctgccgggatcggacccaggagtttctgtctgcctgcaagtcgctgcagacccgtcagaatggaatccagacaaataagccagctttgcgtgctgtccgacaacgcagtgaattcaccctcatggccaagcgcattgggaaagaccttagcaacacatttgccaagctggagaagctgacaatcttggcaaagcgcaagtccctctttgatgataaagcagtggaaattgaagagctaacatatatcatcaaacaggacatcaatagcctcaacaaacaaattgctcagctccaggatttcgtgagagccaagggcagccagagtggccggcacctgcagacccactccaacaccattgtggtctccttgcagtcgaaactggcttctatgtccaatgacttcaaatcggttttagaagtgaggacagagaacctgaagcagcagaggagccggagagagcagttctcccgggcacctgtgtcagccctgccccttgcccctaaccacctgggcggtggtgctgtggttctgggggcagagtcccatgcctccaaggatgtcgccatcgacatgatggactctcggaccagccagcagctgcagctcattgacgagcaggattcctacatccagagtcgggcagacaccatgcagaacattgagtcgacaattgttgagttgggctccatctttcagcagttggcacacatggttaaggaacaggaggaaaccattcagagtgtccttttgtttcctcttctcccggccttgtccccaggatcgacgagaacgtgctaggagcccagctggacgttgaggccgcccattcagagatcctcaagtacttccagtctgtcacctccaaccggtggctcatggtcaaaatcttcctcatcctcattgtcttcttcatcatctttgtggtcttccttgcttgaaccctctctactctgaggcactctgttggggtttgggaccctcctgggaaggcaagtggccagtgctgccactgagcctgtgcagggtacttgggagaaaggccctgtttccctggaactgctaagaatgaccactgcccctgatcccccaccccttgcctctggccaccctgtcctccccccaccaccctcaggcctatgaaacacacagggttctagatttgaactctgctgtgaagtgactggaagggagcagaggccagctgggggccagtgggggaggttgtttccactaggagatttttataaaccctctccagcctctcccaaaggaagcgttggcagcaaagggagatgatgcccttacccaccttcctgtgagtgaagagaggaagcagccccagggaccaattttcccaattgacctctttcttcctctttcaccatgtgaggcagggagccctgagcccttcagctgcctgcacaacccctgacattggctgctggtgactcaatctgccaaatgtgctgcagctcgttttctcccaattacagcaagactgtcagcctcactagccatgtcatcatttctgggtgggagcgtcgaagggcctaggcagcgagtgga

SEQ ID NO: 321562 - DNA, 1096 bp, Homo sapiens
gggattcaaacccagagcatgtgggctttgaacctgcttttaactgttaaggtgtgccacatcctgttttctcccccaggcggtggtgctgtggttctgggggcagagtcccatgcctccaaggatgtcgccatcgacatgatggactctcggaccagccagcagctgcagctcattgacgagcaggattcctacatccagagtcgggcagacaccatgcagaacattgagtcgacaattgttgagttgggctccatctttcagcagttggcacacatggttaaggaacaggaggaaaccattcagaggatcgacgagaacgtgctaggagcccagctggacgttgaggccgcccattcagagatcctcaagtacttccagtctgtcacctccaaccggtggctcatggtcaaaatcttcctcatcctcattgtcttcttcatcatctttgtggtcttccttgcttgaaccctctctactctgaggcactctgttggggtttgggaccctcctgggaaggcaagtggccagtgctgccactgagcctgtgcagggtacttgggagaaaggccctgtttccctggaactgctaagaatgaccactgcccctgatcccccaccccttgcctctggccaccctgtcctccccccaccaccctcaggcctatgaaacacacagggttctagatttgaactctgctgtgaagtgactggaagggagcagaggccagctgggggccagtgggggaggttgtttccactaggagatttttataaaccctctccagcctctcccaaaggaagcgttggcagcaaagggagatgatgcccttacccaccttcctgtgagtgaagagaggaagcagccccagggaccaattttcccaattgacctctttcttcctctttcaccatgtgaggcagggagccctgagcccttcagctgcctgcacaacccctgacattggctgctggtgactcaatctgccaaatgtgctgcagctcgttttctcccaattacagcaagactgtcagcctcactagccatgtcatcatttctgggtgggagcgtcgaagggcctaggcagcgagtgga

SEQ ID NO: 321563 - DNA, 1793 bp, Homo sapiens
agcgtgtaggtgacgtggccgcttccagtctttggtcgggtttcggcggcttcagtgctcggggaggaggcagtgacggccggtgagattggaagtggcggcggcggcaggcggcagaggggagtccgaggttatgcgtctcaatgatcccgcggaaacgctacgggtctaagaacacggatcagggtgtctacctgggtctctcaaagacacaggtcctgtcccctgcaactgctggcagtagcagcagcgacatcgcccctctgccccccccagtgaccctcgtccctccccctcccgacaccatgtcctgccgggatcggacccaggagtttctgtctgcctgcaagtcgctgcagacccgtcagaatggaatccagacaaataagccagctttgcgtgctgtccgacaacgcagtgaattcaccctcatggccaagcgcattgggaaagaccttagcaacacatttgccaagctggagaagctgacaatcttggcaaagcgcaagtccctctttgatgataaagcagtggaaattgaagagctaacatatatcatcaaacaggacatcaatagcctcaacaaacaaattgctcagctccaggatttcgtgagagccaagggcagccagagtggccggcacctgcagacccactccaacaccattgtggtctccttgcagtcgaaactggcttctatgtccaatgacttcaaatcggttttagaagtgaggacagagaacctgaagcagcagaggagccggagagagcagttctcccgggcacctgtgtcagccctgccccttgcccctaaccacctgggcggtggtgctgtggttctgggggcagagtcccatgcctccaaggatgtcgccatcgacatgatggactctcggaccagccagcagctgcagctcattgacgagcaggattcctacatccagagtcgggcagacaccatgcagaacattgagtcgacaattgttgagttgggctccatctttcagcagttggcacacatggttaaggaacaggaggaaaccattcagaggatcgacgagaacgtgctaggagcccagctggacgttgaggccgcccattcagagatcctcaagtacttccagtctgtcacctccaaccggtggctcatggtcaaaatcttcctcatcctcattgtcttcttcatcatctttgtggtcttccttgcttgaaccctctctactctgaggcactctgttggggtttgggaccctcctgggaaggcaagtggccagtgctgccactgagcctgtgcagggtacttgggagaaaggccctgtttccctggaactgctaagaatgaccactgcccctgatcccccaccccttgcctctggccaccctgtcctccccccaccaccctcaggcctatgaaacacacagggttctagatttgaactctgctgtgaagtgactggaagggagcagaggccagctgggggccagtgggggaggttgtttccactaggagatttttataaaccctctccagcctctcccaaaggaagcgttggcagcaaagggagatgatgcccttacccaccttcctgtgagtgaagagaggaagcagccccagggaccaattttcccaattgacctctttcttcctctttcaccatgtgaggcagggagccctgagcccttcagctgcctgcacaacccctgacattggctgctggtgactcaatctgccaaatgtgctataactccgtggtctccgcaaagtattccaagacaaagtgcttggtccgtgt

SEQ ID NO: 321564 - DNA, 1414 bp, Homo sapiens
agcgtgtaggtgacgtggccgcttccagtctttggtcgggtttcggcggcttcagtgctcggggaggaggcagtgacggccggtgagattggaagtggcggcggcggcaggcggcagaggggagtccgaggttatgcgtctcaatgatcccgcggaaacgctacgggtctaagaacacggatcagggtgtctacctgggtctctcaaagacacaggtcctgtcccctgcaactgctggcagtagcagcagcgacatcgcccctctgccccccccagtgaccctcgtccctccccctcccgacaccatgtcctgccgggatcggacccaggagtttctgtctgcctgcaagtcgctgcagacccgtcagaatggaatccagacaaataagccagctttgcgtgctgtccgacaacgcagtgaattcaccctcatggccaagcgcattgggaaagaccttagcaacacatttgccaagctggagaagctgacaatcttggcaaagcgcaagtccctctttgatgataaagcagtggaaattgaagagctaacatatatcatcaaacaggacatcaatagcctcaacaaacaaattgctcagctccaggatttcgtgagagccaagggcagccagagtggccggcacctgcagacccactccaacaccattgtggtctccttgcagtcgaaactggcttctatgtccaatgacttcaaatcggttttagaagtgaggacagagaacctgaagcagcagaggagccggagagagcagttctcccgggcacctgtgtcagccctgccccttgcccctaaccacctgggcggtggtgctgtggttctgggggcagagtcccatgcctccaaggatgtcgccatcgacatgatggactctcggaccagccagcagctgcagctcattgacgagcaggattcctacatccagagtcgggcagacaccatgcagaacattgagtcgacaattgttgagttgggctccatctttcagcagttggcacacatggttaaggaacaggaggaaaccattcagaggatcgacgagaacgtgctaggagcccagctggacgttgaggccgcccattcagagatcctcaagtacttccagtctgtcacctccaaccggtggctcatggtcaaaatcttcctcatcctcattgtcttcttcatcatctttgtggtcttccttgcttgaaccctctctactctgaggcactctgttggggtttgggaccctcctgggaaggcaagtggccagtgctgccactgagcctgtgcagggtacttgggagaaaggccctgtttccctggaactctgtatgattcccgggggggcttcccttcgccgttcccccgcgggtgcacggtcgtccgcgggggcctcggggccggcgggac

SEQ ID NO: 321565 - DNA, 1362 bp, Homo sapiens
cccaccgaagtgtgtcagtctttggaggtccgtcactggccctcccggaggggccgaaggaaaccgcggaaacgaaagggctgggttagggcccggggcagttacacgggccgggccggagtctcaggaccacggggttggctctggccctgtctctgcttcagggtccccggcccgcgctctggccgccagagccaagttggaagaagagtctgaagcgggttcgacttgggacaggggaaaagcggggccctttccgctgctggtccgccccaggatttgcgagcgtcctgggcgcgaaagtccacgagaagtgcagaaggggctcggggatttgttgattggggtggggcgggggagtttgggtaaagaagttgcctggggaatgacactctcccctccacaacagtccgaggttatgcgtctcaatgatcccgcggaaacgctacgggtctaagaacacggatcagggtgtctacctgggtctctcaaagacacaggtcctgtcccctgcaactgctggcagtagcagcagcgacatcgcccctctgccccccccagtgaccctcgtccctccccctcccgacaccatgtcctgccgggatcggacccaggagtttctgtctgcctgcaagtcgctgcagacccgtcagtagagatggggtttcaccatgtcaggctggctttgaactcctgacctgaggtgatctgccctcctcagcctcccaaagtgctgggattacagaatggactccagaccaaataagccagcttctgcgtgcctgtccgaaacaaacgcacgccgcacaattcaccctcatggcccaacgccgcatcgggaaacgacctcagcaaacaacacttccgcaacgctggcagacagcgtggccaaccgtctgcgcaaggcgccagctccctcctgacgaccgatcacaagcacgcggacaccttcgacgagcctcaccaatctatgcatcgcaacgccgggagcatcaccagccctcacgcgcgaacaaagcgagatcaagcaccaagggataccgatgagcagcccacagcggcagcccagcagcgaccccgcccctgcaggacccactccaacaccaaaggagaacactgcacgcacgcaaacgggcatcatacgctcacggacctccaacaggtccgcacgcagccgaacacctgcacccaacagaacggagaggcgcgacacccgcgaacgggactgacaagcactggacactaaccacggagaggccagcgacgggaaaacaagacacaggagcacacacaaagaccgggacaaagaacaaggaggccacacagggaccgcaaagccgggagactcccacccacagcaaa

SEQ ID NO: 321566 - DNA, 1657 bp, Homo sapiens
caaggaagatataaatgacaaggtcggctcagctctcagacaaggttttccaagcaagatgaagcccaacatcatctttgtactttccctgctcctcatcttggagaagcaagcagctgtgatgggacaaaaaggtggatcaaaaggccgattaccaagtgaattttcccaatttccacacggacaaaagggccagcactattctggacaaaaaggcaagcaacaaactgaatccaaaggcagtttttctattcaatacacatatcatgtagatgccaatgatcatgaccagtcccgaaaaagtcagcaatatgatttgaatgccctacataagacgacaaaatcacaacgacatctaggtggaagtcaacaactgctccataataaacaagaaggcagagaccatgataaatcaaaaggtcattttcacagggtagttatacaccataaaggaggcaaagctcatcgtgggacacaaaatccttctcaagatcaggggaatagcccatctggaaagggaatatccagtcaatattcaaacacagaagaaaggctgtgggttcatggactaagtaaagaacaaacttccgtctctggtgcacaaaaaggtagaaaacaaggcggatcccaaagcagttatgttctccaaactgaagagctagtagctaacaaacaacaacgtgagactaaaaattctcatcaaaataagggcttaccaaaatgtggttgaagtgagagaggaacattcaagtaaagtacaaacctcactctgtcctgcgcaccaagacaaactccaacatggatccaaagacattttttctacccaagatgagctcctagtatataacaagaatcaacaccagacaaaaaatctcaatcaagatcaacagcatggccgaaaggcaaataaaatatcataccaatcttcaagtacagaagaaagacgactccactatggagaaaatggtgtgcagaaagatgtatcccaaagcagtatttatagccaaactgaagagaaagcacagggcaagtctcaaaaacagataacaattcccagtcaagagcaagagcatagccaaaaggcaaataaaatatcataccaatcttcaagtacggaagaaagacgactccactatggagaaaatggtgtgcagaaagatgtatcccaacgcagtatttatagccaaactgaaaagctagtagcaggcaagtctcaaatccaggcaccaaatcctaagcaagagccatggcatggtgaaaatgcaaaaggagagtctggccaatctacaaatagagaacaagacctactcagtcatgaacaaaaaggcagacaccaacatggatctcatgggggattggatattgtaattatagagcaggaagatgacagtgatcgtcatttggcacaacatcttaacaacgaccgaaacccattatttacataaacctaccattcggtaaccatgtgaaaggatggaccaatatcaaggtgtcagttgacctcagtgaattctgtgatgtttctgagatgcagactcccgtgtagtttcagattcttggtccatggatgacaccacctgcccatgcttccttgaattaggctttcctaacctgaagcgccttcaaacttccaataaagagatcattttctgcttca

SEQ ID NO: 321567 - DNA, 430 bp, Homo sapiens
  misc_feature (8)..(8): n is a, c, g, or t
cgggtcgnctactactactactaaattcgcggccgcgtcgacagcccaacatcatctttgtactttccctgctcctcatcttggagaagcaagcagctgtgatgggacaaaaaggtggatcaaaaggccgattaccaagtgaattttcccaatttccacacggacaaaagggccagcactattctggacaaaaaggcaagcaacaaactgaatccaaaggcagtttttctattcaatacacatatcatgtagatgccaatgatcatgaccagtcccgaaaaagtcagcaatatgatttgaatgccctacataagacgacaaaatcacaacgacatctaggtggaagtcaacaactgctccataataaacaagaaggcagagaccaaaaaaaaagtcgacgcggccgcgaatttagtagtagtagtcgacc

SEQ ID NO: 321568 - DNA, 1546 bp, Homo sapiens
caaggaagatataaatgacaaggtcggctcagctctcagacaaggttttccaagcaagatgaagcccaacatcatctttgtactttccctgctcctcatcttggagaagcaagcagctgtgatgggacaaaaaggtggatcaaaaggccgattaccaagtgaattttcccaatttccacacggacaaaagggccagcactattctggacaaaaaggcaagcaacaaactgaatccaaaggcagtttttctattcaatacacatatcatgtagatgccaatgatcatgaccagtcccgaaaaagtcagcaatatgatttgaatgccctacataagacgacaaaatcacaacgacatctaggtggaagtcaacaactgctccataataaacaagaaggcagagaccatgataaatcaaaaggtcattttcacagggtagttatacaccataaaggaggcaaagctcatcgtgggacacaaaatccttctcaagatcaggggaatagcccatctggaaagggaatatccagtcaatattcaaacacagaagaaaggctgtgggttcatggactaagtaaagaacaaacttccgtctctggtgcacaaaaaggtagaaaacaaggcggatcccaaagcagttatgttctccaaactgaagagctagtagctaacaaacaacaacgtgagactaaaaattctcatcaaaataagggcttaccaaaatgtggttgaagtgagagaggaacattcaagtaaagtacaaacctcactctgtcctgcgcaccaagacaaactccaacatggatccaaagacattttttctacccaagatgagctcctagtatataacaagaatcaacaccagaaagatgtatcccaaagcagtatttatagccaaactgaagagaaagcacagggcaagtctcaaaaacagataacaattcccagtcaagagcaagagcatagccaaaaggcaaataaaatatcataccaatcttcaagtacggaagaaagacgactccactatggagaaaatggtgtgcagaaagatgtatcccaacgcagtatttatagccaaactgaaaagctagtagcaggcaagtctcaaatccaggcaccaaatcctaagcaagagccatggcatggtgaaaatgcaaaaggagagtctggccaatctacaaatagagaacaagacctactcagtcatgaacaaaaaggcagacaccaacatggatctcatgggggattggatattgtaattatagagcaggaagatgacagtgatcgtcatttggcacaacatcttaacaacgaccgaaacccattatttacataaacctaccattcggtaaccatgtgaaaggatggaccaatatcaaggtgtcagttgacctcagtgaattctgtgatgtttctgagatgcagactcccgtgtagtttcagattcttggtccatggatgacaccacctgcccatgcttccttgaattaggctttcctaacctgaagcgccttcaaacttccaataaagagatcattttctgcttca

SEQ ID NO: 321569 - DNA, 1803 bp, Homo sapiens
caaggaagatataaatgacaaggtcggctcagctctcagacaaggttttccaagcaagatgaagcccaacatcatctttgtactttccctgctcctcatcttggagaagcaagcagctgtgatgggacaaaaaggtggatcaaaaggccgattaccaagtgaattttcccaatttccacacggacaaaagggccagcactattctggacaaaaaggcaagcaacaaactgaatccaaaggcagtttttctattcaatacacatatcatgtagatgccaatgatcatgaccagtcccgaaaaagtcagcaatatgatttgaatgccctacataagacgacaaaatcacaacgacatctaggtggaagtcaacaactgctccataataaacaagaaggcagagaccatgataaatcaaaaggtcattttcacagggtagttatacaccataaaggaggcaaagctcatcgtgggacacaaaatccttctcaagatcaggggaatagcccatctggaaagggaatatccagtcaatattcaaacacagaagaaaggctgtgggttcatggactaagtaaagaacaaacttccgtctctggtgcacaaaaaggtagaaaacaaggcggatcccaaagcagttatgttctccaaactgaagagctagtagctaacaaacaacaacgtgagactaaaaattctcatcaaaataagggcttaccaaaatgtggttgaagtgagagaggaacattcaagtaaagtacaaacctcactctgtcctgcgcaccaagacaaactccaacatggatccaaagacattttttctacccaagatgagctcctagtatataacaagaatcaacaccagacaaaaaatctcaatcaagatcaacagcatggccgaaaggcaaataaaatatcataccaatcttcaagtacagaagaaagacgactccactatggagaaaatggtgtgcagaaagatgtatcccaaagcagtatttatagccaaactgaagagaaagcacagggcaagtctcaaaaacagataacaattcccagtcaagagcaagagcatagccaaaaggcaaataaaatatcataccaatcttcaagtacggaagaaagacgactccactatggagaaaatggtgtgcagaaagatgtatcccaacgcagtatttatagccaaactgaaaagctagtagcaggcaagtctcaaatccaggcaccaaatcctaagcaagagccatggcatggtgaaaatgcaaaaggagagtctggccaatctacaaatagagaacaagacctactcagtcatgaacaaaaaggcagacaccaacatggatctcatgggggattggatattgtaattatagagcaggaagatgacagtgatcgtcatttggcacaacatcttaacaacgaccgaaacccattatttacataaacctaccattcggtaaccatgtgaaaggatggaccaatatcaaggtgtcagttgacctcagtgaattctgtgatgtttctgagatgcagactcccgtgtagtttcagattcttggtccatggatgacaccacctgcccatgcttccttgaattaggctttcctaacctgaagcgccttcaaacttccaataaagagatcattttctgcttcaaaaaaaaaaacaaacaacaacctctcccaaacaaagaaaattgggggggcgcgacgcccaaaaaatttaaacacaccgcggggggggggcccctgtagcaccggcccgggtcagagaaccggcaaaagggggttccccaaaaaagg

SEQ ID NO: 321570 - DNA, 1628 bp, Homo sapiens
caaggaagatataaatgacaaggtcggctcagctctcagacaaggttttccaagcaagatgaagcccaacatcatctttgtactttccctgctcctcatcttggagaagcaagcagctgtgatgggacaaaaaggtggatcaaaaggccgattaccaagtgaattttcccaatttccacacggacaaaagggccagcactattctggacaaaaaggcaagcaacaaactgaatccaaaggcagtttttctattcaatacacatatcatgtagatgccaatgatcatgaccagtcccgaaaaagtcagcaatatgatttgaatgccctacataagacgacaaaatcacaacgacatctaggtggaagtcaacaactgctccataataaacaagaaggcagagaccatgataaatcaaaaggtcattttcacagggtagttatacaccataaaggaggcaaagctcatcgtgggacacaaaatccttctcaagatcaggggaatagcccatctggaaagggaatatccagtcaatattcaaacacagaagaaaggctgtgggttcatggactaagtaaagaacaaacttccgtctctggtgcacaaaaaggtagaaaacaaggcggatcccaaagcagttatgttctccaaactgaagagctagtagctaacaaacaacaacgtgagactaaaaattctcatcaaaataagggcttaccaaaatgtggttgaagtgagagaggaacattcaagtaaagtacaaacctcactctgtcctgcgcaccaagacaaactccaacatggatccaaagacattttttctacccaagatgagctcctagtatataacaagaatcaacaccagacaaaaaatctcaatcaagatcaacagcatggccgaaaggcaaataaaatatcataccaatcttcaagtacagaagaaagacgactccactatggagaaaatggtgtgcagaaagatgtatcccaaagcagtatttatagccaaactgaagagaaagcacagggcaagtctcaaaaacagataacaattcccagtcaagagcaagagcatagccaaaaggcaaataaaatatcataccaatcttcaagtacggaagaaagacgactccactatggagaaaatggtgtgcagaaagatgtatcccaacgcagtatttatagccaaactgaaaagctagtagcaggcaagtctcaaatccaggcaccaaatcctaagcaagagccatggcatggtgaaaatgcaaaaggagagtctggccaatctacaaatagagaacaagacctactcagtcatgaacaaaaaggcagacaccaacatggatctcatgggggattggatattgtaattatagagcaggaagatgacagtgatcgtcatttggcacaacatcttaacaacgaccgaaacccattatttacataaacctaccattcggtaaccatgtgaaaggatggaccaatatcaaggtgtcagttgacctcagtgaattctgtgatgtttctgagatgcagactcccgtgtagtttcagattcttggtccatggatgaacactgcatgttctgaataagttctaactgaggcttaattcataagagatatttgtc

SEQ ID NO: 321571 - DNA, 2207 bp, Homo sapiens
caaggaagatataaatgacaaggtcggctcagctctcagacaaggttttccaagcaagatgaagcccaacatcatctttgtactttccctgctcctcatcttggagaagcaagcagctgtgatgggacaaaaaggtggatcaaaaggccgattaccaagtgaattttcccaatttccacacggacaaaagggccagcactattctggacaaaaaggcaagcaacaaactgaatccaaaggcagtttttctattcaatacacatatcatgtagatgccaatgatcatgaccagtcccgaaaaagtcagcaatatgatttgaatgccctacataagacgacaaaatcacaacgacatctaggtggaagtcaacaactgctccataataaacaagaaggcagagaccatgataaatcaaaaggtcattttcacagggtagttatacaccataaaggaggcaaagctcatcgtgggacacaaaatccttctcaagatcaggggaatagcccatctggaaagggaatatccagtcaatattcaaacacagaagaaaggctgtgggttcatggactaagtaaagaacaaacttccgtctctggtgcacaaaaaggtagaaaacaaggcggatcccaaagcagttatgttctccaaactgaagagctagtagctaacaaacaacaacgtgagactaaaaattctcatcaaaataagggcttaccaaaatgtggttgaagtgagagaggaacattcaagtaaagtacaaacctcactctgtcctgcgcaccaagacaaactccaacatggatccaaagacattttttctacccaagatgagctcctagtatataacaagaatcaacaccagacaaaaaatctcaatcaagatcaacagcatggccgaaaggcaaataaaatatcataccaatcttcaagtacagaagaaagacgactccactatggagaaaatggtgtgcagaaagatgtatcccaaagcagtatttatagccaaactgaagagaaagcacagggcaagtctcaaaaacagataacaattcccagtcaagagcaagagcatagccaaaaggcaaataaaatatcataccaatcttcaagtacggaagaaagacgactccactatggagaaaatggtgtgcagaaagatgtatcccaacgcagtatttatagccaaactgaaaagctagtagcaggcaagtctcaaatccaggcaccaaatcctaagcaagagccatggcatggtgaaaatgcaaaaggagagtctggccaatctacaaatagagaacaagacctactcagtcatgaacaaaaaggcagacaccaacatggatctcatgggggattggatattgtaattatagagcaggaagatgacagtgatcgtcatttggcacaacatcttaacaacgaccgaaacccattatttacataaacctaccattcggtgtcagttgacctcagtgaattctgtgatgtttctgagatgcagactcccgtgtagtttcagattcttggtccatggatgacaccacctgcccatgcttccttgaattaggctttcctaacctgaagcgccttcaaacttccaataaagagatcattttctgcttcacaaaaaaaaaaaaaaaaaaaaaaaaaaaaaaaaaaaaaaaaaaaaaaaaaaaaaaaaaaaaaaaaaaaaaaaaaaaaaaaaaaaaaaaaaaaacaaaaaaaaaaaaaaaaaaaaacagaaaaaagaacaaaaaaaaaaaaagacaacaacaacaaccaaagaagagacacgcgcgcggcgccggccgcgcgccgccgcgacaattgaagacaaaaatactacaacgcgggaggggacgacgggaggccaggcacgccaacagaggatgagagagacacgggaacgcacaagatcacatgagcaaatcagaaaggaaaagcaccaaccgacaggcacgaacgaatggcaccggccgagagccagacaacacccacacaccacacacgacagaacacacgcccgcggcagaggaaggacacgcgcaccggcagctcaaaggcaaaacaacacatggaagccaggcgagcagcacgcgaggagcaagacaacaaacgacgggaagacaagacagaccaggaaggcggagccggaccagagacgacaaaaaacaacagaccccgacccggcaagagggggggggct

SEQ ID NO: 321572 - DNA, 1433 bp, Homo sapiens
caaggaagatataaatgacaaggtcggctcagctctcagacaaggttttccaagcaagatgaagcccaacatcatctttgtactttccctgctcctcatcttggagaagcaagcagctgtgatgggacaaaaaggtggatcaaaaggccgattaccaagtgaattttcccaatttccacacggacaaaagggccagcactattctggacaaaaaggcaagcaacaaactgaatccaaaggcagtttttctattcaatacacatatcatgtagatgccaatgatcatgaccagtcccgaaaaagtcagcaatatgatttgaatgccctacataagacgacaaaatcacaacgacatctaggtggaagtcaacaactgctccataataaacaagaaggcagagaccatgataaatcaaaaggtcattttcacagggtagttatacaccataaaggaggcaaagctcatcgtgggacacaaaatccttctcaagatcaggggaatagcccatctggaaagggaatatccagtcaatattcaaacacagaagaaaggctgtgggttcatggatccaacatggatccaaagacattttttctacccaagatgagctcctagtatataacaagaatcaacaccagacaaaaaatctcaatcaagatcaacagcatggccgaaaggcaaataaaatatcataccaatcttcaagtacagaagaaagacgactccactatggagaaaatggtgtgcagaaagatgtatcccaaagcagtatttatagccaaactgaagagaaagcacagggcaagtctcaaaaacagataacaattcccagtcaagagcaagagcatagccaaaaggcaaataaaatatcataccaatcttcaagtacggaagaaagacgactccactatggagaaaatggtgtgcagaaagatgtatcccaacgcagtatttatagccaaactgaaaagctagtagcaggcaagtctcaaatccaggcaccaaatcctaagcaagagccatggcatggtgaaaatgcaaaaggagagtctggccaatctacaaatagagaacaagacctactcagtcatgaacaaaaaggcagacaccaacatggatctcatgggggattggatattgtaattatagagcaggaagatgacagtgatcgtcatttggcacaacatcttaacaacgaccgaaacccattatttacataaacctaccattcggtaaccatgtgaaaggatggaccaatatcaaggtgtcagttgacctcagtgaattctgtgatgtttctgagatgcagactcccgtgtagtttcagattcttggtccatggatgacaccacctgcccatgcttccttgaattaggctttcctaacctgaagcgccttcaaacttccaataaagagatcattttctgcttca

SEQ ID NO: 321573 - DNA, 1472 bp, Homo sapiens
caaggaagatataaatgacaaggtcggctcagctctcagacaaggttttccaagcaagatgaagcccaacatcatctttgtactttccctgctcctcatcttggagaagcaagcagctgtgatgggacaaaaaggtggatcaaaaggccgattaccaagtgaattttcccaatttccacacggacaaaagggccagcactattctggacaaaaaggcaagcaacaaactgaatccaaaggcagtttttctattcaatacacatatcatgtagatgccaatgatcatgaccagtcccgaaaaagtcagcaatatgatttgaatgccctacataagacgacaaaatcacaacgacatctaggtggaagtcaacaactgctccataataaacaagaaggcagagaccatgataaatcaaaaggtcattttcacagggtagttatacaccataaaggaggcaaagctcatcgtgggacacaaaatccttctcaagatcaggggaatagcccatctggaaagggaatatccagtcaatattcaaacacagaagaaaggctgtgggttcatggactaagtaaagaacaaacttccgtctctggtgcacaaaaaggtagaaaacaaggcggatcccaaagcagttatgttctccaaactgaagagctagtagctaacaaacaacaacgtgagactaaaaattctcatcaaaataagggcttaccaaaatgtggttgaagtgagagaggaacattcaagtaaagtacaaacctcactctgtcctgcgcaccaagacaaactccaacatggatccaaagacattttttctacccaagatgagctcctagtatataacaagaatcaacaccagacaaaaaatctcaatcaagatcaacagcatggccgaaagtaaaatatcataccaatcttcaagtacggaagaaagacgactccactatggagaaaatggtgtgcagaaagatgtatcccaacgcagtatttatagccaaactgaaaagctagtagcaggcaagtctcaaatccaggcaccaaatcctaagcaagagccatggcatggtgaaaatgcaaaaggagagtctggccaatctacaaatagagaacaagacctactcagtcatgaacaaaaaggcagacaccaacatggatctcatgggggattggatattgtaattatagagcaggaagatgacagtgatcgtcatttggcacaacatcttaacaacgaccgaaacccattatttacataaacctaccattcggtaaccatgtgaaaggatggaccaatatcaaggtgtcagttgacctcagtgaattctgtgatgtttctgagatgcagactcccgtgtagtttcagattcttggtccatggatgacaccacctgcccatgcttccttgaattaggctttcctaacctgaagcgccttcaaacttccaataaagagatcattttctgcttca

SEQ ID NO: 321574 - DNA, 946 bp, Homo sapiens
  misc_feature (860)..(860): n is a, c, g, or t
caaggaagatataaatgacaaggtcggctcagctctcagacaaggttttccaagcaagatgaagcccaacatcatctttgtactttccctgctcctcatcttggagaagcaagcagctgtgatgggacaaaaaggtggatcaaaaggccgattaccaagtgaattttcccaatttccacacggacaaaagggccagcactattctggacaaaaaggcaagcaacaaactgaatccaaaggcagtttttctattcaatacacatatcatgtagatgccaatgatcatgaccagtcccgaaaaagtcagcaatatgatttgaatgccctacataagacgacaaaatcacaacgacatctaggtggaagtcaacaactgctccataataaacaagaaggcagagaccatgataaatcaaaaggtcattttcacagggtagttatacaccataaaggaggcaaagctcatcgtgggacacaaaatccttctcaagatcaggggaatagcccatctggaaagggaatatccagtcaatattcaaacacagaagaaaggctgtgggttcatggactaagtaaagaacaaacttccgtctctggtgcacaaaaaggtagaaaacaaggcggatcccaaagcagttatgttctccaaactgaagagctagtagctaacaaacaacaacgtgagactaaaaattctcatcaaaataagggcttaccaaaatgtggttgaagtgagagaggaacattcaagtaagtaaactcacttgtctgggccagaaaaatccaatggtccagaattttttaccagagggccagtttaagaaacgaaaatttcagaaaggcggaggaaataacactgnaagccggaaggggaggtcccgttaaaaaaaaggcggcggaatggcggggggtgtttttctactatctatcgctccttactccctta

SEQ ID NO: 321575 - DNA, 364 bp, Homo sapiens
  misc_feature (8)..(8): n is a, c, g, or t
cgggtcgnctactactactactaaattcgcggccgcgtcgacacattttttctacccaagatgagctcctagtatataacaagaatcaacaccagacaaaaaatctcaatcaagatcaacagcatggccgaaaggcaaataaaatatcataccaatcttcaagtacagaagaaagacgactccactatggagaaaatggtgtgcagaaagatgtatcccaaagcagtatttatagccaaactgaagagaaagcacagggcaagtctcaaaaacagataacaattcccagtcaagagcaagagcatagccaaaaggcaaaaaaaaaaagtcgacgcggccgcgaatttagtagtagtagtcgacc

SEQ ID NO: 321576 - DNA, 1477 bp, Homo sapiens
caaggaagatataaatgacaaggtcggctcagctctcagacaaggttttccaagcaagatgaagcccaacatcatctttgtactttccctgctcctcatcttggagaagcaagcagctgtgatgggacaaaaaggtggatcaaaaggccgattaccaagtgaattttcccaatttccacacggacaaaagggccagcactattctggacaaaaaggcaagcaacaaactgaatccaaaggcagtttttctattcaatacacatatcatgtagatgccaatgatcatgaccagtcccgaaaaagtcagcaatatgatttgaatgccctacataagacgacaaaatcacaacgacatctaggtggaagtcaacaactgctccataataaacaagaaggcagagaccatgataaatcaaaaggtcattttcacagggtagttatacaccataaaggaggcaaagctcatcgtgggacacaaaatccttctcaagatcaggggaatagcccatctggaaagggaatatccagtcaatattcaaacacagaagaaaggctgtgggttcatggactaagtaaagaacaaacttccgtctctggtgcacaaaaaggtagaaaacaaggcggatcccaaagcagttatgttctccaaactgaagagctagtagctaacaaacaacaacgtgagactaaaaattctcatcaaaataagggcttaccaaaatgtggttgaagtgagagaggaacattcaagtaaagtacaaacctcactctgtcctgcgcaccaagacaaactccaacatggatccaaagacattttttctacccaagatgagctcctagtatataacaagaatcaacaccagacaaaaaatctcaatcaagatcaacagcatggccgaaaggcaaataaaatatcataccaatcttcaagtacagaagaaagacgactccactatggagaaaatggtgtgcagaaagatgtatcccaacgcagtatttatagccaaactgaaaagctagtagcaggcaagtctcaaatccaggcaccaaatcctaagcaagagccatggcatggtgaaaatgcaaaaggagagtctggccaatctacaaatagagaacaagacctactcagtcatgaacaaaaaggcagacaccaacatggatctcatgggggattggatattgtaattatagagcaggaagatgacagtgatcgtcatttggcacaacatcttaacaacgaccgaaacccattatttacataaacctaccattcggtaaccatgtgaaaggatggaccaatatcaaggtgtcagttgacctcagtgaattctgtgatgtttctgagatgcagactcccgtgtagtttcagattcttggtccatggatgacaccacctgcccatgcttccttgaattaggctttcctaacctgaagcgccttcaaacttccaataaagagatcattttctgcttca

SEQ ID NO: 321577 - DNA, 2417 bp, Homo sapiens
caaggaagatataaatgacaaggtcggctcagctctcagacaaggttttccaagcaagatgaagcccaacatcatctttgtactttccctgctcctcatcttggagaagcaagcagctgtgatgggacaaaaaggtggatcaaaaggccgattaccaagtgaattttcccaatttccacacggacaaaagggccagcactattctggacaaaaaggcaagcaacaaactgaatccaaaggcagtttttctattcaatacacatatcatgtagatgccaatgatcatgaccagtcccgaaaaagtcagcaatatgatttgaatgccctacataagacgacaaaatcacaacgacatctaggtggaagtcaacaactgctccataataaacaagaaggcagagaccatgataaatcaaaaggtcattttcacagggtagttatacaccataaaggaggcaaagctcatcgtgggacacaaaatccttctcaagatcaggggaatagcccatctggaaagggaatatccagtcaatattcaaacacagaagaaaggctgtgggttcatggactaagtaaagaacaaacttccgtctctggtgcacaaaaaggtagaaaacaaggcggatcccaaagcagttatgttctccaaactgaagagctagtagctaacaaacaacaacgtgagactaaaaattctcatcaaaataagggcttaccaaaatgtggttgaagtgagagaggaacattcaagtaaagtacaaacctcactctgtcctgcgcaccaagacaaactccaacatggatccaaagacattttttctacccaagatgagctcctagtatataacaagaatcaacaccagacaaaaaatctcaatcaagatcaacagcatggccgaaaggcaaataaaatatcataccaatcttcaagtacagaagaaagacgactccactatggagaaaatggtgtgcagaaagatgtatcccaaagcagtatttatagccaaactgaagagaaagcacagggcaagtctcaaaaacagataacaattcccagtcaagagcaagagcatagccaaaaggcaaataaaatatcataccaatcttcaagtacggaagaaagacgactccactatggagaaaatggtgtgcagaaagatgtatcccaacgcagtatttatagccaaactgaaaagctagtagcaggcaagtctcaaatccaggcaccaaatcctaagcaagagccatggcatggtgaaaatgcaaaaggagagtctggccaatctacaaatagagaacaagacctactcagtcatgaacaaaaaggcagacaccaacatggatctcatgggggattggatattgtaattatagagcaggaagatgacagtgatcgtcatttggcacaacatcttaacaacgaccgaaacccattatttacataaacctaccattcggtaaccatgtgaaaggatggaccaatatcaaggtgtcagttgacctcagtgaattctgtgatgtttctgagatgcagactcccgtgtagtttcagattcttggtccatggatgacaccacctgcccatgcttccttgaattaggctttcctaacctgaagcgccttcaaacttccaataaagagatcattttctgcttcacaaaaaaaaaaaaaaaaaaaaaaaaaaagtgtgttgcggccgcgcccgggccccccgaaaaagttttcaagaaccaatcgcgtgggggcgcgcggggccccaggtgggaaggggaaacaggggcacacaagagcggtcccagaggaaaaccggggccaagagaacaaagggctgtgggttccccccaaaaaaaaacgcgcccgcgggggaaaccgcggagggcgttggggaacaaaatccgaagggaggtgccgggagaccacagaggggaccaataacaggggggtcacaagcagagcccgaaatctaaaatttggccccccgagcgggagaagaaagaagcagaagagagaacaacaacaaagagaaacaagaaagcaaagagatgagaacaaaaagcaagcacaaacgaacagaggaagcgaaacacagagaacagaatccaaagacacatcatccaggacaggcgacgcgaagagaacggagggacgaggagcaagagaggagaggggaggggagaggagggaggcggagggaagagggacggggagaggaggaagggggagagggacggcaggagaggcgagagtgcgagggaaggagcggcggagcagacgagagggcgaaagggagggatggagaaggagaggagagaggggggcgaggtgaggagcagagggaccgagggagggagaggggagaggagggagagggaggcagtgagggcacggaagaaaggaagaggtgacgagaaggagaa

SEQ ID NO: 321578 - DNA, 1625 bp, Homo sapiens
caaggaagatataaatgacaaggtcggctcagctctcagacaaggttttccaagcaagatgaagcccaacatcatctttgtactttccctgctcctcatcttggagaagcaagcagctgtgatgggacaaaaaggtggatcaaaaggccgattaccaagtgaattttcccaatttccacacggacaaaagggccagcactattctggacaaaaaggcaagcaacaaactgaatccaaaggcagtttttctattcaatacacatatcatgtagatgccaatgatcatgaccagtcccgaaaaagtcagcaatatgatttgaatgccctacataagacgacaaaatcacaacgacatctaggtggaagtcaacaactgctccataataaacaagaaggcagagaccatgataaatcaaaaggtcattttcacagggtagttatacaccataaaggaggcaaagctcatcgtgggacacaaaatccttctcaagatcaggggaatagcccatctggaaagggaatatccagtcaatattcaaacacagaagaaaggctgtgggttcatggactaagtaaagaacaaacttccgtctctggtgcacaaaaaggtagaaaacaaggcggatcccaaagcagttatgttctccaaactgaagagctagtagctaacaaacaacaacgtgagactaaaaattctcatcaaaataagggcttaccaaaatgtggttgaagtgagagaggaacattcaagtaaagtacaaacctcactctgtcctgcgcaccaagacaaactccaacatggatccaaagacattttttctacccaagatgagctcctagtatataacaagaatcaacaccagacaaaaaatctcaatcaagatcaacagcatggccgaaaggcaaataaaatatcataccaatcttcaagtacagaagaaagacgactccactatggagaaaatggtgtgcagaaagatgtatcccaaagcagtatttatagccaaactgaagagaaagcacagggcaagtctcaaaaacagataacaattcccagtcaagagcaagagcatagccaaaaggcaaataaaatatcataccaatcttcaagtacggaagaaagacgactccactatggagaaaatggtgtgcagaaagatgtatcccaacgcagtatttatagccaaactgaaaagctagtagcaggcaagtctcaaatccaggcaccaaatcctaagcaagagccatggcatggtgaaaatgcaaaaggagagtctggccaatctacaaatagagaacaagacctactcagtcatgaacaaaaaggcagacaccaacatggatctcatgggggattggatattgtaattatagagcaggaagatgacagtgatcgtcatttggcacaacatcttaacaacgaccgaaacccattatttacataaacctaccattcggtgtcagttgacctcagtgaattctgtgatgtttctgagatgcagactcccgtgtagtttcagattcttggtccatggatgacaccacctgcccatgcttccttgaattaggctttcctaacctgaagcgccttcaaacttccaataaagagatcattttctgcttca

SEQ ID NO: 321579 - DNA, 2237 bp, Homo sapiens
caaggaagatataaatgacaaggtcggctcagctctcagacaaggttttccaagcaagatgaagcccaacatcatctttgtactttccctgctcctcatcttggagaagcaagcagctgtgatgggacaaaaaggtggatcaaaaggccgattaccaagtgaattttcccaatttccacacggacaaaagggccagcactattctggacaaaaaggcaagcaacaaactgaatccaaaggcagtttttctattcaatacacatatcatgtagatgccaatgatcatgaccagtcccgaaaaagtcagcaatatgatttgaatgccctacataagacgacaaaatcacaacgacatctaggtggaagtcaacaactgctccataataaacaagaaggcagagaccatgataaatcaaaaggtcattttcacagggtagttatacaccataaaggaggcaaagctcatcgtgggacacaaaatccttctcaagatcaggggaatagcccatctggaaagggaatatccagtcaatattcaaacacagaagaaaggctgtgggttcatggactaagtaaagaacaaacttccgtctctggtgcacaaaaaggtagaaaacaaggcggatcccaaagcagttatgttctccaaactgaagagctagtagctaacaaacaacaacgtgagactaaaaattctcatcaaaataagggcttaccaaaatgtggttgaagtgagagaggaacattcaagtaaagtacaaacctcactctgtcctgcgcaccaagacaaactccaacatggatccaaagacattttttctacccaagatgagctcctagtatataacaagaatcaacaccagacaaaaaatctcaatcaagatcaacagcatggccgaaaggcaaataaaatatcataccaatcttcaagtacagaagaaagacgactccactatggagaaaatggtgtgcagaaagatgtatcccaacgcagtatttatagccaaactgaaaagctagtagcaggcaagtctcaaatccaggcaccaaatcctaagcaagagccatggcatggtgaaaatgcaaaaggagagtctggccaatctacaaatagagaacaagacctactcagtcatgaacaaaaaggcagacaccaacatggatctcatgggggattggatattgtaattatagagcaggaagatgacagtgatcgtcatttggcacaacatcttaacaacgaccgaaacccattatttacataaacctaccattcggtaaccatgtgaaaggatggaccaatatcaaggtgtcagttgacctcagtgaattctgtgatgtttctgagatgcagactcccgtgtagtttcagattcttggtccatggatgacaccacctgcccatgcttccttgaattaggctttcctaacctgaagcgccttcaaacttccaataaagagatcattttctgcttcacaaaaaaaaaaaaaaaaaaaaaaaaaaagtgtgttgcggccgcgcccgggccccccgaaaaagttttcaagaaccaatcgcgtgggggcgcgcggggccccaggtgggaaggggaaacaggggcacacaagagcggtcccagaggaaaaccggggccaagagaacaaagggctgtgggttccccccaaaaaaaaacgcgcccgcgggggaaaccgcggagggcgttggggaacaaaatccgaagggaggtgccgggagaccacagaggggaccaataacaggggggtcacaagcagagcccgaaatctaaaatttggccccccgagcgggagaagaaagaagcagaagagagaacaacaacaaagagaaacaagaaagcaaagagatgagaacaaaaagcaagcacaaacgaacagaggaagcgaaacacagagaacagaatccaaagacacatcatccaggacaggcgacgcgaagagaacggagggacgaggagcaagagaggagaggggaggggagaggagggaggcggagggaagagggacggggagaggaggaagggggagagggacggcaggagaggcgagagtgcgagggaaggagcggcggagcagacgagagggcgaaagggagggatggagaaggagaggagagaggggggcgaggtgaggagcagagggaccgagggagggagaggggagaggagggagagggaggcagtgagggcacggaagaaaggaagaggtgacgagaaggagaa

SEQ ID NO: 321580 - DNA, 1532 bp, Homo sapiens
  misc_feature (8)..(8): n is a, c, g, or t
cgggtcgnctactactactactaaattcgcggccgcgtcgaccccaatttccacacggacaaaagggccagcactattctggacaaaaaggcaagcaacaaactgaatccaaaggcagtttttctattcaatacacatatcatgtagatgccaatgatcatgaccagtcccgaaaaagtcagcaatatgatttgaatgccctacataagacgacaaaatcacaacgacatctaggtggaagtcaacaactgctccataataaacaagaaggcagagaccatgataaatcaaaaggtcattttcacagggtagttatacaccataaaggaggcaaagctcatcgtgggacacaaaatccttctcaagatcaggggaatagcccatctggaaagggaatatccagtcaatattcaaacacagaagaaaggctgtgggttcatggactaagtaaagaacaaacttccgtctctggtgcacaaaaaggtagaaaacaaggcggatcccaaagcagttatgttctccaaactgaagagctagtagctaacaaacaacaacgtgagactaaaaattctcatcaaaataagggcttaccaaaatgtggttgaagtgagagaggaacattcaagtaaagtacaaacctcactctgtcctgcgcaccaagacaaactccaacatggatccaaagacattttttctacccaagatgagctcctagtatataacaagaatcaacaccagacaaaaaatctcaatcaagatcaacagcatggccgaaaggcaaataaaatatcataccaatcttcaagtacagaagaaagacgactccactatggagaaaatggtgtgcagaaagatgtatcccaaagcagtatttatagccaaactgaagagaaagcacagggcaagtctcaaaaacagataacaattcccagtcaagagcaagagcatagccaaaaggcaaataaaatatcataccaatcttcaagtacggaagaaagacgactccactatggagaaaatggtgtgcagaaagatgtatcccaacgcagtatttatagccaaactgaaaagctagtagcaggcaagtctcaaatccaggcaccaaatcctaagcaagagccatggcatggtgaaaatgcaaaaggagagtctggccaatctacaaatagagaacaagacctactcagtcatgaacaaaaaggcagacaccaacatggatctcatgggggattggatattgtaattatagagcaggaagatgacagtgatcgtcatttggcacaacatcttaacaacgaccgaaacccattatttacataaacctaccattcggtaaccatgtgaaaggatggaccaatatcaaggtgtcagttgacctcagtgaattctgtgatgtttctgagatgcagactcccgtgtagtttcagattcttggtccatggatgacaccacctgcccatgcttccttgaattaggctttcctaacctgaagcgccttcaaacttccaataaagagatcattttctgcttca

SEQ ID NO: 321581 - DNA, 367 bp, Homo sapiens
tggatatttgttccttgcttaggactgcttagcataggctgtgcatttgtgagaaaggctcatggttttagttgaacgtttaagaactccttcaagtcctaatacatcaggtaacaggagagagaattccctgcatagagtattttccactttcagctacaaatggaaacttaggctcagtttagattgtaaacagctgatgcatcaatcctctttatttgaggaggcgtagaagtcaaataaaatatagagagcaatctctcaacttaaaatgttttacttgggaagcaagaattgcaatctgaggcatacacagaccagtggtcttcagtatgtctgaagaacaaagacgagattgcggtgtttg

SEQ ID NO: 321582 - DNA, 400 bp, Homo sapiens
cgccgccgcgctcgctccccgcgtgtggacgccaggggccgaagtaaaagccccgagcccgcggctgcgctcgggaaactttgcccgaggagaggacagcaaagaaaaatcacccgaagttgagagctgagcctccaagttacagctccgcagcgggcgaggggaggtgggagggagcgcacggcaacgcggaatccagcctaagtttggagggctgcgggtccggaagggcagcgcccaagtctccaggagcccgcgcggcctggaaagaggggaccggggagaggcaggcggcgcaggccggggcccgagggcgcccccaaggccgagccagggaccgggaatctgagcgccccgccaagcgactgggtctgaatgcaactgaaagcgccgagtcccc

SEQ ID NO: 321583 - DNA, 184 bp, Homo sapiens
atccaacaataggctgggagggctataacagctggtacagaagcaaaataaactggctgtccaaaaagtttcaggaaattcgcccaaaataaatctaaattgattaccaaaaatatcaagatatggccgggtgcaatggttcacacatgtaatcccagcactttgggaggccgaggcaggcgga

SEQ ID NO: 321584 - DNA, 391 bp, Homo sapiens
agcttggaaggccttcccaggaatgcaagtctgaaccatctagagttctctcagccagaatgaaggctcagctcttggatgtttctaccataaaaatgagaaagcatttcctacctcctcctctgtcactccacaaagatgtgcttcctgtgtggctggctagcagataagagaagaaccgtgtgctaactcctcatcaaagaccagaagtagatcctgaattgtattcattctcatctctttctacctcctccaagacagaaggacatgattaacttctttatctcaatgtcagccttcaatagctacaaaagtctaaactgtaaatagcgttgaagctttgcataataaaattcttttccccagtgatgggcagtttttcacatagtaa

SEQ ID NO: 321585 - DNA, 380 bp, Homo sapiens
  misc_feature (187)..(187): n is a, c, g, or t
cctggagtgaggaacacagggggctgtgggagcctaagaggcgcttgccccggcctctggttctagaaagacttccaggaggtggtgatccttaagccaagtacgaataggagccaactagaatgggaatgggtctggcagaatgaactgcaagcgccaaggcccagaggccaaaaaaaaaaaaaanaaaaatagaagcgcatgttttgattgaggaagcaagagcagcttagtatgcctagaacctaactggagacgggaaatggttctatagacgatgttagagttcaactatggctacattccagtcttcctgtaagtgactttgtcacattctggcttaaaactcccccaaagggatcccattaggaaaaaaaaaa

SEQ ID NO: 321586 - DNA, 334 bp, Homo sapiens
tcctgggcacaagcaatcctcccacctccccaggtgctggaattacaggtatgaaccaccacacccagccacaattttgctcctaaaacaaaccaagctgccagcaaaaagaattagcaggatcccaggctgacgcctttcaccatggccactgggagtgctcggtgggagcaggaaggctgacagccacgcctctgaggtcctcgagagtctcctctcatcaggagctgcatcaggagcagtttgaggaaacaaaaagctccagggtgggcattcctgcctccaatcctgactgccactgactggaagcaagatctgggacaatcccaacacc

SEQ ID NO: 321587 - DNA, 391 bp, Homo sapiens
tatcctcatcctatccacatcatactaacattgacttagtgcctaccgtggataacgcactgcactgagtacccaacaaaaactccattaatcttcactgcaaccctaagggaactatcatcattaattttctaattttacaaatgaactgagaaacagagaggttaagtaacttgtctaaggtcacacagccagcaagtggtagaactgagacttaaatccgggtagcctgacaacagaccttgggttcttcatgactgtagtacctgttccctcataattgggttaagagatgacaagcaaccccctgcagaacatgctcacagaaatagctctcccaagaaccagtagagtgcagtaggcagagcaggggactgctctaagatgaagg

SEQ ID NO: 321588 - DNA, 7989 bp, Homo sapiens
gaggatgcagagtgggagaccttaaaaccgtctgatctggctgctaaagcgagtgtctgacgaccacccattaacaccagcgagtagcgtttgctcacggctttaggataagaagcctggaatggtcccccctccgccgggagaagaaagccagacggtcatccttccacctggctggcagagctacctgtcgcctcagggccggcggtactatgtcaacacgaccaccaatgagaccacctgggaacgtcccagcagttctcctgggattccagccagccctggctctcacaggagctctctgcctccaacagtgaatggataccacgcatcagggaccccagcgcaccctccagagactgcccacatgagtgtccgaaaatccaccggtgattcccagaacctgggatcctcatcgccaagcaaaaagcagagcaaggaaaacaccatcacaataaactgtgtgacgttccctcacccagacacgatgccggaacagcagctgctgaaaccaaccgagtggagctactgcgactacttctgggctgataagaaggacccccaaggcaacggcaccgtggctgggtttgaactactgctccagaaacagctgaagggcaaacaaatgcagaaggaaatgtcagaattcatccgggaaaggataaagattgaagaagactatgcgaagaacttagctaagctctctcagaactccttggcttcacaggaggaaggctccttgggagaggcgtgggcccaggtgaagaagagcctggcggacgaagcagaagttcacctcaagttctctgccaagcttcacagcgaggtggagaagcccctgatgaacttccgtgagaacttcaagaaagacatgaagaagtgcgaccaccacattgccgaccttcgcaagcagctcgccagccgctatgcctcggtggagaaggcccggaaagccctcacagagcggcagagagacctggagatgaagacccagcagctggagatcaagctgagcaacaagacagaggaggacatcaagaaggcgcggagaaagtccacacaggctggagacgacctcatgcgctgtgtggatctctacaaccaggcccagtccaaatggtttgaagagatggtgaccaccacattggagctagagcggctggaggtggagagggtagagatgatccggcagcacctgtgccagtacacgcagctgcggcatgaaacagacatgttcaaccaaagcacagtcgagcccgtggatcagctgcttcgaaaagtggacccggccaaagacagggagctgtgggtcagagagcacaagacgggcaacatccgccctgtggacatggagatctagatgggcctgtgcagcttcggggggtcctgctggggaggggggctgggctcccaccatggggcccatgccgagtggatgccccccaccctctctcctgggccactgaggagaggggagagagctggtgattccagaagggtgacccggacagcctagctgggggctcccccatattcccaggcccagaagacagacccacagccctgcccttgtctctgaggctgaagaccccctgactcccatgctgtgcttgccgctctgaaacaaacagaggctggaactttgtggtccttgccgagttttgtaggggtcactgtcacatgcttgtgccctggaagccccaaggctcttcctccagctggctcccttgtctccagggctttggaggatcagggtagggagggctctgtctctaagccaggtgtcaggatcagaatcatgggtagaaggtgccattcagctcacagccgcacccagaatcctttgcagccctccttctttatttttttcccattgcattctgggagtccacatctggctttctcagccactgttcatcaccaggggttttaggaggaaggcttggctcctgtcttcccagacccaccatgcctggagaggtcaggatggaactacctcattcggcaaattagccccaaattgagcgctgaatcgtgtcccatgagatcaggcgccatctgtaaagtctcctctggaaatgccaatccatccttcccccagctgcttcctcggggaggcccctgcccccaccctgccagcccttcccagtctcattagaggaagctttccaaagttctcagttatcaagacctcatccagctcgtccaaaggcttcagggatggaaacaaaccagctcgtctcagaggccagcaagctggggcctgtccgccacggtgccctgtgcacctttgggctgccctggcccccactctcccgggccgcccaccacaggctcttaatggggccgggtcagtcctacatgtgagatgggttagggcaagtctttgccatcccccagatggctctgtcttcttgtgtatggcagggctgggactgctgtcccttgtacagttttctgtcactggtgggcactggacaggcatagcagactctcttgtggccacactaggttgtcgcctttcaggcagtgtcccgccacctttgcttcccgctccttctggacattccagagccctgcaccaaacccttacttggtgtctgcacctcctttccctctctccatcttccaatccctggaaaagtctggtctgagtgtgacttgggaagctttcagtgctgctgtttggcccagctcattactttctccctttctctaccacagcaaacacattctccaccatgtcagtctaaagagtctaaaggggccgggagaagcatgagcgaggggcagattctagtcgggagcccatgccctggaaatccatctttcttcatctttcccattgaccactttgggtttgacctgcacatctgcagtgagggcagaattcaacaagcacaactcactggtctttcagtcaacgtgctagaaaccgatgacttattaatctctaattttttggcgcctctttcattgaatgagaattgctttcgtatagttcacattagaaaaatgcctaatatactaaagtaaaccaaacgttgtcacttttctcttgttcttgaaacattgcaaccaaaaaggtcagcacaaaggccttcacctacgtgaagacctcctggtaggatctgtccatgggatggagaaccactctgtccagatctggggttgggtcatgacaccagctaccaattttagaatattatttcttggtttctttatgaaaaatgggtgctagtggtaattgctttgtggcttagtaaactactctgtggatgatttccaaacattcaaagccaatagccttgttattaacaagatattttgagtacaatatggctcattgacttttccattacatctgaggattccagagtcctctgttcatccctgggatagagtgagccctcttgcgtcttccagggtagctcaggttggcccagtttgggccagtccatttttggaggtcactctttcccccctcatcccctcacctccttctctttacccccttcacgtacttcctttctttcttccctctgttattcattcatcaagcaggttaaagccattgtgctaagatctaatctgaggacactataatggccctgtcgtcagggaagcccgtgatcgctcgttttcaggggtcttaccggtcagcaaccttggcattgatacataggcactctacagaatttaagttttcagaggtaagtctgttgttctgattaatctgcattcattcagcgaatgctcaagacaagccaggcatgctgagaagcggcgctctagttgtatgtaagatgggcattcctctgctctcctctattctccatgtcgactgagaagagtataataagaacattgtaccctctccacacttaaccctctgggattctttattataatataaaccaccgtcgtgaggcatttacctgttggatggaaggtagacagcaacaagattttaatcacctggtcaccagaccctcacggcccatatccaattcgaatttcagaaatttctctgtttgctttaaataactctttacaaataagggtcgggcacggtggctcacgcctgtaatcccagctctttgggaggccgaggtgggcagatcacgaggtcaggagatcgagaccatcctggctaacatggtgaaaccccgtctctgctaaaaatacaaaaaattagccagatgtggtggtgcacacctgtagtcccaactattcggcaggctgaggcagtagaatcgcttgaacctgggaggcggagattgcagtgaaccaagatcgggccactgcactccagcttgggtgacagagcaagactccatctcaaaaaaattataaataactctttgcaaataggaaagtgaagctcaagggtaaccagtgaggctatgaaattgccagtgaattaagaccagggctagagtcaacagtccagaacccctatccgtatgaacaggggcccgtttctggttgaaatcaaggttaggatgcaactgagaaaataaaagactgcactttggagaggcaagcacgctatccgggttgttgttttgttttatgtcttggtgcttaggtgaggacttagctgggtttattcaaagtgggcgggtctgggctattcttgagaatgtcccttccatttctgagaacaagtcagccccttctacctgcctccacccaggagactgatgcacaagatctgtttgtgaaagcctgatttaaaaagaaaaaaaaaattccttaagccaaatggtgttccaagttggttgctgtgacaacctccaggaagagccacttgttaccctctattctttctagtgctttcagtcagtggcaacacataggccccttggaccgtggggatggcggccctgagattctgtcagtgggaccaccctgggcctcctttctacctccactcagcaccctgttggccaaggagaatttctgcggtgggaggcagtgctctgctagtcaggattgataaacagctgggcacaccgaaacagtgtaccaacgaattcaccaaccaggggtttctttccctaccctttgtgaaaaccaatcaattactagatgagtggatggatgcagaaaaatctgggctgagccaaagtcccttttggaaatacaagccataacattcgaaggacatcagcgaccttggcttgtttaggtgattttacttccagctgcaggtagtcttgacaaggagtgtttaaacagaaggctcaagatgcattccttgtgtaggtgggagagagcacttctaatgttaagtggggtacagatcagctgcccccccacgtagcctggacatcgtcttatccccataatccttgccatccctacaaggcccatcgccaccaccttttcccaggtttattgaggtatgattgacatccagtaaaattcaccctttggaaatatacagctctgtgaattttgacaaatttagtgtcttgtgaccatcaccaagatcaacctgtttttaaccctccaaaaaattcccttctcctgccctctttccctggcaaccctgattgattatctgatcctataattttgccttttctagaatgtcatataaatggagtcacactgatgtcgccttttgagtctggcatctttccctcagcttaatgcttttgagtcattcatgatgtgtgcgtgtggtttgttccttctccttgccgggaagtatttcattgcatgggcgtactactctgcttctttatttttacactgagcctttcgccctggaagttcttggcccagggtcttcaacttgtttgcacgaccacttccagcttgctgcttccttcagttccccaggctcctcctccaaatgccagctgtgcccacaagctgttcttagggctcacactcgccttttggcgcgtggtgggtttttggtagtgcagaaagaatccagggatgggaggggaagggacggatgggtgctcaattgctgctcacgtctgctgcaacctgaagcttgcatctcagccagcagatctgctcccttctgggacccaggcttcagtgtcacacggtccttggctatgtattgggcgttggaggctttgaaaggcgagcagaagcagcatggacaagaaggctggggctggccctggggctcatcatgatgctttcctggatctgttgcttcatctgcaagctgagggtgtttgttctagatgagtgtctcaggccaccggcaactgcatgtacctcctccctttctcatttccaatgatgtaccctgtacacgtgttcatgctgtgtctggctctcatctgcacaatcgtgcatagaattgcctcaagtcctggtgagagagatgccgtggtacttttccatttagattcaaatggagctaaaattaagagttttatgagctgttaagaatgaggtagtttctcctaggaccccccaaagacagtgcaagtaatgaccgtttggatctcattcgtcgatctttgatagtatgttctggagtctactccccaggagccaggacaggcgtgaagatggagtccttgtcgcagctggagccttgcctagctggtgatcacacagcctggcctgtacctgcaccccactggatggtggtacatggtggcagggacaggaccacacccagttaaggccagaccaggctgagtgtgacccctgaggtaaacactccactaagctgtgtcttgttcatgccccctgctcagtgaaaggtgagtcccgagaccagttgggtacctctctatgcgaaccagagacatttctggatccaggccaggtgaagattagggccaggaagcctgagcccccggggcctcaaggtagggagccgaagaggctgccaggactctgctgggttgaaatttgccggggaggactcttgtctccccctcaggagtatttttgttgaggctttcctggaggtgaagaagcaattcccattgcagcaggttagagcgagaatcagacagagggcaaaaaccaattcgcttctccccacgttctaaatgctggggcatggctgtcaggagggcttcctgggaggtgtctctgggggtggggtgaggttggggcgatggcctttggagattgcgtgtggtgttcaggactgttccttggtgtttgagggaaactttagtgggattgcagtggaatgtaaggtcagggcacgtgggtgctctctcggggtggggtgactgggagacctagagggaaagcctgctatgcagggggagagcacaggactggccctgctctgcggcctcctttgtcccataacctgaagttaagtcacatcccctgtcgggacctccgtgcactcatctgtcaagtgggggcgcttcccttccagcatcacctgcagcagacgggctctcgggagtcgtgggttccaggcagctgtgtggacccagggacagacattcaaagggacgccagccatccttggtgacaggggccccaacttagcatcccttcccttccgttaggaaggagatgaccggaagcaaccccttcacagacacgagcacatcggcaaaccctatgaaagtggaattttctaacaaaataaacttgcttgtttgatctgttttctgtaacttttgctaaatactttatacatttttcatgttaaagagccgtgtctcccgccagcactcctcaccccggtatgaatgtgtttcctccacattgtatatccttccaccctctggctgcctagatcagtaaataaaattgatgtaatataatttataagtaacactgttgaaaccctgatcccagtggaggctgtaacccacctgcccccgcaccacccccctgacccctgttaccgcatttgtgtgtattaatgctgaagaattaaatgtttaaagagtttaaattttgaaggcgtttgctatatacagttgtcctgcattattataaagagttttcaggaagttaaaacccatc

SEQ ID NO: 321589 - DNA, 699 bp, Homo sapiens
  misc_feature (645)..(645): n is a, c, g, or t
gtggtcatcccgcctcagccacctactacaggaccgccaagaaaagaagttcccaaaaccactcctagtgagcccaagaaaaagcagcctccaccaccagaatcaggtccagagcagagcaaacagaaaaaagtggctccccgcccaagtatccctgtaaaacaaaaaccaaaagaaaaggaaaaaccacctccggtcaataagcaggagaatgcaggcactttgaacatcctcagcactctctccaatggcaatagttctaagcaaaaaattccagcagatggagtccacaggatcagagtggactttaaagcctggaatggtcccccctccgccgggagaagaaagccagacggtcatccttccacctggctggcagagctacctgtcgcctcagggccggcggtactatgtcaacacgaccaccaatgagaccacctgggaacgtcccagcagttctcctgggattccagccagccctggctctcacaggagctctctgcctccaacagtgaatggataccacgcatcagggaccccagcgcaccctccagagactgcccacatgagtgtccgaaaatccaccggtgattcccagaacctgggatcctcatcgccaagcaaaaagcagaagctggagtggtngcctgtttggattcaggcccaggggccgagacattcccttcttcactcttttcc

SEQ ID NO: 321590 - DNA, 1145 bp, Homo sapiens
  misc_feature (1070)..(1070): n is a, c, g, or t
  misc_feature (1073)..(1073): n is a, c, g, or t
  misc_feature (1076)..(1076): n is a, c, g, or t
agaaacattgcatctggaaagtccagaacaagttgttaatttcccagcaagcactggagcggatttggaaggaactatgcaatgtagtgggttctttgtgaaagaacagcaatgagcaaagccacaggaacctccgctggggtgcccagaacactggccctgggctagcgacttgcctcagccccatttcccggagaggctgccatgaagaggaagccggcggagtcttggtgctgagtctgagggcttcaggcaggacccaagactctcctctgaggtagcagcccccagagaaggttagctgttctctgatgaagcctggaatggtcccccctccgccgggagaagaaagccagacggtcatccttccacctggctggcagagctacctgtcgcctcagggccggcggtactatgtcaacacgaccaccaatgagaccacctgggaacgtcccagcagttctcctgggattccagccagccctggctctcacaggagctctctgcctccaacagaacctgggatcctcatcgccaagcaaaaagcagagcaaggaaaacaccatcacaataaactgtgtgacgttccctcacccagacacgatgccggaacagcagctgctgaaaccaaccgagtggagctactgcgactacttctgggctgataagaaggacccccaaggcaacggcaccgtggctgggtttgaactactgctccagaaacagctgaagggcaaacaaatgcagaaggaaatgtcagaattcatccgggaaaggataaagattgaagaagactatgcgaagaacttagctaagctctctcagaactccttggcttcacaggaggaaggctccttgggagaggcgtgggcccaggtgaagaagagcctggcggacgaagcagaagttcacctcaagttctctgccaagcttcacagcgaggtggagaagcccctgatgaacttccgtgagaacttcaagaaagacatgaagaagtgcgaccaccacattgccgaccttcgcaagcagctcgccagccgctatgcctcggtggagaagccggaagcccncanagngggaaccgggtataaaccggtggagacccggacacacaggggcgtcaagggggaagccacgggggactc

SEQ ID NO: 321591 - DNA, 7806 bp, Homo sapiens
tcgagcggccgccccgggcaggtcccgagagctgggcgtgggaacagcgtggggtcagggagacccctgcttgccctggcccagaatatggtgacttaggattcagactgagcatccctgattccccagcgcctccaccctcagggaacctgaatggggggaaaaaatgtccaatatggagaacagctttgacgatgtttcttgcctctctccccagaacctgggatcctcatcgccaagcaaaaagcagagcaaggaaaacaccatcacaataaactgtgtgacgttccctcacccagacacgatgccggaacagcagctgctgaaaccaaccgagtggagctactgcgactacttctgggctgataagaaggacccccaaggcaacggcaccgtggctgggtttgaactactgctccagaaacagctgaagggcaaacaaatgcagaaggaaatgtcagaattcatccgggaaaggataaagattgaagaagactatgcgaagaacttagctaagctctctcagaactccttggcttcacaggaggaaggctccttgggagaggcgtgggcccaggtgaagaagagcctggcggacgaagcagaagttcacctcaagttctctgccaagcttcacagcgaggtggagaagcccctgatgaacttccgtgagaacttcaagaaagacatgaagaagtgcgaccaccacattgccgaccttcgcaagcagctcgccagccgctatgcctcggtggagaaggcccggaaagccctcacagagcggcagagagacctggagatgaagacccagcagctggagatcaagctgagcaacaagacagaggaggacatcaagaaggcgcggagaaagtccacacaggctggagacgacctcatgcgctgtgtggatctctacaaccaggcccagtccaaatggtttgaagagatggtgaccaccacattggagctagagcggctggaggtggagagggtagagatgatccggcagcacctgtgccagtacacgcagctgcggcatgaaacagacatgttcaaccaaagcacagtcgagcccgtggatcagctgcttcgaaaagtggacccggccaaagacagggagctgtgggtcagagagcacaagacgggcaacatccgccctgtggacatggagatctagatgggcctgtgcagcttcggggggtcctgctggggaggggggctgggctcccaccatggggcccatgccgagtggatgccccccaccctctctcctgggccactgaggagaggggagagagctggtgattccagaagggtgacccggacagcctagctgggggctcccccatattcccaggcccagaagacagacccacagccctgcccttgtctctgaggctgaagaccccctgactcccatgctgtgcttgccgctctgaaacaaacagaggctggaactttgtggtccttgccgagttttgtaggggtcactgtcacatgcttgtgccctggaagccccaaggctcttcctccagctggctcccttgtctccagggctttggaggatcagggtagggagggctctgtctctaagccaggtgtcaggatcagaatcatgggtagaaggtgccattcagctcacagccgcacccagaatcctttgcagccctccttctttatttttttcccattgcattctgggagtccacatctggctttctcagccactgttcatcaccaggggttttaggaggaaggcttggctcctgtcttcccagacccaccatgcctggagaggtcaggatggaactacctcattcggcaaattagccccaaattgagcgctgaatcgtgtcccatgagatcaggcgccatctgtaaagtctcctctggaaatgccaatccatccttcccccagctgcttcctcggggaggcccctgcccccaccctgccagcccttcccagtctcattagaggaagctttccaaagttctcagttatcaagacctcatccagctcgtccaaaggcttcagggatggaaacaaaccagctcgtctcagaggccagcaagctggggcctgtccgccacggtgccctgtgcacctttgggctgccctggcccccactctcccgggccgcccaccacaggctcttaatggggccgggtcagtcctacatgtgagatgggttagggcaagtctttgccatcccccagatggctctgtcttcttgtgtatggcagggctgggactgctgtcccttgtacagttttctgtcactggtgggcactggacaggcatagcagactctcttgtggccacactaggttgtcgcctttcaggcagtgtcccgccacctttgcttcccgctccttctggacattccagagccctgcaccaaacccttacttggtgtctgcacctcctttccctctctccatcttccaatccctggaaaagtctggtctgagtgtgacttgggaagctttcagtgctgctgtttggcccagctcattactttctccctttctctaccacagcaaacacattctccaccatgtcagtctaaagagtctaaaggggccgggagaagcatgagcgaggggcagattctagtcgggagcccatgccctggaaatccatctttcttcatctttcccattgaccactttgggtttgacctgcacatctgcagtgagggcagaattcaacaagcacaactcactggtctttcagtcaacgtgctagaaaccgatgacttattaatctctaattttttggcgcctctttcattgaatgagaattgctttcgtatagttcacattagaaaaatgcctaatatactaaagtaaaccaaacgttgtcacttttctcttgttcttgaaacattgcaaccaaaaaggtcagcacaaaggccttcacctacgtgaagacctcctggtaggatctgtccatgggatggagaaccactctgtccagatctggggttgggtcatgacaccagctaccaattttagaatattatttcttggtttctttatgaaaaatgggtgctagtggtaattgctttgtggcttagtaaactactctgtggatgatttccaaacattcaaagccaatagccttgttattaacaagatattttgagtacaatatggctcattgacttttccattacatctgaggattccagagtcctctgttcatccctgggatagagtgagccctcttgcgtcttccagggtagctcaggttggcccagtttgggccagtccatttttggaggtcactctttcccccctcatcccctcacctccttctctttacccccttcacgtacttcctttctttcttccctctgttattcattcatcaagcaggttaaagccattgtgctaagatctaatctgaggacactataatggccctgtcgtcagggaagcccgtgatcgctcgttttcaggggtcttaccggtcagcaaccttggcattgatacataggcactctacagaatttaagttttcagaggtaagtctgttgttctgattaatctgcattcattcagcgaatgctcaagacaagccaggcatgctgagaagcggcgctctagttgtatgtaagatgggcattcctctgctctcctctattctccatgtcgactgagaagagtataataagaacattgtaccctctccacacttaaccctctgggattctttattataatataaaccaccgtcgtgaggcatttacctgttggatggaaggtagacagcaacaagattttaatcacctggtcaccagaccctcacggcccatatccaattcgaatttcagaaatttctctgtttgctttaaataactctttacaaataagggtcgggcacggtggctcacgcctgtaatcccagctctttgggaggccgaggtgggcagatcacgaggtcaggagatcgagaccatcctggctaacatggtgaaaccccgtctctgctaaaaatacaaaaaattagccagatgtggtggtgcacacctgtagtcccaactattcggcaggctgaggcagtagaatcgcttgaacctgggaggcggagattgcagtgaaccaagatcgggccactgcactccagcttgggtgacagagcaagactccatctcaaaaaaattataaataactctttgcaaataggaaagtgaagctcaagggtaaccagtgaggctatgaaattgccagtgaattaagaccagggctagagtcaacagtccagaacccctatccgtatgaacaggggcccgtttctggttgaaatcaaggttaggatgcaactgagaaaataaaagactgcactttggagaggcaagcacgctatccgggttgttgttttgttttatgtcttggtgcttaggtgaggacttagctgggtttattcaaagtgggcgggtctgggctattcttgagaatgtcccttccatttctgagaacaagtcagccccttctacctgcctccacccaggagactgatgcacaagatctgtttgtgaaagcctgatttaaaaagaaaaaaaaaattccttaagccaaatggtgttccaagttggttgctgtgacaacctccaggaagagccacttgttaccctctattctttctagtgctttcagtcagtggcaacacataggccccttggaccgtggggatggcggccctgagattctgtcagtgggaccaccctgggcctcctttctacctccactcagcaccctgttggccaaggagaatttctgcggtgggaggcagtgctctgctagtcaggattgataaacagctgggcacaccgaaacagtgtaccaacgaattcaccaaccaggggtttctttccctaccctttgtgaaaaccaatcaattactagatgagtggatggatgcagaaaaatctgggctgagccaaagtcccttttggaaatacaagccataacattcgaaggacatcagcgaccttggcttgtttaggtgattttacttccagctgcaggtagtcttgacaaggagtgtttaaacagaaggctcaagatgcattccttgtgtaggtgggagagagcacttctaatgttaagtggggtacagatcagctgcccccccacgtagcctggacatcgtcttatccccataatccttgccatccctacaaggcccatcgccaccaccttttcccaggtttattgaggtatgattgacatccagtaaaattcaccctttggaaatatacagctctgtgaattttgacaaatttagtgtcttgtgaccatcaccaagatcaacctgtttttaaccctccaaaaaattcccttctcctgccctctttccctggcaaccctgattgattatctgatcctataattttgccttttctagaatgtcatataaatggagtcacactgatgtcgccttttgagtctggcatctttccctcagcttaatgcttttgagtcattcatgatgtgtgcgtgtggtttgttccttctccttgccgggaagtatttcattgcatgggcgtactactctgcttctttatttttacactgagcctttcgccctggaagttcttggcccagggtcttcaacttgtttgcacgaccacttccagcttgctgcttccttcagttccccaggctcctcctccaaatgccagctgtgcccacaagctgttcttagggctcacactcgccttttggcgcgtggtgggtttttggtagtgcagaaagaatccagggatgggaggggaagggacggatgggtgctcaattgctgctcacgtctgctgcaacctgaagcttgcatctcagccagcagatctgctcccttctgggacccaggcttcagtgtcacacggtccttggctatgtattgggcgttggaggctttgaaaggcgagcagaagcagcatggacaagaaggctggggctggccctggggctcatcatgatgctttcctggatctgttgcttcatctgcaagctgagggtgtttgttctagatgagtgtctcaggccaccggcaactgcatgtacctcctccctttctcatttccaatgatgtaccctgtacacgtgttcatgctgtgtctggctctcatctgcacaatcgtgcatagaattgcctcaagtcctggtgagagagatgccgtggtacttttccatttagattcaaatggagctaaaattaagagttttatgagctgttaagaatgaggtagtttctcctaggaccccccaaagacagtgcaagtaatgaccgtttggatctcattcgtcgatctttgatagtatgttctggagtctactccccaggagccaggacaggcgtgaagatggagtccttgtcgcagctggagccttgcctagctggtgatcacacagcctggcctgtacctgcaccccactggatggtggtacatggtggcagggacaggaccacacccagttaaggccagaccaggctgagtgtgacccctgaggtaaacactccactaagctgtgtcttgttcatgccccctgctcagtgaaaggtgagtcccgagaccagttgggtacctctctatgcgaaccagagacatttctggatccaggccaggtgaagattagggccaggaagcctgagcccccggggcctcaaggtagggagccgaagaggctgccaggactctgctgggttgaaatttgccggggaggactcttgtctccccctcaggagtatttttgttgaggctttcctggaggtgaagaagcaattcccattgcagcaggttagagcgagaatcagacagagggcaaaaaccaattcgcttctccccacgttctaaatgctggggcatggctgtcaggagggcttcctgggaggtgtctctgggggtggggtgaggttggggcgatggcctttggagattgcgtgtggtgttcaggactgttccttggtgtttgagggaaactttagtgggattgcagtggaatgtaaggtcagggcacgtgggtgctctctcggggtggggtgactgggagacctagagggaaagcctgctatgcagggggagagcacaggactggccctgctctgcggcctcctttgtcccataacctgaagttaagtcacatcccctgtcgggacctccgtgcactcatctgtcaagtgggggcgcttcccttccagcatcacctgcagcagacgggctctcgggagtcgtgggttccaggcagctgtgtggacccagggacagacattcaaagggacgccagccatccttggtgacaggggccccaacttagcatcccttcccttccgttaggaaggagatgaccggaagcaaccccttcacagacacgagcacatcggcaaaccctatgaaagtggaattttctaacaaaataaacttgcttgtttgatctgttttctgtaacttttgctaaatactttatacatttttcatgttaaagagccgtgtctcccgccagcactcctcaccccggtatgaatgtgtttcctccacattgtatatccttccaccctctggctgcctagatcagtaaataaaattgatgtaatataatttataagtaacactgttgaaaccctgatcccagtggaggctgtaacccacctgcccccgcaccacccccctgacccctgttaccgcatttgtgtgtattaatgctgaagaattaaatgtttaaagagtttaaattttgaaggcgtttgctatatacagttgtcctgcattattataaagagttttcaggaagttaaaacccatc

SEQ ID NO: 321592 - DNA, 8015 bp, Homo sapiens
gggcacggccaggggctgcgcttcgccgcgggcgagctgatcacgctgctgcaggtcccggacggcggctggtgggaaggcgagaaggaggacgggctccgtggctggttcccggcgagctacgtgcagttgctggagaagcctggaatggtcccccctccgccgggagaagaaagccagacggtcatccttccacctggctggcagagctacctgtcgcctcagggccggcggtactatgtcaacacgaccaccaatgagaccacctgggaacgtcccagcagttctcctgggattccagccagccctggctctcacaggagctctctgcctccaacagtgaatggataccacgcatcagggaccccagcgcaccctccagagactgcccacatgagtgtccgaaaatccaccggtgattcccagaacctgggatcctcatcgccaagcaaaaagcagagcaaggaaaacaccatcacaataaactgtgtgacgttccctcacccagacacgatgccggaacagcagctgctgaaaccaaccgagtggagctactgcgactacttctgggctgataagaaggacccccaaggcaacggcaccgtggctgggtttgaactactgctccagaaacagctgaagggcaaacaaatgcagaaggaaatgtcagaattcatccgggaaaggataaagattgaagaagactatgcgaagaacttagctaagctctctcagaactccttggcttcacaggaggaaggctccttgggagaggcgtgggcccaggtgaagaagagcctggcggacgaagcagaagttcacctcaagttctctgccaagcttcacagcgaggtggagaagcccctgatgaacttccgtgagaacttcaagaaagacatgaagaagtgcgaccaccacattgccgaccttcgcaagcagctcgccagccgctatgcctcggtggagaaggcccggaaagccctcacagagcggcagagagacctggagatgaagacccagcagctggagatcaagctgagcaacaagacagaggaggacatcaagaaggcgcggagaaagtccacacaggctggagacgacctcatgcgctgtgtggatctctacaaccaggcccagtccaaatggtttgaagagatggtgaccaccacattggagctagagcggctggaggtggagagggtagagatgatccggcagcacctgtgccagtacacgcagctgcggcatgaaacagacatgttcaaccaaagcacagtcgagcccgtggatcagctgcttcgaaaagtggacccggccaaagacagggagctgtgggtcagagagcacaagacgggcaacatccgccctgtggacatggagatctagatgggcctgtgcagcttcggggggtcctgctggggaggggggctgggctcccaccatggggcccatgccgagtggatgccccccaccctctctcctgggccactgaggagaggggagagagctggtgattccagaagggtgacccggacagcctagctgggggctcccccatattcccaggcccagaagacagacccacagccctgcccttgtctctgaggctgaagaccccctgactcccatgctgtgcttgccgctctgaaacaaacagaggctggaactttgtggtccttgccgagttttgtaggggtcactgtcacatgcttgtgccctggaagccccaaggctcttcctccagctggctcccttgtctccagggctttggaggatcagggtagggagggctctgtctctaagccaggtgtcaggatcagaatcatgggtagaaggtgccattcagctcacagccgcacccagaatcctttgcagccctccttctttatttttttcccattgcattctgggagtccacatctggctttctcagccactgttcatcaccaggggttttaggaggaaggcttggctcctgtcttcccagacccaccatgcctggagaggtcaggatggaactacctcattcggcaaattagccccaaattgagcgctgaatcgtgtcccatgagatcaggcgccatctgtaaagtctcctctggaaatgccaatccatccttcccccagctgcttcctcggggaggcccctgcccccaccctgccagcccttcccagtctcattagaggaagctttccaaagttctcagttatcaagacctcatccagctcgtccaaaggcttcagggatggaaacaaaccagctcgtctcagaggccagcaagctggggcctgtccgccacggtgccctgtgcacctttgggctgccctggcccccactctcccgggccgcccaccacaggctcttaatggggccgggtcagtcctacatgtgagatgggttagggcaagtctttgccatcccccagatggctctgtcttcttgtgtatggcagggctgggactgctgtcccttgtacagttttctgtcactggtgggcactggacaggcatagcagactctcttgtggccacactaggttgtcgcctttcaggcagtgtcccgccacctttgcttcccgctccttctggacattccagagccctgcaccaaacccttacttggtgtctgcacctcctttccctctctccatcttccaatccctggaaaagtctggtctgagtgtgacttgggaagctttcagtgctgctgtttggcccagctcattactttctccctttctctaccacagcaaacacattctccaccatgtcagtctaaagagtctaaaggggccgggagaagcatgagcgaggggcagattctagtcgggagcccatgccctggaaatccatctttcttcatctttcccattgaccactttgggtttgacctgcacatctgcagtgagggcagaattcaacaagcacaactcactggtctttcagtcaacgtgctagaaaccgatgacttattaatctctaattttttggcgcctctttcattgaatgagaattgctttcgtatagttcacattagaaaaatgcctaatatactaaagtaaaccaaacgttgtcacttttctcttgttcttgaaacattgcaaccaaaaaggtcagcacaaaggccttcacctacgtgaagacctcctggtaggatctgtccatgggatggagaaccactctgtccagatctggggttgggtcatgacaccagctaccaattttagaatattatttcttggtttctttatgaaaaatgggtgctagtggtaattgctttgtggcttagtaaactactctgtggatgatttccaaacattcaaagccaatagccttgttattaacaagatattttgagtacaatatggctcattgacttttccattacatctgaggattccagagtcctctgttcatccctgggatagagtgagccctcttgcgtcttccagggtagctcaggttggcccagtttgggccagtccatttttggaggtcactctttcccccctcatcccctcacctccttctctttacccccttcacgtacttcctttctttcttccctctgttattcattcatcaagcaggttaaagccattgtgctaagatctaatctgaggacactataatggccctgtcgtcagggaagcccgtgatcgctcgttttcaggggtcttaccggtcagcaaccttggcattgatacataggcactctacagaatttaagttttcagaggtaagtctgttgttctgattaatctgcattcattcagcgaatgctcaagacaagccaggcatgctgagaagcggcgctctagttgtatgtaagatgggcattcctctgctctcctctattctccatgtcgactgagaagagtataataagaacattgtaccctctccacacttaaccctctgggattctttattataatataaaccaccgtcgtgaggcatttacctgttggatggaaggtagacagcaacaagattttaatcacctggtcaccagaccctcacggcccatatccaattcgaatttcagaaatttctctgtttgctttaaataactctttacaaataagggtcgggcacggtggctcacgcctgtaatcccagctctttgggaggccgaggtgggcagatcacgaggtcaggagatcgagaccatcctggctaacatggtgaaaccccgtctctgctaaaaatacaaaaaattagccagatgtggtggtgcacacctgtagtcccaactattcggcaggctgaggcagtagaatcgcttgaacctgggaggcggagattgcagtgaaccaagatcgggccactgcactccagcttgggtgacagagcaagactccatctcaaaaaaattataaataactctttgcaaataggaaagtgaagctcaagggtaaccagtgaggctatgaaattgccagtgaattaagaccagggctagagtcaacagtccagaacccctatccgtatgaacaggggcccgtttctggttgaaatcaaggttaggatgcaactgagaaaataaaagactgcactttggagaggcaagcacgctatccgggttgttgttttgttttatgtcttggtgcttaggtgaggacttagctgggtttattcaaagtgggcgggtctgggctattcttgagaatgtcccttccatttctgagaacaagtcagccccttctacctgcctccacccaggagactgatgcacaagatctgtttgtgaaagcctgatttaaaaagaaaaaaaaaattccttaagccaaatggtgttccaagttggttgctgtgacaacctccaggaagagccacttgttaccctctattctttctagtgctttcagtcagtggcaacacataggccccttggaccgtggggatggcggccctgagattctgtcagtgggaccaccctgggcctcctttctacctccactcagcaccctgttggccaaggagaatttctgcggtgggaggcagtgctctgctagtcaggattgataaacagctgggcacaccgaaacagtgtaccaacgaattcaccaaccaggggtttctttccctaccctttgtgaaaaccaatcaattactagatgagtggatggatgcagaaaaatctgggctgagccaaagtcccttttggaaatacaagccataacattcgaaggacatcagcgaccttggcttgtttaggtgattttacttccagctgcaggtagtcttgacaaggagtgtttaaacagaaggctcaagatgcattccttgtgtaggtgggagagagcacttctaatgttaagtggggtacagatcagctgcccccccacgtagcctggacatcgtcttatccccataatccttgccatccctacaaggcccatcgccaccaccttttcccaggtttattgaggtatgattgacatccagtaaaattcaccctttggaaatatacagctctgtgaattttgacaaatttagtgtcttgtgaccatcaccaagatcaacctgtttttaaccctccaaaaaattcccttctcctgccctctttccctggcaaccctgattgattatctgatcctataattttgccttttctagaatgtcatataaatggagtcacactgatgtcgccttttgagtctggcatctttccctcagcttaatgcttttgagtcattcatgatgtgtgcgtgtggtttgttccttctccttgccgggaagtatttcattgcatgggcgtactactctgcttctttatttttacactgagcctttcgccctggaagttcttggcccagggtcttcaacttgtttgcacgaccacttccagcttgctgcttccttcagttccccaggctcctcctccaaatgccagctgtgcccacaagctgttcttagggctcacactcgccttttggcgcgtggtgggtttttggtagtgcagaaagaatccagggatgggaggggaagggacggatgggtgctcaattgctgctcacgtctgctgcaacctgaagcttgcatctcagccagcagatctgctcccttctgggacccaggcttcagtgtcacacggtccttggctatgtattgggcgttggaggctttgaaaggcgagcagaagcagcatggacaagaaggctggggctggccctggggctcatcatgatgctttcctggatctgttgcttcatctgcaagctgagggtgtttgttctagatgagtgtctcaggccaccggcaactgcatgtacctcctccctttctcatttccaatgatgtaccctgtacacgtgttcatgctgtgtctggctctcatctgcacaatcgtgcatagaattgcctcaagtcctggtgagagagatgccgtggtacttttccatttagattcaaatggagctaaaattaagagttttatgagctgttaagaatgaggtagtttctcctaggaccccccaaagacagtgcaagtaatgaccgtttggatctcattcgtcgatctttgatagtatgttctggagtctactccccaggagccaggacaggcgtgaagatggagtccttgtcgcagctggagccttgcctagctggtgatcacacagcctggcctgtacctgcaccccactggatggtggtacatggtggcagggacaggaccacacccagttaaggccagaccaggctgagtgtgacccctgaggtaaacactccactaagctgtgtcttgttcatgccccctgctcagtgaaaggtgagtcccgagaccagttgggtacctctctatgcgaaccagagacatttctggatccaggccaggtgaagattagggccaggaagcctgagcccccggggcctcaaggtagggagccgaagaggctgccaggactctgctgggttgaaatttgccggggaggactcttgtctccccctcaggagtatttttgttgaggctttcctggaggtgaagaagcaattcccattgcagcaggttagagcgagaatcagacagagggcaaaaaccaattcgcttctccccacgttctaaatgctggggcatggctgtcaggagggcttcctgggaggtgtctctgggggtggggtgaggttggggcgatggcctttggagattgcgtgtggtgttcaggactgttccttggtgtttgagggaaactttagtgggattgcagtggaatgtaaggtcagggcacgtgggtgctctctcggggtggggtgactgggagacctagagggaaagcctgctatgcagggggagagcacaggactggccctgctctgcggcctcctttgtcccataacctgaagttaagtcacatcccctgtcgggacctccgtgcactcatctgtcaagtgggggcgcttcccttccagcatcacctgcagcagacgggctctcgggagtcgtgggttccaggcagctgtgtggacccagggacagacattcaaagggacgccagccatccttggtgacaggggccccaacttagcatcccttcccttccgttaggaaggagatgaccggaagcaaccccttcacagacacgagcacatcggcaaaccctatgaaagtggaattttctaacaaaataaacttgcttgtttgatctgttttctgtaacttttgctaaatactttatacatttttcatgttaaagagccgtgtctcccgccagcactcctcaccccggtatgaatgtgtttcctccacattgtatatccttccaccctctggctgcctagatcagtaaataaaattgatgtaatataatttataagtaacactgttgaaaccctgatcccagtggaggctgtaacccacctgcccccgcaccacccccctgacccctgttaccgcatttgtgtgtattaatgctgaagaattaaatgtttaaagagtttaaattttgaaggcgtttgctatatacagttgtcctgcattattataaagagttttcaggaagttaaaacccatc

SEQ ID NO: 321593 - DNA, 8187 bp, Homo sapiens
gtggtcatcccgcctcagccacctactacaggaccgccaagaaaagaagttcccaaaaccactcctagtgagcccaagaaaaagcagcctccaccaccagaatcaggtccagagcagagcaaacagaaaaaagtggctccccgcccaagtatccctgtaaaacaaaaaccaaaagaaaaggaaaaaccacctccggtcaataagcaggagaatgcaggcactttgaacatcctcagcactctctccaatggcaatagttctaagcaaaaaattccagcagatggagtccacaggatcagagtggactttaaagcctggaatggtcccccctccgccgggagaagaaagccagacggtcatccttccacctggctggcagagctacctgtcgcctcagggccggcggtactatgtcaacacgaccaccaatgagaccacctgggaacgtcccagcagttctcctgggattccagccagccctggctctcacaggagctctctgcctccaacagtgaatggataccacgcatcagggaccccagcgcaccctccagagactgcccacatgagtgtccgaaaatccaccggtgattcccagaacctgggatcctcatcgccaagcaaaaagcagagcaaggaaaacaccatcacaataaactgtgtgacgttccctcacccagacacgatgccggaacagcagctgctgaaaccaaccgagtggagctactgcgactacttctgggctgataagaaggacccccaaggcaacggcaccgtggctgggtttgaactactgctccagaaacagctgaagggcaaacaaatgcagaaggaaatgtcagaattcatccgggaaaggataaagattgaagaagactatgcgaagaacttagctaagctctctcagaactccttggcttcacaggaggaaggctccttgggagaggcgtgggcccaggtgaagaagagcctggcggacgaagcagaagttcacctcaagttctctgccaagcttcacagcgaggtggagaagcccctgatgaacttccgtgagaacttcaagaaagacatgaagaagtgcgaccaccacattgccgaccttcgcaagcagctcgccagccgctatgcctcggtggagaaggcccggaaagccctcacagagcggcagagagacctggagatgaagacccagcagctggagatcaagctgagcaacaagacagaggaggacatcaagaaggcgcggagaaagtccacacaggctggagacgacctcatgcgctgtgtggatctctacaaccaggcccagtccaaatggtttgaagagatggtgaccaccacattggagctagagcggctggaggtggagagggtagagatgatccggcagcacctgtgccagtacacgcagctgcggcatgaaacagacatgttcaaccaaagcacagtcgagcccgtggatcagctgcttcgaaaagtggacccggccaaagacagggagctgtgggtcagagagcacaagacgggcaacatccgccctgtggacatggagatctagatgggcctgtgcagcttcggggggtcctgctggggaggggggctgggctcccaccatggggcccatgccgagtggatgccccccaccctctctcctgggccactgaggagaggggagagagctggtgattccagaagggtgacccggacagcctagctgggggctcccccatattcccaggcccagaagacagacccacagccctgcccttgtctctgaggctgaagaccccctgactcccatgctgtgcttgccgctctgaaacaaacagaggctggaactttgtggtccttgccgagttttgtaggggtcactgtcacatgcttgtgccctggaagccccaaggctcttcctccagctggctcccttgtctccagggctttggaggatcagggtagggagggctctgtctctaagccaggtgtcaggatcagaatcatgggtagaaggtgccattcagctcacagccgcacccagaatcctttgcagccctccttctttatttttttcccattgcattctgggagtccacatctggctttctcagccactgttcatcaccaggggttttaggaggaaggcttggctcctgtcttcccagacccaccatgcctggagaggtcaggatggaactacctcattcggcaaattagccccaaattgagcgctgaatcgtgtcccatgagatcaggcgccatctgtaaagtctcctctggaaatgccaatccatccttcccccagctgcttcctcggggaggcccctgcccccaccctgccagcccttcccagtctcattagaggaagctttccaaagttctcagttatcaagacctcatccagctcgtccaaaggcttcagggatggaaacaaaccagctcgtctcagaggccagcaagctggggcctgtccgccacggtgccctgtgcacctttgggctgccctggcccccactctcccgggccgcccaccacaggctcttaatggggccgggtcagtcctacatgtgagatgggttagggcaagtctttgccatcccccagatggctctgtcttcttgtgtatggcagggctgggactgctgtcccttgtacagttttctgtcactggtgggcactggacaggcatagcagactctcttgtggccacactaggttgtcgcctttcaggcagtgtcccgccacctttgcttcccgctccttctggacattccagagccctgcaccaaacccttacttggtgtctgcacctcctttccctctctccatcttccaatccctggaaaagtctggtctgagtgtgacttgggaagctttcagtgctgctgtttggcccagctcattactttctccctttctctaccacagcaaacacattctccaccatgtcagtctaaagagtctaaaggggccgggagaagcatgagcgaggggcagattctagtcgggagcccatgccctggaaatccatctttcttcatctttcccattgaccactttgggtttgacctgcacatctgcagtgagggcagaattcaacaagcacaactcactggtctttcagtcaacgtgctagaaaccgatgacttattaatctctaattttttggcgcctctttcattgaatgagaattgctttcgtatagttcacattagaaaaatgcctaatatactaaagtaaaccaaacgttgtcacttttctcttgttcttgaaacattgcaaccaaaaaggtcagcacaaaggccttcacctacgtgaagacctcctggtaggatctgtccatgggatggagaaccactctgtccagatctggggttgggtcatgacaccagctaccaattttagaatattatttcttggtttctttatgaaaaatgggtgctagtggtaattgctttgtggcttagtaaactactctgtggatgatttccaaacattcaaagccaatagccttgttattaacaagatattttgagtacaatatggctcattgacttttccattacatctgaggattccagagtcctctgttcatccctgggatagagtgagccctcttgcgtcttccagggtagctcaggttggcccagtttgggccagtccatttttggaggtcactctttcccccctcatcccctcacctccttctctttacccccttcacgtacttcctttctttcttccctctgttattcattcatcaagcaggttaaagccattgtgctaagatctaatctgaggacactataatggccctgtcgtcagggaagcccgtgatcgctcgttttcaggggtcttaccggtcagcaaccttggcattgatacataggcactctacagaatttaagttttcagaggtaagtctgttgttctgattaatctgcattcattcagcgaatgctcaagacaagccaggcatgctgagaagcggcgctctagttgtatgtaagatgggcattcctctgctctcctctattctccatgtcgactgagaagagtataataagaacattgtaccctctccacacttaaccctctgggattctttattataatataaaccaccgtcgtgaggcatttacctgttggatggaaggtagacagcaacaagattttaatcacctggtcaccagaccctcacggcccatatccaattcgaatttcagaaatttctctgtttgctttaaataactctttacaaataagggtcgggcacggtggctcacgcctgtaatcccagctctttgggaggccgaggtgggcagatcacgaggtcaggagatcgagaccatcctggctaacatggtgaaaccccgtctctgctaaaaatacaaaaaattagccagatgtggtggtgcacacctgtagtcccaactattcggcaggctgaggcagtagaatcgcttgaacctgggaggcggagattgcagtgaaccaagatcgggccactgcactccagcttgggtgacagagcaagactccatctcaaaaaaattataaataactctttgcaaataggaaagtgaagctcaagggtaaccagtgaggctatgaaattgccagtgaattaagaccagggctagagtcaacagtccagaacccctatccgtatgaacaggggcccgtttctggttgaaatcaaggttaggatgcaactgagaaaataaaagactgcactttggagaggcaagcacgctatccgggttgttgttttgttttatgtcttggtgcttaggtgaggacttagctgggtttattcaaagtgggcgggtctgggctattcttgagaatgtcccttccatttctgagaacaagtcagccccttctacctgcctccacccaggagactgatgcacaagatctgtttgtgaaagcctgatttaaaaagaaaaaaaaaattccttaagccaaatggtgttccaagttggttgctgtgacaacctccaggaagagccacttgttaccctctattctttctagtgctttcagtcagtggcaacacataggccccttggaccgtggggatggcggccctgagattctgtcagtgggaccaccctgggcctcctttctacctccactcagcaccctgttggccaaggagaatttctgcggtgggaggcagtgctctgctagtcaggattgataaacagctgggcacaccgaaacagtgtaccaacgaattcaccaaccaggggtttctttccctaccctttgtgaaaaccaatcaattactagatgagtggatggatgcagaaaaatctgggctgagccaaagtcccttttggaaatacaagccataacattcgaaggacatcagcgaccttggcttgtttaggtgattttacttccagctgcaggtagtcttgacaaggagtgtttaaacagaaggctcaagatgcattccttgtgtaggtgggagagagcacttctaatgttaagtggggtacagatcagctgcccccccacgtagcctggacatcgtcttatccccataatccttgccatccctacaaggcccatcgccaccaccttttcccaggtttattgaggtatgattgacatccagtaaaattcaccctttggaaatatacagctctgtgaattttgacaaatttagtgtcttgtgaccatcaccaagatcaacctgtttttaaccctccaaaaaattcccttctcctgccctctttccctggcaaccctgattgattatctgatcctataattttgccttttctagaatgtcatataaatggagtcacactgatgtcgccttttgagtctggcatctttccctcagcttaatgcttttgagtcattcatgatgtgtgcgtgtggtttgttccttctccttgccgggaagtatttcattgcatgggcgtactactctgcttctttatttttacactgagcctttcgccctggaagttcttggcccagggtcttcaacttgtttgcacgaccacttccagcttgctgcttccttcagttccccaggctcctcctccaaatgccagctgtgcccacaagctgttcttagggctcacactcgccttttggcgcgtggtgggtttttggtagtgcagaaagaatccagggatgggaggggaagggacggatgggtgctcaattgctgctcacgtctgctgcaacctgaagcttgcatctcagccagcagatctgctcccttctgggacccaggcttcagtgtcacacggtccttggctatgtattgggcgttggaggctttgaaaggcgagcagaagcagcatggacaagaaggctggggctggccctggggctcatcatgatgctttcctggatctgttgcttcatctgcaagctgagggtgtttgttctagatgagtgtctcaggccaccggcaactgcatgtacctcctccctttctcatttccaatgatgtaccctgtacacgtgttcatgctgtgtctggctctcatctgcacaatcgtgcatagaattgcctcaagtcctggtgagagagatgccgtggtacttttccatttagattcaaatggagctaaaattaagagttttatgagctgttaagaatgaggtagtttctcctaggaccccccaaagacagtgcaagtaatgaccgtttggatctcattcgtcgatctttgatagtatgttctggagtctactccccaggagccaggacaggcgtgaagatggagtccttgtcgcagctggagccttgcctagctggtgatcacacagcctggcctgtacctgcaccccactggatggtggtacatggtggcagggacaggaccacacccagttaaggccagaccaggctgagtgtgacccctgaggtaaacactccactaagctgtgtcttgttcatgccccctgctcagtgaaaggtgagtcccgagaccagttgggtacctctctatgcgaaccagagacatttctggatccaggccaggtgaagattagggccaggaagcctgagcccccggggcctcaaggtagggagccgaagaggctgccaggactctgctgggttgaaatttgccggggaggactcttgtctccccctcaggagtatttttgttgaggctttcctggaggtgaagaagcaattcccattgcagcaggttagagcgagaatcagacagagggcaaaaaccaattcgcttctccccacgttctaaatgctggggcatggctgtcaggagggcttcctgggaggtgtctctgggggtggggtgaggttggggcgatggcctttggagattgcgtgtggtgttcaggactgttccttggtgtttgagggaaactttagtgggattgcagtggaatgtaaggtcagggcacgtgggtgctctctcggggtggggtgactgggagacctagagggaaagcctgctatgcagggggagagcacaggactggccctgctctgcggcctcctttgtcccataacctgaagttaagtcacatcccctgtcgggacctccgtgcactcatctgtcaagtgggggcgcttcccttccagcatcacctgcagcagacgggctctcgggagtcgtgggttccaggcagctgtgtggacccagggacagacattcaaagggacgccagccatccttggtgacaggggccccaacttagcatcccttcccttccgttaggaaggagatgaccggaagcaaccccttcacagacacgagcacatcggcaaaccctatgaaagtggaattttctaacaaaataaacttgcttgtttgatctgttttctgtaacttttgctaaatactttatacatttttcatgttaaagagccgtgtctcccgccagcactcctcaccccggtatgaatgtgtttcctccacattgtatatccttccaccctctggctgcctagatcagtaaataaaattgatgtaatataatttataagtaacactgttgaaaccctgatcccagtggaggctgtaacccacctgcccccgcaccacccccctgacccctgttaccgcatttgtgtgtattaatgctgaagaattaaatgtttaaagagtttaaattttgaaggcgtttgctatatacagttgtcctgcattattataaagagttttcaggaagttaaaacccatc

SEQ ID NO: 321594 - DNA, 8105 bp, Homo sapiens
agaaacattgcatctggaaagtccagaacaagttgttaatttcccagcaagcactggagcggatttggaaggaactatgcaatgtagtgggttctttgtgaaagaacagcaatgagcaaagccacaggaacctccgctggggtgcccagaacactggccctgggctagcgacttgcctcagccccatttcccggagaggctgccatgaagaggaagccggcggagtcttggtgctgagtctgagggcttcaggcaggacccaagactctcctctgaggtagcagcccccagagaaggttagctgttctctgatgaagcctggaatggtcccccctccgccgggagaagaaagccagacggtcatccttccacctggctggcagagctacctgtcgcctcagggccggcggtactatgtcaacacgaccaccaatgagaccacctgggaacgtcccagcagttctcctgggattccagccagccctggctctcacaggagctctctgcctccaacagaacctgggatcctcatcgccaagcaaaaagcagagcaaggaaaacaccatcacaataaactgtgtgacgttccctcacccagacacgatgccggaacagcagctgctgaaaccaaccgagtggagctactgcgactacttctgggctgataagaaggacccccaaggcaacggcaccgtggctgggtttgaactactgctccagaaacagctgaagggcaaacaaatgcagaaggaaatgtcagaattcatccgggaaaggataaagattgaagaagactatgcgaagaacttagctaagctctctcagaactccttggcttcacaggaggaaggctccttgggagaggcgtgggcccaggtgaagaagagcctggcggacgaagcagaagttcacctcaagttctctgccaagcttcacagcgaggtggagaagcccctgatgaacttccgtgagaacttcaagaaagacatgaagaagtgcgaccaccacattgccgaccttcgcaagcagctcgccagccgctatgcctcggtggagaaggcccggaaagccctcacagagcggcagagagacctggagatgaagacccagcagctggagatcaagctgagcaacaagacagaggaggacatcaagaaggcgcggagaaagtccacacaggctggagacgacctcatgcgctgtgtggatctctacaaccaggcccagtccaaatggtttgaagagatggtgaccaccacattggagctagagcggctggaggtggagagggtagagatgatccggcagcacctgtgccagtacacgcagctgcggcatgaaacagacatgttcaaccaaagcacagtcgagcccgtggatcagctgcttcgaaaagtggacccggccaaagacagggagctgtgggtcagagagcacaagacgggcaacatccgccctgtggacatggagatctagatgggcctgtgcagcttcggggggtcctgctggggaggggggctgggctcccaccatggggcccatgccgagtggatgccccccaccctctctcctgggccactgaggagaggggagagagctggtgattccagaagggtgacccggacagcctagctgggggctcccccatattcccaggcccagaagacagacccacagccctgcccttgtctctgaggctgaagaccccctgactcccatgctgtgcttgccgctctgaaacaaacagaggctggaactttgtggtccttgccgagttttgtaggggtcactgtcacatgcttgtgccctggaagccccaaggctcttcctccagctggctcccttgtctccagggctttggaggatcagggtagggagggctctgtctctaagccaggtgtcaggatcagaatcatgggtagaaggtgccattcagctcacagccgcacccagaatcctttgcagccctccttctttatttttttcccattgcattctgggagtccacatctggctttctcagccactgttcatcaccaggggttttaggaggaaggcttggctcctgtcttcccagacccaccatgcctggagaggtcaggatggaactacctcattcggcaaattagccccaaattgagcgctgaatcgtgtcccatgagatcaggcgccatctgtaaagtctcctctggaaatgccaatccatccttcccccagctgcttcctcggggaggcccctgcccccaccctgccagcccttcccagtctcattagaggaagctttccaaagttctcagttatcaagacctcatccagctcgtccaaaggcttcagggatggaaacaaaccagctcgtctcagaggccagcaagctggggcctgtccgccacggtgccctgtgcacctttgggctgccctggcccccactctcccgggccgcccaccacaggctcttaatggggccgggtcagtcctacatgtgagatgggttagggcaagtctttgccatcccccagatggctctgtcttcttgtgtatggcagggctgggactgctgtcccttgtacagttttctgtcactggtgggcactggacaggcatagcagactctcttgtggccacactaggttgtcgcctttcaggcagtgtcccgccacctttgcttcccgctccttctggacattccagagccctgcaccaaacccttacttggtgtctgcacctcctttccctctctccatcttccaatccctggaaaagtctggtctgagtgtgacttgggaagctttcagtgctgctgtttggcccagctcattactttctccctttctctaccacagcaaacacattctccaccatgtcagtctaaagagtctaaaggggccgggagaagcatgagcgaggggcagattctagtcgggagcccatgccctggaaatccatctttcttcatctttcccattgaccactttgggtttgacctgcacatctgcagtgagggcagaattcaacaagcacaactcactggtctttcagtcaacgtgctagaaaccgatgacttattaatctctaattttttggcgcctctttcattgaatgagaattgctttcgtatagttcacattagaaaaatgcctaatatactaaagtaaaccaaacgttgtcacttttctcttgttcttgaaacattgcaaccaaaaaggtcagcacaaaggccttcacctacgtgaagacctcctggtaggatctgtccatgggatggagaaccactctgtccagatctggggttgggtcatgacaccagctaccaattttagaatattatttcttggtttctttatgaaaaatgggtgctagtggtaattgctttgtggcttagtaaactactctgtggatgatttccaaacattcaaagccaatagccttgttattaacaagatattttgagtacaatatggctcattgacttttccattacatctgaggattccagagtcctctgttcatccctgggatagagtgagccctcttgcgtcttccagggtagctcaggttggcccagtttgggccagtccatttttggaggtcactctttcccccctcatcccctcacctccttctctttacccccttcacgtacttcctttctttcttccctctgttattcattcatcaagcaggttaaagccattgtgctaagatctaatctgaggacactataatggccctgtcgtcagggaagcccgtgatcgctcgttttcaggggtcttaccggtcagcaaccttggcattgatacataggcactctacagaatttaagttttcagaggtaagtctgttgttctgattaatctgcattcattcagcgaatgctcaagacaagccaggcatgctgagaagcggcgctctagttgtatgtaagatgggcattcctctgctctcctctattctccatgtcgactgagaagagtataataagaacattgtaccctctccacacttaaccctctgggattctttattataatataaaccaccgtcgtgaggcatttacctgttggatggaaggtagacagcaacaagattttaatcacctggtcaccagaccctcacggcccatatccaattcgaatttcagaaatttctctgtttgctttaaataactctttacaaataagggtcgggcacggtggctcacgcctgtaatcccagctctttgggaggccgaggtgggcagatcacgaggtcaggagatcgagaccatcctggctaacatggtgaaaccccgtctctgctaaaaatacaaaaaattagccagatgtggtggtgcacacctgtagtcccaactattcggcaggctgaggcagtagaatcgcttgaacctgggaggcggagattgcagtgaaccaagatcgggccactgcactccagcttgggtgacagagcaagactccatctcaaaaaaattataaataactctttgcaaataggaaagtgaagctcaagggtaaccagtgaggctatgaaattgccagtgaattaagaccagggctagagtcaacagtccagaacccctatccgtatgaacaggggcccgtttctggttgaaatcaaggttaggatgcaactgagaaaataaaagactgcactttggagaggcaagcacgctatccgggttgttgttttgttttatgtcttggtgcttaggtgaggacttagctgggtttattcaaagtgggcgggtctgggctattcttgagaatgtcccttccatttctgagaacaagtcagccccttctacctgcctccacccaggagactgatgcacaagatctgtttgtgaaagcctgatttaaaaagaaaaaaaaaattccttaagccaaatggtgttccaagttggttgctgtgacaacctccaggaagagccacttgttaccctctattctttctagtgctttcagtcagtggcaacacataggccccttggaccgtggggatggcggccctgagattctgtcagtgggaccaccctgggcctcctttctacctccactcagcaccctgttggccaaggagaatttctgcggtgggaggcagtgctctgctagtcaggattgataaacagctgggcacaccgaaacagtgtaccaacgaattcaccaaccaggggtttctttccctaccctttgtgaaaaccaatcaattactagatgagtggatggatgcagaaaaatctgggctgagccaaagtcccttttggaaatacaagccataacattcgaaggacatcagcgaccttggcttgtttaggtgattttacttccagctgcaggtagtcttgacaaggagtgtttaaacagaaggctcaagatgcattccttgtgtaggtgggagagagcacttctaatgttaagtggggtacagatcagctgcccccccacgtagcctggacatcgtcttatccccataatccttgccatccctacaaggcccatcgccaccaccttttcccaggtttattgaggtatgattgacatccagtaaaattcaccctttggaaatatacagctctgtgaattttgacaaatttagtgtcttgtgaccatcaccaagatcaacctgtttttaaccctccaaaaaattcccttctcctgccctctttccctggcaaccctgattgattatctgatcctataattttgccttttctagaatgtcatataaatggagtcacactgatgtcgccttttgagtctggcatctttccctcagcttaatgcttttgagtcattcatgatgtgtgcgtgtggtttgttccttctccttgccgggaagtatttcattgcatgggcgtactactctgcttctttatttttacactgagcctttcgccctggaagttcttggcccagggtcttcaacttgtttgcacgaccacttccagcttgctgcttccttcagttccccaggctcctcctccaaatgccagctgtgcccacaagctgttcttagggctcacactcgccttttggcgcgtggtgggtttttggtagtgcagaaagaatccagggatgggaggggaagggacggatgggtgctcaattgctgctcacgtctgctgcaacctgaagcttgcatctcagccagcagatctgctcccttctgggacccaggcttcagtgtcacacggtccttggctatgtattgggcgttggaggctttgaaaggcgagcagaagcagcatggacaagaaggctggggctggccctggggctcatcatgatgctttcctggatctgttgcttcatctgcaagctgagggtgtttgttctagatgagtgtctcaggccaccggcaactgcatgtacctcctccctttctcatttccaatgatgtaccctgtacacgtgttcatgctgtgtctggctctcatctgcacaatcgtgcatagaattgcctcaagtcctggtgagagagatgccgtggtacttttccatttagattcaaatggagctaaaattaagagttttatgagctgttaagaatgaggtagtttctcctaggaccccccaaagacagtgcaagtaatgaccgtttggatctcattcgtcgatctttgatagtatgttctggagtctactccccaggagccaggacaggcgtgaagatggagtccttgtcgcagctggagccttgcctagctggtgatcacacagcctggcctgtacctgcaccccactggatggtggtacatggtggcagggacaggaccacacccagttaaggccagaccaggctgagtgtgacccctgaggtaaacactccactaagctgtgtcttgttcatgccccctgctcagtgaaaggtgagtcccgagaccagttgggtacctctctatgcgaaccagagacatttctggatccaggccaggtgaagattagggccaggaagcctgagcccccggggcctcaaggtagggagccgaagaggctgccaggactctgctgggttgaaatttgccggggaggactcttgtctccccctcaggagtatttttgttgaggctttcctggaggtgaagaagcaattcccattgcagcaggttagagcgagaatcagacagagggcaaaaaccaattcgcttctccccacgttctaaatgctggggcatggctgtcaggagggcttcctgggaggtgtctctgggggtggggtgaggttggggcgatggcctttggagattgcgtgtggtgttcaggactgttccttggtgtttgagggaaactttagtgggattgcagtggaatgtaaggtcagggcacgtgggtgctctctcggggtggggtgactgggagacctagagggaaagcctgctatgcagggggagagcacaggactggccctgctctgcggcctcctttgtcccataacctgaagttaagtcacatcccctgtcgggacctccgtgcactcatctgtcaagtgggggcgcttcccttccagcatcacctgcagcagacgggctctcgggagtcgtgggttccaggcagctgtgtggacccagggacagacattcaaagggacgccagccatccttggtgacaggggccccaacttagcatcccttcccttccgttaggaaggagatgaccggaagcaaccccttcacagacacgagcacatcggcaaaccctatgaaagtggaattttctaacaaaataaacttgcttgtttgatctgttttctgtaacttttgctaaatactttatacatttttcatgttaaagagccgtgtctcccgccagcactcctcaccccggtatgaatgtgtttcctccacattgtatatccttccaccctctggctgcctagatcagtaaataaaattgatgtaatataatttataagtaacactgttgaaaccctgatcccagtggaggctgtaacccacctgcccccgcaccacccccctgacccctgttaccgcatttgtgtgtattaatgctgaagaattaaatgtttaaagagtttaaattttgaaggcgtttgctatatacagttgtcctgcattattataaagagttttcaggaagttaaaacccatc

SEQ ID NO: 321595 - DNA, 7289 bp, Homo sapiens
agaaacattgcatctggaaagtccagaacaagttgttaatttcccagcaagcactggagcggatttggaaggaactatgcaatgtagtgggttctttgtgaaagaacagcaatgagcaaagccacaggaacctccgctggggtgcccagaacactggccctgggctagcgacttgcctcagccccatttcccggagaggctgccatgaagaggaagccggcggagtcttggtgctgagtctgagggcttcaggcaggacccaagactctcctctgaggtagcagcccccagagaaggttagctgttctctgatgaagcctggaatggtcccccctccgccgggagaagaaagccagacggtcatccttccacctggctggcagagctacctgtcgcctcagggccggcggtactatgtcaacacgaccaccaatgagaccacctgggaacgtcccagcagttctcctgggattccagccagccctggctctcacaggagctctctgcctccaacagtgaatggataccacgcatcagggaccccagcgcaccctccagagactgcccacatgagtgtccgaaaatccaccggtgattcccagaacctgggatcctcatcgccaagcaaaaagcagagcaaggaaaacaccatcacaataaactgtgtgacgttccctcacccagacacgatgccggaacagcagctgctgaaaccaaccgagtggagctactgcgactacttctgggctgataagaaggacccccaaggcaacggcaccgtggctgggtttgaactactgctccagaaacagctgaagggcaaacaaatgcagaaggaaatgtcagaattcatccgggaaaggataaagattgaagaagactatgcgaagaacttagctaagctctctcagaactccttggcttcacaggaggaaggctccttgggagaggcgtgggcccaggtgaagaagagcctggcggacgaagcagaagttcacctcaagttctctgccaagcttcacagcgaggtggagaagcccctgatgaacttccgtgagaacttcaagaaagacatgaagaagtgcgaccaccacattgccgaccttcgcaagcagctcgccagccgctatgcctcggtggagaaggcccggaaagccctcacagagcggcagagagacctggagatgaagacccagcagctggagatcaagctgagcaacaagacagaggaggacatcaagaaggcgcggagaaagtccacacaggctggagacgacctcatgcgctgtgtggatctctacaaccaggcccagtccaaatggtttgaagagatggtgaccaccacattggagctagagcggctggaggtggagagggtagagatgatccggcagcacctgtgccagtacacgcagctgcggcatgaaacagacatgttcaaccaaagcacagtcgagcccgtggatcagctgcttcgaaaagtggacccggccaaagacagggagctgtgggtcagagagcacaagacgggcaacatccgccctgtggacatggagatctagatgggcctgtgcagcttcggggggtcctgctggggaggggggctgggctcccaccatggggcccatgccgagtggatgccccccaccctctctcctgggccactgaggagaggggagagagctggtgattccagaaggatggctctgtcttcttgtgtatggcagggctgggactgctgtcccttgtacagttttctgtcactggtgggcactggacaggcatagcagactctcttgtggccacactaggttgtcgcctttcaggcagtgtcccgccacctttgcttcccgctccttctggacattccagagccctgcaccaaacccttacttggtgtctgcacctcctttccctctctccatcttccaatccctggaaaagtctggtctgagtgtgacttgggaagctttcagtgctgctgtttggcccagctcattactttctccctttctctaccacagcaaacacattctccaccatgtcagtctaaagagtctaaaggggccgggagaagcatgagcgaggggcagattctagtcgggagcccatgccctggaaatccatctttcttcatctttcccattgaccactttgggtttgacctgcacatctgcagtgagggcagaattcaacaagcacaactcactggtctttcagtcaacgtgctagaaaccgatgacttattaatctctaattttttggcgcctctttcattgaatgagaattgctttcgtatagttcacattagaaaaatgcctaatatactaaagtaaaccaaacgttgtcacttttctcttgttcttgaaacattgcaaccaaaaaggtcagcacaaaggccttcacctacgtgaagacctcctggtaggatctgtccatgggatggagaaccactctgtccagatctggggttgggtcatgacaccagctaccaattttagaatattatttcttggtttctttatgaaaaatgggtgctagtggtaattgctttgtggcttagtaaactactctgtggatgatttccaaacattcaaagccaatagccttgttattaacaagatattttgagtacaatatggctcattgacttttccattacatctgaggattccagagtcctctgttcatccctgggatagagtgagccctcttgcgtcttccagggtagctcaggttggcccagtttgggccagtccatttttggaggtcactctttcccccctcatcccctcacctccttctctttacccccttcacgtacttcctttctttcttccctctgttattcattcatcaagcaggttaaagccattgtgctaagatctaatctgaggacactataatggccctgtcgtcagggaagcccgtgatcgctcgttttcaggggtcttaccggtcagcaaccttggcattgatacataggcactctacagaatttaagttttcagaggtaagtctgttgttctgattaatctgcattcattcagcgaatgctcaagacaagccaggcatgctgagaagcggcgctctagttgtatgtaagatgggcattcctctgctctcctctattctccatgtcgactgagaagagtataataagaacattgtaccctctccacacttaaccctctgggattctttattataatataaaccaccgtcgtgaggcatttacctgttggatggaaggtagacagcaacaagattttaatcacctggtcaccagaccctcacggcccatatccaattcgaatttcagaaatttctctgtttgctttaaataactctttacaaataagggtcgggcacggtggctcacgcctgtaatcccagctctttgggaggccgaggtgggcagatcacgaggtcaggagatcgagaccatcctggctaacatggtgaaaccccgtctctgctaaaaatacaaaaaattagccagatgtggtggtgcacacctgtagtcccaactattcggcaggctgaggcagtagaatcgcttgaacctgggaggcggagattgcagtgaaccaagatcgggccactgcactccagcttgggtgacagagcaagactccatctcaaaaaaattataaataactctttgcaaataggaaagtgaagctcaagggtaaccagtgaggctatgaaattgccagtgaattaagaccagggctagagtcaacagtccagaacccctatccgtatgaacaggggcccgtttctggttgaaatcaaggttaggatgcaactgagaaaataaaagactgcactttggagaggcaagcacgctatccgggttgttgttttgttttatgtcttggtgcttaggtgaggacttagctgggtttattcaaagtgggcgggtctgggctattcttgagaatgtcccttccatttctgagaacaagtcagccccttctacctgcctccacccaggagactgatgcacaagatctgtttgtgaaagcctgatttaaaaagaaaaaaaaaattccttaagccaaatggtgttccaagttggttgctgtgacaacctccaggaagagccacttgttaccctctattctttctagtgctttcagtcagtggcaacacataggccccttggaccgtggggatggcggccctgagattctgtcagtgggaccaccctgggcctcctttctacctccactcagcaccctgttggccaaggagaatttctgcggtgggaggcagtgctctgctagtcaggattgataaacagctgggcacaccgaaacagtgtaccaacgaattcaccaaccaggggtttctttccctaccctttgtgaaaaccaatcaattactagatgagtggatggatgcagaaaaatctgggctgagccaaagtcccttttggaaatacaagccataacattcgaaggacatcagcgaccttggcttgtttaggtgattttacttccagctgcaggtagtcttgacaaggagtgtttaaacagaaggctcaagatgcattccttgtgtaggtgggagagagcacttctaatgttaagtggggtacagatcagctgcccccccacgtagcctggacatcgtcttatccccataatccttgccatccctacaaggcccatcgccaccaccttttcccaggtttattgaggtatgattgacatccagtaaaattcaccctttggaaatatacagctctgtgaattttgacaaatttagtgtcttgtgaccatcaccaagatcaacctgtttttaaccctccaaaaaattcccttctcctgccctctttccctggcaaccctgattgattatctgatcctataattttgccttttctagaatgtcatataaatggagtcacactgatgtcgccttttgagtctggcatctttccctcagcttaatgcttttgagtcattcatgatgtgtgcgtgtggtttgttccttctccttgccgggaagtatttcattgcatgggcgtactactctgcttctttatttttacactgagcctttcgccctggaagttcttggcccagggtcttcaacttgtttgcacgaccacttccagcttgctgcttccttcagttccccaggctcctcctccaaatgccagctgtgcccacaagctgttcttagggctcacactcgccttttggcgcgtggtgggtttttggtagtgcagaaagaatccagggatgggaggggaagggacggatgggtgctcaattgctgctcacgtctgctgcaacctgaagcttgcatctcagccagcagatctgctcccttctgggacccaggcttcagtgtcacacggtccttggctatgtattgggcgttggaggctttgaaaggcgagcagaagcagcatggacaagaaggctggggctggccctggggctcatcatgatgctttcctggatctgttgcttcatctgcaagctgagggtgtttgttctagatgagtgtctcaggccaccggcaactgcatgtacctcctccctttctcatttccaatgatgtaccctgtacacgtgttcatgctgtgtctggctctcatctgcacaatcgtgcatagaattgcctcaagtcctggtgagagagatgccgtggtacttttccatttagattcaaatggagctaaaattaagagttttatgagctgttaagaatgaggtagtttctcctaggaccccccaaagacagtgcaagtaatgaccgtttggatctcattcgtcgatctttgatagtatgttctggagtctactccccaggagccaggacaggcgtgaagatggagtccttgtcgcagctggagccttgcctagctggtgatcacacagcctggcctgtacctgcaccccactggatggtggtacatggtggcagggacaggaccacacccagttaaggccagaccaggctgagtgtgacccctgaggtaaacactccactaagctgtgtcttgttcatgccccctgctcagtgaaaggtgagtcccgagaccagttgggtacctctctatgcgaaccagagacatttctggatccaggccaggtgaagattagggccaggaagcctgagcccccggggcctcaaggtagggagccgaagaggctgccaggactctgctgggttgaaatttgccggggaggactcttgtctccccctcaggagtatttttgttgaggctttcctggaggtgaagaagcaattcccattgcagcaggttagagcgagaatcagacagagggcaaaaaccaattcgcttctccccacgttctaaatgctggggcatggctgtcaggagggcttcctgggaggtgtctctgggggtggggtgaggttggggcgatggcctttggagattgcgtgtggtgttcaggactgttccttggtgtttgagggaaactttagtgggattgcagtggaatgtaaggtcagggcacgtgggtgctctctcggggtggggtgactgggagacctagagggaaagcctgctatgcagggggagagcacaggactggccctgctctgcggcctcctttgtcccataacctgaagttaagtcacatcccctgtcgggacctccgtgcactcatctgtcaagtgggggcgcttcccttccagcatcacctgcagcagacgggctctcgggagtcgtgggttccaggcagctgtgtggacccagggacagacattcaaagggacgccagccatccttggtgacaggggccccaacttagcatcccttcccttccgttaggaaggagatgaccggaagcaaccccttcacagacacgagcacatcggcaaaccctatgaaagtggaattttctaacaaaataaacttgcttgtttgatctgttttctgtaacttttgctaaatactttatacatttttcatgttaaagagccgtgtctcccgccagcactcctcaccccggtatgaatgtgtttcctccacattgtatatccttccaccctctggctgcctagatcagtaaataaaattgatgtaatataatttataagtaacactgttgaaaccctgatcccagtggaggctgtaacccacctgcccccgcaccacccccctgacccctgttaccgcatttgtgtgtattaatgctgaagaattaaatgtttaaagagtttaaattttgaaggcgtttgctatatacagttgtcctgcattattataaagagttttcaggaagttaaaacccatc

SEQ ID NO: 321596 - DNA, 7849 bp, Homo sapiens
agaaacattgcatctggaaagtccagaacaagttgttaatttcccagcaagcactggagcggatttggaaggaactatgcaatgtagtgggttctttgtgaaagaacagcaatgagcaaagccacaggaacctccgctggggtgcccagaacactggccctgggctagcgacttgcctcagccccatttcccggagaggctgccatgaagaggaagccggcggagtcttggtgctgagtctgagggcttcaggcaggacccaagactctcctctgaggtagcagcccccagagaaggttagctgttctctgatgataaactgtgtgacgttccctcacccagacacgatgccggaacagcagctgctgaaaccaaccgagtggagctactgcgactacttctgggctgataagaaggacccccaaggcaacggcaccgtggctgggtttgaactactgctccagaaacagctgaagggcaaacaaatgcagaaggaaatgtcagaattcatccgggaaaggataaagattgaagaagactatgcgaagaacttagctaagctctctcagaactccttggcttcacaggaggaaggctccttgggagaggcgtgggcccaggtgaagaagagcctggcggacgaagcagaagttcacctcaagttctctgccaagcttcacagcgaggtggagaagcccctgatgaacttccgtgagaacttcaagaaagacatgaagaagtgcgaccaccacattgccgaccttcgcaagcagctcgccagccgctatgcctcggtggagaaggcccggaaagccctcacagagcggcagagagacctggagatgaagacccagcagctggagatcaagctgagcaacaagacagaggaggacatcaagaaggcgcggagaaagtccacacaggctggagacgacctcatgcgctgtgtggatctctacaaccaggcccagtccaaatggtttgaagagatggtgaccaccacattggagctagagcggctggaggtggagagggtagagatgatccggcagcacctgtgccagtacacgcagctgcggcatgaaacagacatgttcaaccaaagcacagtcgagcccgtggatcagctgcttcgaaaagtggacccggccaaagacagggagctgtgggtcagagagcacaagacgggcaacatccgccctgtggacatggagatctagatgggcctgtgcagcttcggggggtcctgctggggaggggggctgggctcccaccatggggcccatgccgagtggatgccccccaccctctctcctgggccactgaggagaggggagagagctggtgattccagaagggtgacccggacagcctagctgggggctcccccatattcccaggcccagaagacagacccacagccctgcccttgtctctgaggctgaagaccccctgactcccatgctgtgcttgccgctctgaaacaaacagaggctggaactttgtggtccttgccgagttttgtaggggtcactgtcacatgcttgtgccctggaagccccaaggctcttcctccagctggctcccttgtctccagggctttggaggatcagggtagggagggctctgtctctaagccaggtgtcaggatcagaatcatgggtagaaggtgccattcagctcacagccgcacccagaatcctttgcagccctccttctttatttttttcccattgcattctgggagtccacatctggctttctcagccactgttcatcaccaggggttttaggaggaaggcttggctcctgtcttcccagacccaccatgcctggagaggtcaggatggaactacctcattcggcaaattagccccaaattgagcgctgaatcgtgtcccatgagatcaggcgccatctgtaaagtctcctctggaaatgccaatccatccttcccccagctgcttcctcggggaggcccctgcccccaccctgccagcccttcccagtctcattagaggaagctttccaaagttctcagttatcaagacctcatccagctcgtccaaaggcttcagggatggaaacaaaccagctcgtctcagaggccagcaagctggggcctgtccgccacggtgccctgtgcacctttgggctgccctggcccccactctcccgggccgcccaccacaggctcttaatggggccgggtcagtcctacatgtgagatgggttagggcaagtctttgccatcccccagatggctctgtcttcttgtgtatggcagggctgggactgctgtcccttgtacagttttctgtcactggtgggcactggacaggcatagcagactctcttgtggccacactaggttgtcgcctttcaggcagtgtcccgccacctttgcttcccgctccttctggacattccagagccctgcaccaaacccttacttggtgtctgcacctcctttccctctctccatcttccaatccctggaaaagtctggtctgagtgtgacttgggaagctttcagtgctgctgtttggcccagctcattactttctccctttctctaccacagcaaacacattctccaccatgtcagtctaaagagtctaaaggggccgggagaagcatgagcgaggggcagattctagtcgggagcccatgccctggaaatccatctttcttcatctttcccattgaccactttgggtttgacctgcacatctgcagtgagggcagaattcaacaagcacaactcactggtctttcagtcaacgtgctagaaaccgatgacttattaatctctaattttttggcgcctctttcattgaatgagaattgctttcgtatagttcacattagaaaaatgcctaatatactaaagtaaaccaaacgttgtcacttttctcttgttcttgaaacattgcaaccaaaaaggtcagcacaaaggccttcacctacgtgaagacctcctggtaggatctgtccatgggatggagaaccactctgtccagatctggggttgggtcatgacaccagctaccaattttagaatattatttcttggtttctttatgaaaaatgggtgctagtggtaattgctttgtggcttagtaaactactctgtggatgatttccaaacattcaaagccaatagccttgttattaacaagatattttgagtacaatatggctcattgacttttccattacatctgaggattccagagtcctctgttcatccctgggatagagtgagccctcttgcgtcttccagggtagctcaggttggcccagtttgggccagtccatttttggaggtcactctttcccccctcatcccctcacctccttctctttacccccttcacgtacttcctttctttcttccctctgttattcattcatcaagcaggttaaagccattgtgctaagatctaatctgaggacactataatggccctgtcgtcagggaagcccgtgatcgctcgttttcaggggtcttaccggtcagcaaccttggcattgatacataggcactctacagaatttaagttttcagaggtaagtctgttgttctgattaatctgcattcattcagcgaatgctcaagacaagccaggcatgctgagaagcggcgctctagttgtatgtaagatgggcattcctctgctctcctctattctccatgtcgactgagaagagtataataagaacattgtaccctctccacacttaaccctctgggattctttattataatataaaccaccgtcgtgaggcatttacctgttggatggaaggtagacagcaacaagattttaatcacctggtcaccagaccctcacggcccatatccaattcgaatttcagaaatttctctgtttgctttaaataactctttacaaataagggtcgggcacggtggctcacgcctgtaatcccagctctttgggaggccgaggtgggcagatcacgaggtcaggagatcgagaccatcctggctaacatggtgaaaccccgtctctgctaaaaatacaaaaaattagccagatgtggtggtgcacacctgtagtcccaactattcggcaggctgaggcagtagaatcgcttgaacctgggaggcggagattgcagtgaaccaagatcgggccactgcactccagcttgggtgacagagcaagactccatctcaaaaaaattataaataactctttgcaaataggaaagtgaagctcaagggtaaccagtgaggctatgaaattgccagtgaattaagaccagggctagagtcaacagtccagaacccctatccgtatgaacaggggcccgtttctggttgaaatcaaggttaggatgcaactgagaaaataaaagactgcactttggagaggcaagcacgctatccgggttgttgttttgttttatgtcttggtgcttaggtgaggacttagctgggtttattcaaagtgggcgggtctgggctattcttgagaatgtcccttccatttctgagaacaagtcagccccttctacctgcctccacccaggagactgatgcacaagatctgtttgtgaaagcctgatttaaaaagaaaaaaaaaattccttaagccaaatggtgttccaagttggttgctgtgacaacctccaggaagagccacttgttaccctctattctttctagtgctttcagtcagtggcaacacataggccccttggaccgtggggatggcggccctgagattctgtcagtgggaccaccctgggcctcctttctacctccactcagcaccctgttggccaaggagaatttctgcggtgggaggcagtgctctgctagtcaggattgataaacagctgggcacaccgaaacagtgtaccaacgaattcaccaaccaggggtttctttccctaccctttgtgaaaaccaatcaattactagatgagtggatggatgcagaaaaatctgggctgagccaaagtcccttttggaaatacaagccataacattcgaaggacatcagcgaccttggcttgtttaggtgattttacttccagctgcaggtagtcttgacaaggagtgtttaaacagaaggctcaagatgcattccttgtgtaggtgggagagagcacttctaatgttaagtggggtacagatcagctgcccccccacgtagcctggacatcgtcttatccccataatccttgccatccctacaaggcccatcgccaccaccttttcccaggtttattgaggtatgattgacatccagtaaaattcaccctttggaaatatacagctctgtgaattttgacaaatttagtgtcttgtgaccatcaccaagatcaacctgtttttaaccctccaaaaaattcccttctcctgccctctttccctggcaaccctgattgattatctgatcctataattttgccttttctagaatgtcatataaatggagtcacactgatgtcgccttttgagtctggcatctttccctcagcttaatgcttttgagtcattcatgatgtgtgcgtgtggtttgttccttctccttgccgggaagtatttcattgcatgggcgtactactctgcttctttatttttacactgagcctttcgccctggaagttcttggcccagggtcttcaacttgtttgcacgaccacttccagcttgctgcttccttcagttccccaggctcctcctccaaatgccagctgtgcccacaagctgttcttagggctcacactcgccttttggcgcgtggtgggtttttggtagtgcagaaagaatccagggatgggaggggaagggacggatgggtgctcaattgctgctcacgtctgctgcaacctgaagcttgcatctcagccagcagatctgctcccttctgggacccaggcttcagtgtcacacggtccttggctatgtattgggcgttggaggctttgaaaggcgagcagaagcagcatggacaagaaggctggggctggccctggggctcatcatgatgctttcctggatctgttgcttcatctgcaagctgagggtgtttgttctagatgagtgtctcaggccaccggcaactgcatgtacctcctccctttctcatttccaatgatgtaccctgtacacgtgttcatgctgtgtctggctctcatctgcacaatcgtgcatagaattgcctcaagtcctggtgagagagatgccgtggtacttttccatttagattcaaatggagctaaaattaagagttttatgagctgttaagaatgaggtagtttctcctaggaccccccaaagacagtgcaagtaatgaccgtttggatctcattcgtcgatctttgatagtatgttctggagtctactccccaggagccaggacaggcgtgaagatggagtccttgtcgcagctggagccttgcctagctggtgatcacacagcctggcctgtacctgcaccccactggatggtggtacatggtggcagggacaggaccacacccagttaaggccagaccaggctgagtgtgacccctgaggtaaacactccactaagctgtgtcttgttcatgccccctgctcagtgaaaggtgagtcccgagaccagttgggtacctctctatgcgaaccagagacatttctggatccaggccaggtgaagattagggccaggaagcctgagcccccggggcctcaaggtagggagccgaagaggctgccaggactctgctgggttgaaatttgccggggaggactcttgtctccccctcaggagtatttttgttgaggctttcctggaggtgaagaagcaattcccattgcagcaggttagagcgagaatcagacagagggcaaaaaccaattcgcttctccccacgttctaaatgctggggcatggctgtcaggagggcttcctgggaggtgtctctgggggtggggtgaggttggggcgatggcctttggagattgcgtgtggtgttcaggactgttccttggtgtttgagggaaactttagtgggattgcagtggaatgtaaggtcagggcacgtgggtgctctctcggggtggggtgactgggagacctagagggaaagcctgctatgcagggggagagcacaggactggccctgctctgcggcctcctttgtcccataacctgaagttaagtcacatcccctgtcgggacctccgtgcactcatctgtcaagtgggggcgcttcccttccagcatcacctgcagcagacgggctctcgggagtcgtgggttccaggcagctgtgtggacccagggacagacattcaaagggacgccagccatccttggtgacaggggccccaacttagcatcccttcccttccgttaggaaggagatgaccggaagcaaccccttcacagacacgagcacatcggcaaaccctatgaaagtggaattttctaacaaaataaacttgcttgtttgatctgttttctgtaacttttgctaaatactttatacatttttcatgttaaagagccgtgtctcccgccagcactcctcaccccggtatgaatgtgtttcctccacattgtatatccttccaccctctggctgcctagatcagtaaataaaattgatgtaatataatttataagtaacactgttgaaaccctgatcccagtggaggctgtaacccacctgcccccgcaccacccccctgacccctgttaccgcatttgtgtgtattaatgctgaagaattaaatgtttaaagagtttaaattttgaaggcgtttgctatatacagttgtcctgcattattataaagagttttcaggaagttaaaacccatc

SEQ ID NO: 321597 - DNA, 7042 bp, Homo sapiens
tagaatgtgtgccgtagtattagagtttggtctgtaggtccctttcacctcaatttctggtgaacctgttacaattccttcattatagaagaaagcagccaccttacatttcaaaataaggagacgacctcatgcgctgtgtggatctctacaaccaggcccagtccaaatggtttgaagagatggtgaccaccacattggagctagagcggctggaggtggagagggtagagatgatccggcagcacctgtgccagtacacgcagctgcggcatgaaacagacatgttcaaccaaagcacagtcgagcccgtggatcagctgcttcgaaaagtggacccggccaaagacagggagctgtgggtcagagagcacaagacgggcaacatccgccctgtggacatggagatctagatgggcctgtgcagcttcggggggtcctgctggggaggggggctgggctcccaccatggggcccatgccgagtggatgccccccaccctctctcctgggccactgaggagaggggagagagctggtgattccagaagggtgacccggacagcctagctgggggctcccccatattcccaggcccagaagacagacccacagccctgcccttgtctctgaggctgaagaccccctgactcccatgctgtgcttgccgctctgaaacaaacagaggctggaactttgtggtccttgccgagttttgtaggggtcactgtcacatgcttgtgccctggaagccccaaggctcttcctccagctggctcccttgtctccagggctttggaggatcagggtagggagggctctgtctctaagccaggtgtcaggatcagaatcatgggtagaaggtgccattcagctcacagccgcacccagaatcctttgcagccctccttctttatttttttcccattgcattctgggagtccacatctggctttctcagccactgttcatcaccaggggttttaggaggaaggcttggctcctgtcttcccagacccaccatgcctggagaggtcaggatggaactacctcattcggcaaattagccccaaattgagcgctgaatcgtgtcccatgagatcaggcgccatctgtaaagtctcctctggaaatgccaatccatccttcccccagctgcttcctcggggaggcccctgcccccaccctgccagcccttcccagtctcattagaggaagctttccaaagttctcagttatcaagacctcatccagctcgtccaaaggcttcagggatggaaacaaaccagctcgtctcagaggccagcaagctggggcctgtccgccacggtgccctgtgcacctttgggctgccctggcccccactctcccgggccgcccaccacaggctcttaatggggccgggtcagtcctacatgtgagatgggttagggcaagtctttgccatcccccagatggctctgtcttcttgtgtatggcagggctgggactgctgtcccttgtacagttttctgtcactggtgggcactggacaggcatagcagactctcttgtggccacactaggttgtcgcctttcaggcagtgtcccgccacctttgcttcccgctccttctggacattccagagccctgcaccaaacccttacttggtgtctgcacctcctttccctctctccatcttccaatccctggaaaagtctggtctgagtgtgacttgggaagctttcagtgctgctgtttggcccagctcattactttctccctttctctaccacagcaaacacattctccaccatgtcagtctaaagagtctaaaggggccgggagaagcatgagcgaggggcagattctagtcgggagcccatgccctggaaatccatctttcttcatctttcccattgaccactttgggtttgacctgcacatctgcagtgagggcagaattcaacaagcacaactcactggtctttcagtcaacgtgctagaaaccgatgacttattaatctctaattttttggcgcctctttcattgaatgagaattgctttcgtatagttcacattagaaaaatgcctaatatactaaagtaaaccaaacgttgtcacttttctcttgttcttgaaacattgcaaccaaaaaggtcagcacaaaggccttcacctacgtgaagacctcctggtaggatctgtccatgggatggagaaccactctgtccagatctggggttgggtcatgacaccagctaccaattttagaatattatttcttggtttctttatgaaaaatgggtgctagtggtaattgctttgtggcttagtaaactactctgtggatgatttccaaacattcaaagccaatagccttgttattaacaagatattttgagtacaatatggctcattgacttttccattacatctgaggattccagagtcctctgttcatccctgggatagagtgagccctcttgcgtcttccagggtagctcaggttggcccagtttgggccagtccatttttggaggtcactctttcccccctcatcccctcacctccttctctttacccccttcacgtacttcctttctttcttccctctgttattcattcatcaagcaggttaaagccattgtgctaagatctaatctgaggacactataatggccctgtcgtcagggaagcccgtgatcgctcgttttcaggggtcttaccggtcagcaaccttggcattgatacataggcactctacagaatttaagttttcagaggtaagtctgttgttctgattaatctgcattcattcagcgaatgctcaagacaagccaggcatgctgagaagcggcgctctagttgtatgtaagatgggcattcctctgctctcctctattctccatgtcgactgagaagagtataataagaacattgtaccctctccacacttaaccctctgggattctttattataatataaaccaccgtcgtgaggcatttacctgttggatggaaggtagacagcaacaagattttaatcacctggtcaccagaccctcacggcccatatccaattcgaatttcagaaatttctctgtttgctttaaataactctttacaaataagggtcgggcacggtggctcacgcctgtaatcccagctctttgggaggccgaggtgggcagatcacgaggtcaggagatcgagaccatcctggctaacatggtgaaaccccgtctctgctaaaaatacaaaaaattagccagatgtggtggtgcacacctgtagtcccaactattcggcaggctgaggcagtagaatcgcttgaacctgggaggcggagattgcagtgaaccaagatcgggccactgcactccagcttgggtgacagagcaagactccatctcaaaaaaattataaataactctttgcaaataggaaagtgaagctcaagggtaaccagtgaggctatgaaattgccagtgaattaagaccagggctagagtcaacagtccagaacccctatccgtatgaacaggggcccgtttctggttgaaatcaaggttaggatgcaactgagaaaataaaagactgcactttggagaggcaagcacgctatccgggttgttgttttgttttatgtcttggtgcttaggtgaggacttagctgggtttattcaaagtgggcgggtctgggctattcttgagaatgtcccttccatttctgagaacaagtcagccccttctacctgcctccacccaggagactgatgcacaagatctgtttgtgaaagcctgatttaaaaagaaaaaaaaaattccttaagccaaatggtgttccaagttggttgctgtgacaacctccaggaagagccacttgttaccctctattctttctagtgctttcagtcagtggcaacacataggccccttggaccgtggggatggcggccctgagattctgtcagtgggaccaccctgggcctcctttctacctccactcagcaccctgttggccaaggagaatttctgcggtgggaggcagtgctctgctagtcaggattgataaacagctgggcacaccgaaacagtgtaccaacgaattcaccaaccaggggtttctttccctaccctttgtgaaaaccaatcaattactagatgagtggatggatgcagaaaaatctgggctgagccaaagtcccttttggaaatacaagccataacattcgaaggacatcagcgaccttggcttgtttaggtgattttacttccagctgcaggtagtcttgacaaggagtgtttaaacagaaggctcaagatgcattccttgtgtaggtgggagagagcacttctaatgttaagtggggtacagatcagctgcccccccacgtagcctggacatcgtcttatccccataatccttgccatccctacaaggcccatcgccaccaccttttcccaggtttattgaggtatgattgacatccagtaaaattcaccctttggaaatatacagctctgtgaattttgacaaatttagtgtcttgtgaccatcaccaagatcaacctgtttttaaccctccaaaaaattcccttctcctgccctctttccctggcaaccctgattgattatctgatcctataattttgccttttctagaatgtcatataaatggagtcacactgatgtcgccttttgagtctggcatctttccctcagcttaatgcttttgagtcattcatgatgtgtgcgtgtggtttgttccttctccttgccgggaagtatttcattgcatgggcgtactactctgcttctttatttttacactgagcctttcgccctggaagttcttggcccagggtcttcaacttgtttgcacgaccacttccagcttgctgcttccttcagttccccaggctcctcctccaaatgccagctgtgcccacaagctgttcttagggctcacactcgccttttggcgcgtggtgggtttttggtagtgcagaaagaatccagggatgggaggggaagggacggatgggtgctcaattgctgctcacgtctgctgcaacctgaagcttgcatctcagccagcagatctgctcccttctgggacccaggcttcagtgtcacacggtccttggctatgtattgggcgttggaggctttgaaaggcgagcagaagcagcatggacaagaaggctggggctggccctggggctcatcatgatgctttcctggatctgttgcttcatctgcaagctgagggtgtttgttctagatgagtgtctcaggccaccggcaactgcatgtacctcctccctttctcatttccaatgatgtaccctgtacacgtgttcatgctgtgtctggctctcatctgcacaatcgtgcatagaattgcctcaagtcctggtgagagagatgccgtggtacttttccatttagattcaaatggagctaaaattaagagttttatgagctgttaagaatgaggtagtttctcctaggaccccccaaagacagtgcaagtaatgaccgtttggatctcattcgtcgatctttgatagtatgttctggagtctactccccaggagccaggacaggcgtgaagatggagtccttgtcgcagctggagccttgcctagctggtgatcacacagcctggcctgtacctgcaccccactggatggtggtacatggtggcagggacaggaccacacccagttaaggccagaccaggctgagtgtgacccctgaggtaaacactccactaagctgtgtcttgttcatgccccctgctcagtgaaaggtgagtcccgagaccagttgggtacctctctatgcgaaccagagacatttctggatccaggccaggtgaagattagggccaggaagcctgagcccccggggcctcaaggtagggagccgaagaggctgccaggactctgctgggttgaaatttgccggggaggactcttgtctccccctcaggagtatttttgttgaggctttcctggaggtgaagaagcaattcccattgcagcaggttagagcgagaatcagacagagggcaaaaaccaattcgcttctccccacgttctaaatgctggggcatggctgtcaggagggcttcctgggaggtgtctctgggggtggggtgaggttggggcgatggcctttggagattgcgtgtggtgttcaggactgttccttggtgtttgagggaaactttagtgggattgcagtggaatgtaaggtcagggcacgtgggtgctctctcggggtggggtgactgggagacctagagggaaagcctgctatgcagggggagagcacaggactggccctgctctgcggcctcctttgtcccataacctgaagttaagtcacatcccctgtcgggacctccgtgcactcatctgtcaagtgggggcgcttcccttccagcatcacctgcagcagacgggctctcgggagtcgtgggttccaggcagctgtgtggacccagggacagacattcaaagggacgccagccatccttggtgacaggggccccaacttagcatcccttcccttccgttaggaaggagatgaccggaagcaaccccttcacagacacgagcacatcggcaaaccctatgaaagtggaattttctaacaaaataaacttgcttgtttgatctgttttctgtaacttttgctaaatactttatacatttttcatgttaaagagccgtgtctcccgccagcactcctcaccccggtatgaatgtgtttcctccacattgtatatccttccaccctctggctgcctagatcagtaaataaaattgatgtaatataatttataagtaacactgttgaaaccctgatcccagtggaggctgtaacccacctgcccccgcaccacccccctgacccctgttaccgcatttgtgtgtattaatgctgaagaattaaatgtttaaagagtttaaattttgaaggcgtttgctatatacagttgtcctgcattattataaagagttttcaggaagttaaaacccatc

SEQ ID NO: 321598 - DNA, 7400 bp, Homo sapiens
tgtagacgtgtgtgggggcctcctgagctaaggtgacctgcctaagctgagacctgataggcagccacgtgtcagggggtgtctctcaccttcctgccaggtcgctaccccagactcatcctcacttgcctggggaagtgggggtgcccctcccatccctcctccctgcactggcttacagctgatgccctgggtcctgagtgtgcgtctctactctcccaacagcttcacagcgaggtggagaagcccctgatgaacttccgtgagaacttcaagaaagacatgaagaagtgcgaccaccacattgccgaccttcgcaagcagctcgccagccgctatgcctcggtggagaaggcccggaaagccctcacagagcggcagagagacctggagatgaagacccagcagctggagatcaagctgagcaacaagacagaggaggacatcaagaaggcgcggagaaagtccacacaggctggagacgacctcatgcgctgtgtggatctctacaaccaggcccagtccaaatggtttgaagagatggtgaccaccacattggagctagagcggctggaggtggagagggtagagatgatccggcagcacctgtgccagtacacgcagctgcggcatgaaacagacatgttcaaccaaagcacagtcgagcccgtggatcagctgcttcgaaaagtggacccggccaaagacagggagctgtgggtcagagagcacaagacgggcaacatccgccctgtggacatggagatctagatgggcctgtgcagcttcggggggtcctgctggggaggggggctgggctcccaccatggggcccatgccgagtggatgccccccaccctctctcctgggccactgaggagaggggagagagctggtgattccagaagggtgacccggacagcctagctgggggctcccccatattcccaggcccagaagacagacccacagccctgcccttgtctctgaggctgaagaccccctgactcccatgctgtgcttgccgctctgaaacaaacagaggctggaactttgtggtccttgccgagttttgtaggggtcactgtcacatgcttgtgccctggaagccccaaggctcttcctccagctggctcccttgtctccagggctttggaggatcagggtagggagggctctgtctctaagccaggtgtcaggatcagaatcatgggtagaaggtgccattcagctcacagccgcacccagaatcctttgcagccctccttctttatttttttcccattgcattctgggagtccacatctggctttctcagccactgttcatcaccaggggttttaggaggaaggcttggctcctgtcttcccagacccaccatgcctggagaggtcaggatggaactacctcattcggcaaattagccccaaattgagcgctgaatcgtgtcccatgagatcaggcgccatctgtaaagtctcctctggaaatgccaatccatccttcccccagctgcttcctcggggaggcccctgcccccaccctgccagcccttcccagtctcattagaggaagctttccaaagttctcagttatcaagacctcatccagctcgtccaaaggcttcagggatggaaacaaaccagctcgtctcagaggccagcaagctggggcctgtccgccacggtgccctgtgcacctttgggctgccctggcccccactctcccgggccgcccaccacaggctcttaatggggccgggtcagtcctacatgtgagatgggttagggcaagtctttgccatcccccagatggctctgtcttcttgtgtatggcagggctgggactgctgtcccttgtacagttttctgtcactggtgggcactggacaggcatagcagactctcttgtggccacactaggttgtcgcctttcaggcagtgtcccgccacctttgcttcccgctccttctggacattccagagccctgcaccaaacccttacttggtgtctgcacctcctttccctctctccatcttccaatccctggaaaagtctggtctgagtgtgacttgggaagctttcagtgctgctgtttggcccagctcattactttctccctttctctaccacagcaaacacattctccaccatgtcagtctaaagagtctaaaggggccgggagaagcatgagcgaggggcagattctagtcgggagcccatgccctggaaatccatctttcttcatctttcccattgaccactttgggtttgacctgcacatctgcagtgagggcagaattcaacaagcacaactcactggtctttcagtcaacgtgctagaaaccgatgacttattaatctctaattttttggcgcctctttcattgaatgagaattgctttcgtatagttcacattagaaaaatgcctaatatactaaagtaaaccaaacgttgtcacttttctcttgttcttgaaacattgcaaccaaaaaggtcagcacaaaggccttcacctacgtgaagacctcctggtaggatctgtccatgggatggagaaccactctgtccagatctggggttgggtcatgacaccagctaccaattttagaatattatttcttggtttctttatgaaaaatgggtgctagtggtaattgctttgtggcttagtaaactactctgtggatgatttccaaacattcaaagccaatagccttgttattaacaagatattttgagtacaatatggctcattgacttttccattacatctgaggattccagagtcctctgttcatccctgggatagagtgagccctcttgcgtcttccagggtagctcaggttggcccagtttgggccagtccatttttggaggtcactctttcccccctcatcccctcacctccttctctttacccccttcacgtacttcctttctttcttccctctgttattcattcatcaagcaggttaaagccattgtgctaagatctaatctgaggacactataatggccctgtcgtcagggaagcccgtgatcgctcgttttcaggggtcttaccggtcagcaaccttggcattgatacataggcactctacagaatttaagttttcagaggtaagtctgttgttctgattaatctgcattcattcagcgaatgctcaagacaagccaggcatgctgagaagcggcgctctagttgtatgtaagatgggcattcctctgctctcctctattctccatgtcgactgagaagagtataataagaacattgtaccctctccacacttaaccctctgggattctttattataatataaaccaccgtcgtgaggcatttacctgttggatggaaggtagacagcaacaagattttaatcacctggtcaccagaccctcacggcccatatccaattcgaatttcagaaatttctctgtttgctttaaataactctttacaaataagggtcgggcacggtggctcacgcctgtaatcccagctctttgggaggccgaggtgggcagatcacgaggtcaggagatcgagaccatcctggctaacatggtgaaaccccgtctctgctaaaaatacaaaaaattagccagatgtggtggtgcacacctgtagtcccaactattcggcaggctgaggcagtagaatcgcttgaacctgggaggcggagattgcagtgaaccaagatcgggccactgcactccagcttgggtgacagagcaagactccatctcaaaaaaattataaataactctttgcaaataggaaagtgaagctcaagggtaaccagtgaggctatgaaattgccagtgaattaagaccagggctagagtcaacagtccagaacccctatccgtatgaacaggggcccgtttctggttgaaatcaaggttaggatgcaactgagaaaataaaagactgcactttggagaggcaagcacgctatccgggttgttgttttgttttatgtcttggtgcttaggtgaggacttagctgggtttattcaaagtgggcgggtctgggctattcttgagaatgtcccttccatttctgagaacaagtcagccccttctacctgcctccacccaggagactgatgcacaagatctgtttgtgaaagcctgatttaaaaagaaaaaaaaaattccttaagccaaatggtgttccaagttggttgctgtgacaacctccaggaagagccacttgttaccctctattctttctagtgctttcagtcagtggcaacacataggccccttggaccgtggggatggcggccctgagattctgtcagtgggaccaccctgggcctcctttctacctccactcagcaccctgttggccaaggagaatttctgcggtgggaggcagtgctctgctagtcaggattgataaacagctgggcacaccgaaacagtgtaccaacgaattcaccaaccaggggtttctttccctaccctttgtgaaaaccaatcaattactagatgagtggatggatgcagaaaaatctgggctgagccaaagtcccttttggaaatacaagccataacattcgaaggacatcagcgaccttggcttgtttaggtgattttacttccagctgcaggtagtcttgacaaggagtgtttaaacagaaggctcaagatgcattccttgtgtaggtgggagagagcacttctaatgttaagtggggtacagatcagctgcccccccacgtagcctggacatcgtcttatccccataatccttgccatccctacaaggcccatcgccaccaccttttcccaggtttattgaggtatgattgacatccagtaaaattcaccctttggaaatatacagctctgtgaattttgacaaatttagtgtcttgtgaccatcaccaagatcaacctgtttttaaccctccaaaaaattcccttctcctgccctctttccctggcaaccctgattgattatctgatcctataattttgccttttctagaatgtcatataaatggagtcacactgatgtcgccttttgagtctggcatctttccctcagcttaatgcttttgagtcattcatgatgtgtgcgtgtggtttgttccttctccttgccgggaagtatttcattgcatgggcgtactactctgcttctttatttttacactgagcctttcgccctggaagttcttggcccagggtcttcaacttgtttgcacgaccacttccagcttgctgcttccttcagttccccaggctcctcctccaaatgccagctgtgcccacaagctgttcttagggctcacactcgccttttggcgcgtggtgggtttttggtagtgcagaaagaatccagggatgggaggggaagggacggatgggtgctcaattgctgctcacgtctgctgcaacctgaagcttgcatctcagccagcagatctgctcccttctgggacccaggcttcagtgtcacacggtccttggctatgtattgggcgttggaggctttgaaaggcgagcagaagcagcatggacaagaaggctggggctggccctggggctcatcatgatgctttcctggatctgttgcttcatctgcaagctgagggtgtttgttctagatgagtgtctcaggccaccggcaactgcatgtacctcctccctttctcatttccaatgatgtaccctgtacacgtgttcatgctgtgtctggctctcatctgcacaatcgtgcatagaattgcctcaagtcctggtgagagagatgccgtggtacttttccatttagattcaaatggagctaaaattaagagttttatgagctgttaagaatgaggtagtttctcctaggaccccccaaagacagtgcaagtaatgaccgtttggatctcattcgtcgatctttgatagtatgttctggagtctactccccaggagccaggacaggcgtgaagatggagtccttgtcgcagctggagccttgcctagctggtgatcacacagcctggcctgtacctgcaccccactggatggtggtacatggtggcagggacaggaccacacccagttaaggccagaccaggctgagtgtgacccctgaggtaaacactccactaagctgtgtcttgttcatgccccctgctcagtgaaaggtgagtcccgagaccagttgggtacctctctatgcgaaccagagacatttctggatccaggccaggtgaagattagggccaggaagcctgagcccccggggcctcaaggtagggagccgaagaggctgccaggactctgctgggttgaaatttgccggggaggactcttgtctccccctcaggagtatttttgttgaggctttcctggaggtgaagaagcaattcccattgcagcaggttagagcgagaatcagacagagggcaaaaaccaattcgcttctccccacgttctaaatgctggggcatggctgtcaggagggcttcctgggaggtgtctctgggggtggggtgaggttggggcgatggcctttggagattgcgtgtggtgttcaggactgttccttggtgtttgagggaaactttagtgggattgcagtggaatgtaaggtcagggcacgtgggtgctctctcggggtggggtgactgggagacctagagggaaagcctgctatgcagggggagagcacaggactggccctgctctgcggcctcctttgtcccataacctgaagttaagtcacatcccctgtcgggacctccgtgcactcatctgtcaagtgggggcgcttcccttccagcatcacctgcagcagacgggctctcgggagtcgtgggttccaggcagctgtgtggacccagggacagacattcaaagggacgccagccatccttggtgacaggggccccaacttagcatcccttcccttccgttaggaaggagatgaccggaagcaaccccttcacagacacgagcacatcggcaaaccctatgaaagtggaattttctaacaaaataaacttgcttgtttgatctgttttctgtaacttttgctaaatactttatacatttttcatgttaaagagccgtgtctcccgccagcactcctcaccccggtatgaatgtgtttcctccacattgtatatccttccaccctctggctgcctagatcagtaaataaaattgatgtaatataatttataagtaacactgttgaaaccctgatcccagtggaggctgtaacccacctgcccccgcaccacccccctgacccctgttaccgcatttgtgtgtattaatgctgaagaattaaatgtttaaagagtttaaattttgaaggcgtttgctatatacagttgtcctgcattattataaagagttttcaggaagttaaaacccatc

SEQ ID NO: 321599 - DNA, 7274 bp, Homo sapiens
  misc_feature (7268)..(7268): n is a, c, g, or t
tcgagcggccgccccgggcaggtcccgagagctgggcgtgggaacagcgtggggtcagggagacccctgcttgccctggcccagaatatggtgacttaggattcagactgagcatccctgattccccagcgcctccaccctcagggaacctgaatggggggaaaaaatgtccaatatggagaacagctttgacgatgtttcttgcctctctccccagaacctgggatcctcatcgccaagcaaaaagcagagcaaggaaaacaccatcacaataaactgtgtgacgttccctcacccagacacgatgccggaacagcagctgctgaaaccaaccgagtggagctactgcgactacttctgggctgataagaaggacccccaaggcaacggcaccgtggctgggtttgaactactgctccagaaacagctgaagggcaaacaaatgcagaaggaaatgtcagaattcatccgggaaaggataaagattgaagaagactatgcgaagaacttagctaagctctctcagaactccttggcttcacaggaggaaggctccttgggagaggcgtgggcccaggtgaagaagagcctggcggacgaagcagaagttcacctcaagttctctgccaagcttcacagcgaggtggagaagcccctgatgaacttccgtgagaacttcaagaaagacatgaagaagtgcgaccaccacattgccgaccttcgcaagcagctcgccagccgctatgcctcggtggagaaggcccggaaagccctcacagagcggcagagagacctggagatgaagacccagcagctggagatcaagctgagcaacaagacagaggaggacatcaagaaggcgcggagaaagtccacacaggctggagacgacctcatgcgctgtgtggatctctacaaccaggcccagtccaaatggtttgaagagatggtgaccaccacattggagctagagcggctggaggtggagagggtagagatgatccggcagcacctgtgccagtacacgcagctgcggcatgaaacagacatgttcaaccaaagcacagtcgagcccgtggatcagctgcttcgaaaagtggacccggccaaagacagggagctgtgggtcagagagcacaagacgggcaacatccgccctgtggacatggagatctagatgggcctgtgcagcttcggggggtcctgctggggaggggggctgggctcccaccatggggcccatgccgagtggatgccccccaccctctctcctgggccactgaggagaggggagagagctggtgattccagaagggtgacccggacagcctagctgggggctcccccatattcccaggcccagaagacagacccacagccctgcccttgtctctgaggctgaagaccccctgactcccatgctgtgcttgccgctctgaaacaaacagaggctggaactttgtggtccttgccgagttttgtaggggtcactgtcacatgcttgtgccctggaagccccaaggctcttcctccagctggctcccttgtctccagggctttggaggatcagggtagggagggctctgtctctaagccaggtgtcaggatcagaatcatgggtagaaggtgccattcagctcacagccgcacccagaatcctttgcagccctccttctttatttttttcccattgcattctgggagtccacatctggctttctcagccactgttcatcaccaggggttttaggaggaaggcttggctcctgtcttcccagacccaccatgcctggagaggtcaggatggaactacctcattcggcaaattagccccaaattgagcgctgaatcgtgtcccatgagatcaggcgccatctgtaaagtctcctctggaaatgccaatccatccttcccccagctgcttcctcggggaggcccctgcccccaccctgccagcccttcccagtctcattagaggaagctttccaaagttctcagttatcaagacctcatccagctcgtccaaaggcttcagggatggaaacaaaccagctcgtctcagaggccagcaagctggggcctgtccgccacggtgccctgtgcacctttgggctgccctggcccccactctcccgggccgcccaccacaggctcttaatggggccgggtcagtcctacatgtgagatgggttagggcaagtctttgccatcccccagatggctctgtcttcttgtgtatggcagggctgggactgctgtcccttgtacagttttctgtcactggtgggcactggacaggcatagcagactctcttgtggccacactaggttgtcgcctttcaggcagtgtcccgccacctttgcttcccgctccttctggacattccagagccctgcaccaaacccttacttggtgtctgcacctcctttccctctctccatcttccaatccctggaaaagtctggtctgagtgtgacttgggaagctttcagtgctgctgtttggcccagctcattactttctccctttctctaccacagcaaacacattctccaccatgtcagtctaaagagtctaaaggggccgggagaagcatgagcgaggggcagattctagtcgggagcccatgccctggaaatccatctttcttcatctttcccattgaccactttgggtttgacctgcacatctgcagtgagggcagaattcaacaagcacaactcactggtctttcagtcaacgtgctagaaaccgatgacttattaatctctaattttttggcgcctctttcattgaatgagaattgctttcgtatagttcacattagaaaaatgcctaatatactaaagtaaaccaaacgttgtcacttttctcttgttcttgaaacattgcaaccaaaaaggtcagcacaaaggccttcacctacgtgaagacctcctggtaggatctgtccatgggatggagaaccactctgtccagatctggggttgggtcatgacaccagctaccaattttagaatattatttcttggtttctttatgaaaaatgggtgctagtggtaattgctttgtggcttagtaaactactctgtggatgatttccaaacattcaaagccaatagccttgttattaacaagatattttgagtacaatatggctcattgacttttccattacatctgaggattccagagtcctctgttcatccctgggatagagtgagccctcttgcgtcttccagggtagctcaggttggcccagtttgggccagtccatttttggaggtcactctttcccccctcatcccctcacctccttctctttacccccttcacgtacttcctttctttcttccctctgttattcattcatcaagcaggttaaagccattgtgctaagatctaatctgaggacactataatggccctgtcgtcagggaagcccgtgatcgctcgttttcaggggtcttaccggtcagcaaccttggcattgatacataggcactctacagaatttaagttttcagaggtaagtctgttgttctgattaatctgcattcattcagcgaatgctcaagacaagccaggcatgctgagaagcggcgctctagttgtatgtaagatgggcattcctctgctctcctctattctccatgtcgactgagaagagtataataagaacattgtaccctctccacacttaaccctctgggattctttattataatataaaccaccgtcgtgaggcatttacctgttggatggaaggtagacagcaacaagattttaatcacctggtcaccagaccctcacggcccatatccaattcgaatttcagaaatttctctgtttgctttaaataactctttacaaataagggtcgggcacggtggctcacgcctgtaatcccagctctttgggaggccgaggtgggcagatcacgaggtcaggagatcgagaccatcctggctaacatggtgaaaccccgtctctgctaaaaatacaaaaaattagccagatgtggtggtgcacacctgtagtcccaactattcggcaggctgaggcagtagaatcgcttgaacctgggaggcggagattgcagtgaaccaagatcgggccactgcactccagcttgggtgacagagcaagactccatctcaaaaaaattataaataactctttgcaaataggaaagtgaagctcaagggtaaccagtgaggctatgaaattgccagtgaattaagaccagggctagagtcaacagtccagaacccctatccgtatgaacaggggcccgtttctggttgaaatcaaggttaggatgcaactgagaaaataaaagactgcactttggagaggcaagcacgctatccgggttgttgttttgttttatgtcttggtgcttaggtgaggacttagctgggtttattcaaagtgggcgggtctgggctattcttgagaatgtcccttccatttctgagaacaagtcagccccttctacctgcctccacccaggagactgatgcacaagatctgtttgtgaaagcctgatttaaaaagaaaaaaaaaattccttaagccaaatggtgttccaagttggttgctgtgacaacctccaggaagagccacttgttaccctctattctttctagtgctttcagtcagtggcaacacataggccccttggaccgtggggatggcggccctgagattctgtcagtgggaccaccctgggcctcctttctacctccactcagcaccctgttggccaaggagaatttctgcggtgggaggcagtgctctgctagtcaggattgataaacagctgggcacaccgaaacagtgtaccaacgaattcaccaaccaggggtttctttccctaccctttgtgaaaaccaatcaattactagatgagtggatggatgcagaaaaatctgggctgagccaaagtcccttttggaaatacaagccataacattcgaaggacatcagcgaccttggcttgtttaggtgattttacttccagctgcaggtagtcttgacaaggagtgtttaaacagaaggctcaagatgcattccttgtgtaggtgggagagagcacttctaatgttaagtggggtacagatcagctgcccccccacgtagcctggacatcgtcttatccccataatccttgccatccctacaaggcccatcgccaccaccttttcccaggtttattgaggtatgattgacatccagtaaaattcaccctttggaaatatacagctctgtgaattttgacaaatttagtgtcttgtgaccatcaccaagatcaacctgtttttaaccctccaaaaaattcccttctcctgccctctttccctggcaaccctgattgattatctgatcctataattttgccttttctagaatgtcatataaatggagtcacactgatgtcgccttttgagtctggcatctttccctcagcttaatgcttttgagtcattcatgatgtgtgcgtgtggtttgttccttctccttgccgggaagtatttcattgcatgggcgtactactctgcttctttatttttacactgagcctttcgccctggaagttcttggcccagggtcttcaacttgtttgcacgaccacttccagcttgctgcttccttcagttccccaggctcctcctccaaatgccagctgtgcccacaagctgttcttagggctcacactcgccttttggcgcgtggtgggtttttggtagtgcagaaagaatccagggatgggaggggaagggacggatgggtgctcaattgctgctcacgtctgctgcaacctgaagcttgcatctcagccagcagatctgctcccttctgggacccaggcttcagtgtcacacggtccttggctatgtattgggcgttggaggctttgaaaggcgagcagaagcagcatggacaagaaggctggggctggccctggggctcatcatgatgctttcctggatctgttgcttcatctgcaagctgagggtgtttgttctagatgagtgtctcaggccaccggcaactgcatgtacctcctccctttctcatttccaatgatgtaccctgtacacgtgttcatgctgtgtctggctctcatctgcacaatcgtgcatagaattgcctcaagtcctggtgagagagatgccgtggtacttttccatttagattcaaatggagctaaaattaagagttttatgagctgttaagaatgaggtagtttctcctaggaccccccaaagacagtgcaagtaatgaccgtttggatctcattcgtcgatctttgatagtatgttctggagtctactccccaggagccaggacaggcgtgaagatggagtccttgtcgcagctggagccttgcctagctggtgatcacacagcctggcctgtacctgcaccccactggatggtggtacatggtggcagggacaggaccacacccagttaaggccagaccaggctgagtgtgacccctgaggtaaacactccactaagctgtgtcttgttcatgccccctgctcagtgaaaggtgagtcccgagaccagttgggtacctctctatgcgaaccagagacatttctggatccaggccaggtgaagattagggccaggaagcctgagcccccggggcctcaaggtagggagccgaagaggctgccaggactctgctgggttgaaatttgccggggaggactcttgtctccccctcaggagtatttttgttgaggctttcctggaggtgaagaagcaattcccattgcagcaggttagagcgagaatcagacagagggcaaaaaccaattcgcttctccccacgttctaaatgctggggcatggctgtcaggagggcttcctgggaggtgtctctgggggtggggtgaggttggggcgatggcctttggagattgcgtgtggtgttcaggactgttccttggtgtttgagggaaactttagtgggattgcagtggaatgtaaggtcagggcacgtgggtgctctctcggggtggggtgactgggagacctagagggaaagcctgctatgcagggggagagcacaggactggccctgctctgcggcctcctttgtcccataacctgaagttaagtcacatcccctgtcgggacctccgtgcactcatctgtcaagaagcaattcccattgcagcaggttagagcgagaatcagacagagggcaaaaaccaattcgcttctccccacgttctaaatgctngggcat

SEQ ID NO: 321600 - DNA, 5309 bp, Homo sapiens
  misc_feature (5292)..(5292): n is a, c, g, or t
tcgagcggccgccccgggcaggtcccgagagctgggcgtgggaacagcgtggggtcagggagacccctgcttgccctggcccagaatatggtgacttaggattcagactgagcatccctgattccccagcgcctccaccctcagggaacctgaatggggggaaaaaatgtccaatatggagaacagctttgacgatgtttcttgcctctctccccagaacctgggatcctcatcgccaagcaaaaagcagagcaaggaaaacaccatcacaataaactgtgtgacgttccctcacccagacacgatgccggaacagcagctgctgaaaccaaccgagtggagctactgcgactacttctgggctgataagaaggacccccaaggcaacggcaccgtggctgggtttgaactactgctccagaaacagctgaagggcaaacaaatgcagaaggaaatgtcagaattcatccgggaaaggataaagattgaagaagactatgcgaagaacttagctaagctctctcagaactccttggcttcacaggaggaaggctccttgggagaggcgtgggcccaggtgaagaagagcctggcggacgaagcagaagttcacctcaagttctctgccaagcttcacagcgaggtggagaagcccctgatgaacttccgtgagaacttcaagaaagacatgaagaagtgcgaccaccacattgccgaccttcgcaagcagctcgccagccgctatgcctcggtggagaaggcccggaaagccctcacagagcggcagagagacctggagatgaagacccagcagctggagatcaagctgagcaacaagacagaggaggacatcaagaaggcgcggagaaagtccacacaggctggagacgacctcatgcgctgtgtggatctctacaaccaggcccagtccaaatggtttgaagagatggtgaccaccacattggagctagagcggctggaggtggagagggtagagatgatccggcagcacctgtgccagtacacgcagctgcggcatgaaacagacatgttcaaccaaagcacagtcgagcccgtggatcagctgcttcgaaaagtggacccggccaaagacagggagctgtgggtcagagagcacaagacgggcaacatccgccctgtggacatggagatctagatgggcctgtgcagcttcggggggtcctgctggggaggggggctgggctcccaccatggggcccatgccgagtggatgccccccaccctctctcctgggccactgaggagaggggagagagctggtgattccagaagggtgacccggacagcctagctgggggctcccccatattcccaggcccagaagacagacccacagccctgcccttgtctctgaggctgaagaccccctgactcccatgctgtgcttgccgctctgaaacaaacagaggctggaactttgtggtccttgccgagttttgtaggggtcactgtcacatgcttgtgccctggaagccccaaggctcttcctccagctggctcccttgtctccagggctttggaggatcagggtagggagggctctgtctctaagccaggtgtcaggatcagaatcatgggtagaaggtgccattcagctcacagccgcacccagaatcctttgcagccctccttctttatttttttcccattgcattctgggagtccacatctggctttctcagccactgttcatcaccaggggttttaggaggaaggcttggctcctgtcttcccagacccaccatgcctggagaggtcaggatggaactacctcattcggcaaattagccccaaattgagcgctgaatcgtgtcccatgagatcaggcgccatctgtaaagtctcctctggaaatgccaatccatccttcccccagctgcttcctcggggaggcccctgcccccaccctgccagcccttcccagtctcattagaggaagctttccaaagttctcagttatcaagacctcatccagctcgtccaaaggcttcagggatggaaacaaaccagctcgtctcagaggccagcaagctggggcctgtccgccacggtgccctgtgcacctttgggctgccctggcccccactctcccgggccgcccaccacaggctcttaatggggccgggtcagtcctacatgtgagatgggttagggcaagtctttgccatcccccagatggctctgtcttcttgtgtatggcagggctgggactgctgtcccttgtacagttttctgtcactggtgggcactggacaggcatagcagactctcttgtggccacactaggttgtcgcctttcaggcagtgtcccgccacctttgcttcccgctccttctggacattccagagccctgcaccaaacccttacttggtgtctgcacctcctttccctctctccatcttccaatccctggaaaagtctggtctgagtgtgacttgggaagctttcagtgctgctgtttggcccagctcattactttctccctttctctaccacagcaaacacattctccaccatgtcagtctaaagagtctaaaggggccgggagaagcatgagcgaggggcagattctagtcgggagcccatgccctggaaatccatctttcttcatctttcccattgaccactttgggtttgacctgcacatctgcagtgagggcagaattcaacaagcacaactcactggtctttcagtcaacgtgctagaaaccgatgacttattaatctctaattttttggcgcctctttcattgaatgagaattgctttcgtatagttcacattagaaaaatgcctaatatactaaagtaaaccaaacgttgtcacttttctcttgttcttgaaacattgcaaccaaaaaggtcagcacaaaggccttcacctacgtgaagacctcctggtaggatctgtccatgggatggagaaccactctgtccagatctggggttgggtcatgacaccagctaccaattttagaatattatttcttggtttctttatgaaaaatgggtgctagtggtaattgctttgtggcttagtaaactactctgtggatgatttccaaacattcaaagccaatagccttgttattaacaagatattttgagtacaatatggctcattgacttttccattacatctgaggattccagagtcctctgttcatccctgggatagagtgagccctcttgcgtcttccagggtagctcaggttggcccagtttgggccagtccatttttggaggtcactctttcccccctcatcccctcacctccttctctttacccccttcacgtacttcctttctttcttccctctgttattcattcatcaagcaggttaaagccattgtgctaagatctaatctgaggacactataatggccctgtcgtcagggaagcccgtgatcgctcgttttcaggggtcttaccggtcagcaaccttggcattgatacataggcactctacagaatttaagttttcagaggtaagtctgttgttctgattaatctgcattcattcagcgaatgctcaagacaagccaggcatgctgagaagcggcgctctagttgtatgtaagatgggcattcctctgctctcctctattctccatgtcgactgagaagagtataataagaacattgtaccctctccacacttaaccctctgggattctttattataatataaaccaccgtcgtgaggcatttacctgttggatggaaggtagacagcaacaagattttaatcacctggtcaccagaccctcacggcccatatccaattcgaatttcagaaatttctctgtttgctttaaataactctttacaaataagggtcgggcacggtggctcacgcctgtaatcccagctctttgggaggccgaggtgggcagatcacgaggtcaggagatcgagaccatcctggctaacatggtgaaaccccgtctctgctaaaaatacaaaaaattagccagatgtggtggtgcacacctgtagtcccaactattcggcaggctgaggcagtagaatcgcttgaacctgggaggcggagattgcagtgaaccaagatcgggccactgcactccagcttgggtgacagagcaagactccatctcaaaaaaattataaataactctttgcaaataggaaagtgaagctcaagggtaaccagtgaggctatgaaattgccagtgaattaagaccagggctagagtcaacagtccagaacccctatccgtatgaacaggggcccgtttctggttgaaatcaaggttaggatgcaactgagaaaataaaagactgcactttggagaggcaagcacgctatccgggttgttgttttgttttatgtcttggtgcttaggtgaggacttagctgggtttattcaaagtgggcgggtctgggctattcttgagaatgtcccttccatttctgagaacaagtcagccccttctacctgcctccacccaggagactgatgcacaagatctgtttgtgaaagcctgatttaaaaagaaaaaaaaaattccttaagccaaatggtgttccaagttggttgctgtgacaacctccaggaagagccacttgttaccctctattctttctagtgctttcagtcagtggcaacacataggccccttggaccgtggggatggcggccctgagattctgtcagtgggaccaccctgggcctcctttctacctccactcagcaccctgttggccaaggagaatttctgcggtgggaggcagtgctctgctagtcaggattgataaacagctgggcacaccgaaacagtgtaccaacgaattcaccaaccaggggtttctttccctaccctttgtgaaaaccaatcaattactagatgagtggatggatgcagaaaaatctgggctgagccaaagtcccttttggaaatacaagccataacattcgaaggacatcagcgaccttggcttgtttaggtgattttacttccagctgcaggtagtcttgacaaggagtgtttaaacagaaggctcaagatgcattccttgtgtaggtgggagagagcacttctaatgttaagtggggtacagatcagctgcccccccacgtagcctggacatcgtcttatccccataatccttgccatccctacaaggcccatcgccaccaccttttcccaggtttattgaggtatgattgacatccagtaaaattcaccctttggaaatatacagctctgtgattcgcgaatggggtncgagccgaaatgtaatc

SEQ ID NO: 321601 - DNA, 1844 bp, Homo sapiens
agaaacattgcatctggaaagtccagaacaagttgttaatttcccagcaagcactggagcggatttggaaggaactatgcaatgtagtgggttctttgtgaaagaacagcaatgagcaaagccacaggaacctccgctggggtgcccagaacactggccctgggctagcgacttgcctcagccccatttcccggagaggctgccatgaagaggaagccggcggagtcttggtgctgagtctgagggcttcaggcaggacccaagactctcctctgaggtagcagcccccagagaaggttagctgttctctgatgaagcctggaatggtcccccctccgccgggagaagaaagccagacggtcatccttccacctggctggcagagctacctgtcgcctcagggccggcggtactatgtcaacacgaccaccaatgagaccacctgggaacgtcccagcagttctcctgggattccagccagccctggctctcacaggagctctctgcctccaacagtgaatggataccacgcatcagggaccccagcgcaccctccagagactgcccacatgagtgtccgaaaatccaccggtgattcccagaacctgggatcctcatcgccaagcaaaaagcagagcaaggaaaacaccatcacaataaactgtgtgacgttccctcacccagacacgatgccggaacagcagctgctgaaaccaaccgagtggagctactgcgactacttctgggctgataagaaggacccccaaggcaacggcaccgtggctgggtttgaactactgctccagaaacagctgaagggcaaacaaatgcagaaggaaatgtcagaattcatccgggaaaggataaagattgaagaagactatgcgaagaacttagctaagctctctcagaactccttggcttcacaggaggaaggctccttgggagaggcgtgggcccaggtgaagaagagcctggcggacgaagcagaagttcacctcaagttctctgccaagcttcacagcgaggtggagaagcccctgatgaacttccgtgagaacttcaagaaagacatgaagaagtgcgaccaccacattgccgaccttcgcaagcagctcgccagccgctatgcctcggtggagaaggcccggaaagccctcacagagcggcagagagacctggagatgaagacccagcagctggagatcaagctgagcaacaagacagaggaggacatcaagaaggcgcggagaaagtccacacaggctggagacgacctcatgcgctgtgtggatctctacaaccaggcccagtccaaatggtttgaagagatggtgaccaccacattggagctagagcggctggaggtggagagggtagagatgatccggcagcacctgtgccagtacacgcagctgcggcatgaaacagacgggctctcgggagtcgtgggttccaggcagctgtgtggacccagggacagacacgagcacatcggcaaaccctatgaaagtggaattttctaacaaaataaacttgcttgtttgatctgttttctgtaacttttgctaaatactttatacatttttcatgttaaagagccgtgtctcccgccagcactcctcaccccggtatgaatgtgtttcctccacattgtatatccttccaccctctggctgcctagatcagtaaataaaattgatgtaatataatttataagtaacactgttgaaaccctgatcccagtggaggctgtaacccacctgcccccgcaccacccccctgacccctgttaccgcatttgtgtgtattaatgctgaagaattaaatgtttaaagagttta

SEQ ID NO: 321602 - DNA, 528 bp, Homo sapiens
ctgagagctcagggccctgtccctgttcagagcccacagaagcacacagctcacccaagctgcccacttccccaggaagcaatgctctctctgaaggttcacctatggggatgggctcctgccctgggaacagaggctgacactttgtttaaagaaataaccagatttcagtctcttgggaatagtctcccaatgagttggtttctgcttccacctagtggtcaaagttagctaatacacaaagaggaagagaaggcctggtagaaccagtgaaaacctcggtaactagatctaagggaagccacgtttcactgcacgagaggacacgcatgttgcctctggaattagaatgtgtgccgtagtattagagtttggtctgtaggtccctttcacctcaatttctggtgaacctgttacaattccttcattatagaagaaagcagccaccttacatttcaaaataaggtaagatagaaataagtcaataaaaaataatgtaatagaaggataacgtttattatacaaatc

SEQ ID NO: 321603 - DNA, 1260 bp, Homo sapiens
  misc_feature (1206)..(1206): n is a, c, g, or t
gtggtcatcccgcctcagccacctactacaggaccgccaagaaaagaagttcccaaaaccactcctagtgagcccaagaaaaagcagcctccaccaccagaatcaggtccagagcagagcaaacagaaaaaagtggctccccgcccaagtatccctgtaaaacaaaaaccaaaagaaaaggaaaaaccacctccggtcaataagcaggagaatgcaggcactttgaacatcctcagcactctctccaatggcaatagttctaagcaaaaaattccagcagatggagtccacaggatcagagtggactttaaagcctggaatggtcccccctccgccgggagaagaaagccagacggtcatccttccacctggctggcagagctacctgtcgcctcagggccggcggtactatgtcaacacgaccaccaatgagaccacctgggaacgtcccagcagttctcctgggattccagccagccctggctctcacaggagctctctgcctccaacagtgaatggataccacgcatcagggaccccagcgcaccctccagagactgcccacatgagtgtccgaaaatccaccggtgattcccagaacctgggatcctcatcgccaagcaaaaagcagagcaaggaaaacaccatcacaataaactgtgtgacgttccctcacccagacacgatgccggaacagcagctgctgaaaccaaccgagtggagctactgcgactacttctgggctgataagaaggacccccaaggcaacggcaccgtggctgggtttgaactactgctccagaaacagctgaagggcaaacaaatgcagaaggaaatgtcagaattcatccgggaaaggataaagattgaagaagactatgcgaagaacttagctaagctctctcagaactccttggcttcacaggaggaaggctccttgggagaggcgtgggcccaggtgaagaagagcctggcggacgaagcagaagttcacctcaagttctctgccaagcttcacagcgaggtggagaagcccctgatgaacttccgtgagaacttcaagaaagacatgaagaagtgcgaccaccacattgccgaccttcgcaagcagctcgccagccgctatgcctcggtggagaaggcccggaaagccctcacagagcggcagagagacctggagatgaagacccagcagctggagtggtngcctgtttggattcaggcccaggggccgagacattcccttcttcactcttttcc

SEQ ID NO: 321604 - DNA, 2857 bp, Homo sapiens
tcgagcggccgccccgggcaggtcccgagagctgggcgtgggaacagcgtggggtcagggagacccctgcttgccctggcccagaatatggtgacttaggattcagactgagcatccctgattccccagcgcctccaccctcagggaacctgaatggggggaaaaaatgtccaatatggagaacagctttgacgatgtttcttgcctctctccccagaacctgggatcctcatcgccaagcaaaaagcagagcaaggaaaacaccatcacaataaactgtgtgacgttccctcacccagacacgatgccggaacagcagctgctgaaaccaaccgagtggagctactgcgactacttctgggctgataagaaggacccccaaggcaacggcaccgtggctgggtttgaactactgctccagaaacagctgaagggcaaacaaatgcagaaggaaatgtcagaattcatccgggaaaggataaagattgaagaagactatgcgaagaacttagctaagctctctcagaactccttggcttcacaggaggaaggctccttgggagaggcgtgggcccaggtgaagaagagcctggcggacgaagcagaagttcacctcaagttctctgccaagcttcacagcgaggtggagaagcccctgatgaacttccgtgagaacttcaagaaagacatgaagaagtgcgaccaccacattgccgaccttcgcaagcagctcgccagccgctatgcctcggtggagaaggcccggaaagccctcacagagcggcagagagacctggagatgaagacccagcagctggagatcaagctgagcaacaagacagaggaggacatcaagaaggcgcggagaaagtccacacaggctggagacgacctcatgcgctgtgtggatctctacaaccaggcccagtccaaatggtttgaagagatggtgaccaccacattggagctagagcggctggaggtggagagggtagagatgatccggcagcacctgtgccagtacacgcagctgcggcatgaaacagacatgttcaaccaaagcacagtcgagcccgtggatcagctgcttcgaaaagtggacccggccaaagacagggagctgtgggtcagagagcacaagacgggcaacatccgccctgtggacatggagatctagatgggcctgtgcagcttcggggggtcctgctggggaggggggctgggctcccaccatggggcccatgccgagtggatgccccccaccctctctcctgggccactgaggagaggggagagagctggtgattccagaagggtgacccggacagcctagctgggggctcccccatattcccaggcccagaagacagacccacagccctgcccttgtctctgaggctgaagaccccctgactcccatgctgtgcttgccgctctgaaacaaacagaggctggaactttgtggtccttgccgagttttgtaggggtcactgtcacatgcttgtgccctggaagccccaaggctcttcctccagctggctcccttgtctccagggctttggaggatcagggtagggagggctctgtctctaagccaggtgtcaggatcagaatcatgggtagaaggtgccattcagctcacagccgcacccagaatcctttgcagccctccttctttatttttttcccattgcattctgggagtccacatctggctttctcagccactgttcatcaccaggggttttaggaggaaggcttggctcctgtcttcccagacccaccatgcctggagaggtcaggatggaactacctcattcggcaaattagccccaaattgagcgctgaatcgtgtcccatgagatcaggcgccatctgtaaagtctcctctggaaatgccaatccatccttcccccagctgcttcctcggggaggcccctgcccccaccctgccagcccttcccagtctcattagaggaagctttccaaagttctcagttatcaagacctcatccagctcgtccaaaggcttcagggatggaaacaaaccagctcgtctcagaggccagcaagctggggcctgtccgccacggtgccctgtgcacctttgggctgccctggcccccactctcccgggccgcccaccacaggctcttaatggggccgggtcagtcctacatgtgagatgggttagggcaagtctttgccatcccccagatggctctgtcttcttgtgtatggcagggctgggactgctgtcccttgtacagttttctgtcactggtgggcactggacaggcatagcagactctcttgtggccacactaggttgtcgcctttcaggcagtgtcccgccacctttgcttcccgctccttctggacattccagagccctgcaccaaacccttacttggtgtctgcacctcctttccctctctccatcttccaatccctggaaaagtctggtctgagtgtgacttgggaagctttcagtgctgctgtttggcccagctcattactttctccctttctctaccacagcaaacacattctccaccatgtcagtctaaagagtctaaaggggccgggagaagcatgagcgaggggcagattctagtcgggagcccatgccctggaaatccatctttcttcatctttcccattgaccactttgggtttgacctgcacatctgcagtgagggcagaattcaacaagcacaactcactggtctttcagtcaacgtgctagaaaccgatgacttattaatctctaattttttggcgcctctttcattgaatgagaattgctttcgtatagttcacattagaaaaatgcctaatatactaaagtaaacca

SEQ ID NO: 321605 - DNA, 1454 bp, Homo sapiens
agaaacattgcatctggaaagtccagaacaagttgttaatttcccagcaagcactggagcggatttggaaggaactatgcaatgtagtgggttctttgtgaaagaacagcaatgagcaaagccacaggaacctccgctggggtgcccagaacactggccctgggctagcgacttgcctcagccccatttcccggagaggctgccatgaagaggaagccggcggagtcttggtgctgagtctgagggcttcaggcaggacccaagactctcctctgaggtagcagcccccagagaaggttagctgttctctgatgaagcctggaatggtcccccctccgccgggagaagaaagccagacggtcatccttccacctggctggcagagctacctgtcgcctcagggccggcggtactatgtcaacacgaccaccaatgagaccacctgggaacgtcccagcagttctcctgggattccagccagccctggctctcacaggagctctctgcctccaacagtgaatggataccacgcatcagggaccccagcgcaccctccagagactgcccacatgagtgtccgaaaatccaccggtgattcccagaacctgggatcctcatcgccaagcaaaaagcagagcaaggaaaacaccatcacaataaactgtgtgacgttccctcacccagacacgatgccggaacagcagctgctgaaaccaaccgagtggagctactgcgactacttctgggctgataagaaggacccccaaggcaacggcaccgtggctgggtttgaactactgctccagaaacagctgaagggcaaacaaatgcagaaggaaatgtcagaattcatccgggaaaggataaagattgaagaagactatgcgaagaacttagctaagctctctcagaactccttggcttcacaggaggaaggctccttgggagaggcgtgggcccaggtgaagaagagcctggcggacgaagcagaagttcacctcaagttctctgccaagcttcacagcgaggtggagaagcccctgatgaacttccgtgagaacttcaagaaagacatgaagaagtgcgaccaccacattgccgaccttcgcaagcagctcgccagccgctatgcctcggtggagaaggcccggaaagccctcacagagcggcagagagacctggagatgaagacccagcagctggagatcaagctgagcaacaagacagaggaggacatcaagaaggcgcggagaaagtccacacaggctggtaagtgctgggcacccgcctggcctggtcagtgcacacagaaggagagggcacggggctaggagatgaggtgactggcgagggtgcatctctcctttgcaagactgcagcgaggaaattacttcccttgtttgccaggaggtaccccctcttcccttctctctgacccacacccagagatctca

SEQ ID NO: 321606 - DNA, 7733 bp, Homo sapiens
tcgagcggccgccccgggcaggtcccgagagctgggcgtgggaacagcgtggggtcagggagacccctgcttgccctggcccagaatatggtgacttaggattcagactgagcatccctgattccccagcgcctccaccctcagggaacctgaatggggggaaaaaatgtccaatatggagaacagctttgacgatgtttcttgcctctctccccagaacctgggatcctcatcgccaagcaaaaagcagagcaaggaaaacaccatcacaataaactgtgtgacgttccctcacccagacacgatgccggaacagcagctgctgaaaccaaccgagtggagctactgcgactacttctgggctgataagaaggacccccaaggcaacggcaccgtggctgggtttgaactactgctccagaaacagctgaagggcaaacaaatgcagaaggaaatgtcagaattcatccgggaaaggataaagattgaagaagactatgcgaagaacttagctaagctctctcagaactccttggcttcacaggaggaaggctccttgggagaggcgtgggcccaggtgaagaagagcctggcggacgaagcagaagttcacctcaagttctctgccaagcttcacagcgaggtggagaagcccctgatgaacttccgtgagaacttcaagaaagacatgaagaagtgcgaccaccacattgccgaccttcgcaagcagctcgccagccgctatgcctcggtggagaaggcccggaaagccctcacagagcggcagagagacctggagatgaagacccagcagctggagatcaagctgagcaacaagacagaggaggacatcaagaaggcgcggagaaagtccacacaggctggagacgacctcatgcgctgtgtggatctctacaaccaggcccagtccaaatggtttgaagagatggtgaccaccacattggagctagagcggctggaggtggagagggtagagatgatccggcagcacctgtgccagtacacgcagctgcggcatgaaacagacatgttcaaccaaagcacagtcgagcccgtggatcagctgcttcgaaaagtggacccggccaaagacagggagctgtgggtcagagagcacaagacgggcaacatccgccctgtggacatggagatctagatgggcctgtgcagcttcggggggtcctgctggggaggggggctgggctcccaccatggggcccatgccgagtggatgccccccaccctctctcctgggccactgaggagaggggagagagctggtgattccagaagggtgacccggacagcctagctgggggctcccccatattcccaggcccagaagacagacccacagccctgcccttgtctctgaggctgaagaccccctgactcccatgctgtgcttgccgctctgaaacaaacagaggctggaactttgtggtccttgccgagttttgtaggggtcactgtcacatgcttgtgccctggaagccccaaggctcttcctccagctggctcccttgtctccagggctttggaggatcagggtagggagggctctgtctctaagccaggtgtcaggatcagaatcatgggtagaaggtgccattcagctcacagccgcacccagaatcctttgcagccctccttctttatttttttcccattgcattctgggagtccacatctggctttctcagccactgttcatcaccaggggttttaggaggaaggcttggctcctgtcttcccagacccaccatgcctggagaggtcaggatggaactacctcattcggcaaattagccccaaattgagcgctgaatcgtgtcccatgagatcaggcgccatctgtaaagtctcctctggaaatgccaatccatccttcccccagctgcttcctcggggaggcccctgcccccaccctgccagcccttcccagtctcattagaggaagctttccaaagttctcagttatcaagacctcatccagctcgtccaaaggcttcagggatggaaacaaaccagctcgtctcagaggccagcaagctggggcctgtccgccacggtgccctgtgcacctttgggctgccctggcccccactctcccgggccgcccaccacaggctcttaatggggccgggtcagtcctacatgtgagatgggttagggcaagtctttgccatcccccagatggctctgtcttcttgtgtatggcagggctgggactgctgtcccttgtacagttttctgtcactggtgggcactggacaggcatagcagactctcttgtggccacactaggttgtcgcctttcaggcagtgtcccgccacctttgcttcccgctccttctggacattccagagccctgcaccaaacccttacttggtgtctgcacctcctttccctctctccatcttccaatccctggaaaagtctggtctgagtgtgacttgggaagctttcagtgctgctgtttggcccagctcattactttctccctttctctaccacagcaaacacattctccaccatgtcagtctaaagagtctaaaggggccgggagaagcatgagcgaggggcagattctagtcgggagcccatgccctggaaatccatctttcttcatctttcccattgaccactttgggtttgacctgcacatctgcagtgagggcagaattcaacaagcacaactcactggtctttcagtcaacgtgctagaaaccgatgacttattaatctctaattttttggcgcctctttcattgaatgagaattgctttcgtatagttcacattagaaaaatgcctaatatactaaagtaaaccaaacgttgtcacttttctcttgttcttgaaacattgcaaccaaaaaggtcagcacaaaggccttcacctacgtgaagacctcctggtaggatctgtccatgggatggagaaccactctgtccagatctggggttgggtcatgacaccagctaccaattttagaatattatttcttggtttctttatgaaaaatgggtgctagtggtaattgctttgtggcttagtaaactactctgtggatgatttccaaacattcaaagccaatagccttgttattaacaagatattttgagtacaatatggctcattgacttttccattacatctgaggattccagagtcctctgttcatccctgggatagagtgagccctcttgcgtcttccagggtagctcaggttggcccagtttgggccagtccatttttggaggtcactctttcccccctcatcccctcacctccttctctttacccccttcacgtacttcctttctttcttccctctgttattcattcatcaagcaggttaaagccattgtgctaagatctaatctgaggacactataatggccctgtcgtcagggaagcccgtgatcgctcgttttcaggggtcttaccggtcagcaaccttggcattgatacataggcactctacagaatttaagttttcagaggtaagtctgttgttctgattaatctgcattcattcagcgaatgctcaagacaagccaggcatgctgagaagcggcgctctagttgtatgtaagatgggcattcctctgctctcctctattctccatgtcgactgagaagagtataataagaacattgtaccctctccacacttaaccctctgggattctttattataatataaaccaccgtcgtgaggcatttacctgttggatggaaggtagacagcaacaagattttaatcacctggtcaccagaccctcacggcccatatccaattcgaatttcagaaatttctctgtttgctttaaataactctttacaaataagggtcgggcacggtggctcacgcctgtaatcccagctctttgggaggccgaggtgggcagatcacgaggtcaggagatcgagaccatcctggctaacatggtgaaaccccgtctctgctaaaaatacaaaaaattagccagatgtggtggtgcacacctgtagtcccaactattcggcaggctgaggcagtagaatcgcttgaacctgggaggcggagattgcagtgaaccaagatcgggccactgcactccagcttgggtgacagagcaagactccatctcaaaaaaattataaataactctttgcaaataggaaagtgaagctcaagggtaaccagtgaggctatgaaattgccagtgaattaagaccagggctagagtcaacagtccagaacccctatccgtatgaacaggggcccgtttctggttgaaatcaaggttaggatgcaactgagaaaataaaagactgcactttggagaggcaagcacgctatccgggttgttgttttgttttatgtcttggtgcttaggtgaggacttagctgggtttattcaaagtgggcgggtctgggctattcttgagaatgtcccttccatttctgagaacaagtcagccccttctacctgcctccacccaggagactgatgcacaagatctgtttgtgaaagcctgatttaaaaagaaaaaaaaaattccttaagccaaatggtgttccaagttggttgctgtgacaacctccaggaagagccacttgttaccctctattctttctagtgctttcagtcagtggcaacacataggccccttggaccgtggggatggcggccctgagattctgtcagtgggaccaccctgggcctcctttctacctccactcagcaccctgttggccaaggagaatttctgcggtgggaggcagtgctctgctagtcaggattgataaacagctgggcacaccgaaacagtgtaccaacgaattcaccaaccaggggtttctttccctaccctttgtgaaaaccaatcaattactagatgagtggatggatgcagaaaaatctgggctgagccaaagtcccttttggaaatacaagccataacattcgaaggacatcagcgaccttggcttgtttaggtgattttacttccagctgcaggtagtcttgacaaggagtgtttaaacagaaggctcaagatgcattccttgtgtaggtgggagagagcacttctaatgttaagtggggtacagatcagctgcccccccacgtagcctggacatcgtcttatccccataatccttgccatccctacaaggcccatcgccaccaccttttcccaggtttattgaggtatgattgacatccagtaaaattcaccctttggaaatatacagctctgtgaattttgacaaatttagtgtcttgtgaccatcaccaagatcaacctgtttttaaccctccaaaaaattcccttctcctgccctctttccctggcaaccctgattgattatctgatcctataattttgccttttctagaatgtcatataaatggagtcacactgatgtcgccttttgagtctggcatctttccctcagcttaatgcttttgagtcattcatgatgtgtgcgtgtggtttgttccttctccttgccgggaagtatttcattgcatgggcgtactactctgcttctttatttttacactgagcctttcgccctggaagttcttggcccagggtcttcaacttgtttgcacgaccacttccagcttgctgcttccttcagttccccaggctcctcctccaaatgccagctgtgcccacaagctgttcttagggctcacactcgccttttggcgcgtggtgggtttttggtagtgcagaaagaatccagggatgggaggggaagggacggatgggtgctcaattgctgctcacgtctgctgcaacctgaagcttgcatctcagccagcagatctgctcccttctgggacccaggcttcagtgtcacacggtccttggctatgtattgggcgttggaggctttgaaaggcgagcagaagcagcatggacaagaaggctggggctggccctggggctcatcatgatgctttcctggatctgttgcttcatctgcaagctgagggtgtttgttctagatgagtgtctcaggccaccggcaactgcatgtacctcctccctttctcatttccaatgatgtaccctgtacacgtgttcatgctgtgtctggctctcatctgcacaatcgtgcatagaattgcctcaagtcctggtgagagagatgccgtggtacttttccatttagattcaaatggagctaaaattaagagttttatgagctgttaagaatgaggtagtttctcctaggaccccccaaagacagtgcaagtaatgaccgtttggatctcattcgtcgatctttgatagtatgttctggagtctactccccaggagccaggacaggcgtgaagatggagtccttgtcgcagctggagccttgcctagctggtgatcacacagcctggcctgtacctgcaccccactggatggtggtacatggtggcagggacaggaccacacccagttaaggccagaccaggctgagtgtgacccctgaggtaaacactccactaagctgtgtcttgttcatgccccctgctcagtgaaaggtgagtcccgagaccagttgggtacctctctatgcgaaccagagacatttctggatccaggccaggtgaagattagggccaggaagcctgagcccccggggcctcaaggtagggagccgaagaggctgccaggactctgctgggttgaaatttgccggggaggactcttgtctccccctcaggagtatttttgttgaggctttcctggaggtgaagaagcaattcccattgcagcaggttagagcgagaatcagacagagggcaaaaaccaattcgcttctccccacgttctaaatgctggggcatggctgtcaggagggcttcctgggaggtgtctctgggggtggggtgaggttggggcgatggcctttggagattgcgtgtggtgttcaggactgttccttggtgtttgagggaaactttagtgggattgcagtggaatgtaaggtcagggcacgtgggtgctctctcggggtggggtgactgggagacctagagggaaagcctgctatgcagggggagagcacaggactggccctgctctgcggcctcctttgtcccataacctgaagttaagtcacatcccctgtcgggacctccgtgcactcatctgtcaagtgggggcgcttcccttccagcatcacctgcagcagacgggctctcgggagtcgtgggttccaggcagctgtgtggacccagggacagacattcaaagggacgccagccatccttggtgacaggggccccaacttagcatcccttcccttccgttaggaaggagatgaccggaagcaaccccttcacagacacgagcacatcggcaaaccctatgaaagtggaattttctaacaaaataaacttgcttgtttgatctgttttctgtaacttttgctaaatactttatacatttttcatgttaaagagccgtgtctcccgccagcactcctcaccccggtatgaatgtgtttcctccacattgtatatccttccaccctctggctgcctagatcagtaaataaaattgatgtaatataatttataagtaacactgttgaaaccctgatcccagtggaggctgtaacccacctgcccccgcaccacccccctgacccctgttaccgcatttgtgtgtattaatgctgaagaattaaatgtttaaagagttta

SEQ ID NO: 321607 - DNA, 8191 bp, Homo sapiens
agaaacattgcatctggaaagtccagaacaagttgttaatttcccagcaagcactggagcggatttggaaggaactatgcaatgtagtgggttctttgtgaaagaacagcaatgagcaaagccacaggaacctccgctggggtgcccagaacactggccctgggctagcgacttgcctcagccccatttcccggagaggctgccatgaagaggaagccggcggagtcttggtgctgagtctgagggcttcaggcaggacccaagactctcctctgaggtagcagcccccagagaaggttagctgttctctgatgaagcctggaatggtcccccctccgccgggagaagaaagccagacggtcatccttccacctggctggcagagctacctgtcgcctcagggccggcggtactatgtcaacacgaccaccaatgagaccacctgggaacgtcccagcagttctcctgggattccagccagccctggctctcacaggagctctctgcctccaacagtgaatggataccacgcatcagggaccccagcgcaccctccagagactgcccacatgagtgtccgaaaatccaccggtgattcccagaacctgggatcctcatcgccaagcaaaaagcagagcaaggaaaacaccatcacaataaactgtgtgacgttccctcacccagacacgatgccggaacagcagctgctgaaaccaaccgagtggagctactgcgactacttctgggctgataagaaggacccccaaggcaacggcaccgtggctgggtttgaactactgctccagaaacagctgaagggcaaacaaatgcagaaggaaatgtcagaattcatccgggaaaggataaagattgaagaagactatgcgaagaacttagctaagctctctcagaactccttggcttcacaggaggaaggctccttgggagaggcgtgggcccaggtgaagaagagcctggcggacgaagcagaagttcacctcaagttctctgccaagcttcacagcgaggtggagaagcccctgatgaacttccgtgagaacttcaagaaagacatgaagaagtgcgaccaccacattgccgaccttcgcaagcagctcgccagccgctatgcctcggtggagaaggcccggaaagccctcacagagcggcagagagacctggagatgaagacccagcagctggagatcaagctgagcaacaagacagaggaggacatcaagaaggcgcggagaaagtccacacaggctggagacgacctcatgcgctgtgtggatctctacaaccaggcccagtccaaatggtttgaagagatggtgaccaccacattggagctagagcggctggaggtggagagggtagagatgatccggcagcacctgtgccagtacacgcagctgcggcatgaaacagacatgttcaaccaaagcacagtcgagcccgtggatcagctgcttcgaaaagtggacccggccaaagacagggagctgtgggtcagagagcacaagacgggcaacatccgccctgtggacatggagatctagatgggcctgtgcagcttcggggggtcctgctggggaggggggctgggctcccaccatggggcccatgccgagtggatgccccccaccctctctcctgggccactgaggagaggggagagagctggtgattccagaagggtgacccggacagcctagctgggggctcccccatattcccaggcccagaagacagacccacagccctgcccttgtctctgaggctgaagaccccctgactcccatgctgtgcttgccgctctgaaacaaacagaggctggaactttgtggtccttgccgagttttgtaggggtcactgtcacatgcttgtgccctggaagccccaaggctcttcctccagctggctcccttgtctccagggctttggaggatcagggtagggagggctctgtctctaagccaggtgtcaggatcagaatcatgggtagaaggtgccattcagctcacagccgcacccagaatcctttgcagccctccttctttatttttttcccattgcattctgggagtccacatctggctttctcagccactgttcatcaccaggggttttaggaggaaggcttggctcctgtcttcccagacccaccatgcctggagaggtcaggatggaactacctcattcggcaaattagccccaaattgagcgctgaatcgtgtcccatgagatcaggcgccatctgtaaagtctcctctggaaatgccaatccatccttcccccagctgcttcctcggggaggcccctgcccccaccctgccagcccttcccagtctcattagaggaagctttccaaagttctcagttatcaagacctcatccagctcgtccaaaggcttcagggatggaaacaaaccagctcgtctcagaggccagcaagctggggcctgtccgccacggtgccctgtgcacctttgggctgccctggcccccactctcccgggccgcccaccacaggctcttaatggggccgggtcagtcctacatgtgagatgggttagggcaagtctttgccatcccccagatggctctgtcttcttgtgtatggcagggctgggactgctgtcccttgtacagttttctgtcactggtgggcactggacaggcatagcagactctcttgtggccacactaggttgtcgcctttcaggcagtgtcccgccacctttgcttcccgctccttctggacattccagagccctgcaccaaacccttacttggtgtctgcacctcctttccctctctccatcttccaatccctggaaaagtctggtctgagtgtgacttgggaagctttcagtgctgctgtttggcccagctcattactttctccctttctctaccacagcaaacacattctccaccatgtcagtctaaagagtctaaaggggccgggagaagcatgagcgaggggcagattctagtcgggagcccatgccctggaaatccatctttcttcatctttcccattgaccactttgggtttgacctgcacatctgcagtgagggcagaattcaacaagcacaactcactggtctttcagtcaacgtgctagaaaccgatgacttattaatctctaattttttggcgcctctttcattgaatgagaattgctttcgtatagttcacattagaaaaatgcctaatatactaaagtaaaccaaacgttgtcacttttctcttgttcttgaaacattgcaaccaaaaaggtcagcacaaaggccttcacctacgtgaagacctcctggtaggatctgtccatgggatggagaaccactctgtccagatctggggttgggtcatgacaccagctaccaattttagaatattatttcttggtttctttatgaaaaatgggtgctagtggtaattgctttgtggcttagtaaactactctgtggatgatttccaaacattcaaagccaatagccttgttattaacaagatattttgagtacaatatggctcattgacttttccattacatctgaggattccagagtcctctgttcatccctgggatagagtgagccctcttgcgtcttccagggtagctcaggttggcccagtttgggccagtccatttttggaggtcactctttcccccctcatcccctcacctccttctctttacccccttcacgtacttcctttctttcttccctctgttattcattcatcaagcaggttaaagccattgtgctaagatctaatctgaggacactataatggccctgtcgtcagggaagcccgtgatcgctcgttttcaggggtcttaccggtcagcaaccttggcattgatacataggcactctacagaatttaagttttcagaggtaagtctgttgttctgattaatctgcattcattcagcgaatgctcaagacaagccaggcatgctgagaagcggcgctctagttgtatgtaagatgggcattcctctgctctcctctattctccatgtcgactgagaagagtataataagaacattgtaccctctccacacttaaccctctgggattctttattataatataaaccaccgtcgtgaggcatttacctgttggatggaaggtagacagcaacaagattttaatcacctggtcaccagaccctcacggcccatatccaattcgaatttcagaaatttctctgtttgctttaaataactctttacaaataagggtcgggcacggtggctcacgcctgtaatcccagctctttgggaggccgaggtgggcagatcacgaggtcaggagatcgagaccatcctggctaacatggtgaaaccccgtctctgctaaaaatacaaaaaattagccagatgtggtggtgcacacctgtagtcccaactattcggcaggctgaggcagtagaatcgcttgaacctgggaggcggagattgcagtgaaccaagatcgggccactgcactccagcttgggtgacagagcaagactccatctcaaaaaaattataaataactctttgcaaataggaaagtgaagctcaagggtaaccagtgaggctatgaaattgccagtgaattaagaccagggctagagtcaacagtccagaacccctatccgtatgaacaggggcccgtttctggttgaaatcaaggttaggatgcaactgagaaaataaaagactgcactttggagaggcaagcacgctatccgggttgttgttttgttttatgtcttggtgcttaggtgaggacttagctgggtttattcaaagtgggcgggtctgggctattcttgagaatgtcccttccatttctgagaacaagtcagccccttctacctgcctccacccaggagactgatgcacaagatctgtttgtgaaagcctgatttaaaaagaaaaaaaaaattccttaagccaaatggtgttccaagttggttgctgtgacaacctccaggaagagccacttgttaccctctattctttctagtgctttcagtcagtggcaacacataggccccttggaccgtggggatggcggccctgagattctgtcagtgggaccaccctgggcctcctttctacctccactcagcaccctgttggccaaggagaatttctgcggtgggaggcagtgctctgctagtcaggattgataaacagctgggcacaccgaaacagtgtaccaacgaattcaccaaccaggggtttctttccctaccctttgtgaaaaccaatcaattactagatgagtggatggatgcagaaaaatctgggctgagccaaagtcccttttggaaatacaagccataacattcgaaggacatcagcgaccttggcttgtttaggtgattttacttccagctgcaggtagtcttgacaaggagtgtttaaacagaaggctcaagatgcattccttgtgtaggtgggagagagcacttctaatgttaagtggggtacagatcagctgcccccccacgtagcctggacatcgtcttatccccataatccttgccatccctacaaggcccatcgccaccaccttttcccaggtttattgaggtatgattgacatccagtaaaattcaccctttggaaatatacagctctgtgaattttgacaaatttagtgtcttgtgaccatcaccaagatcaacctgtttttaaccctccaaaaaattcccttctcctgccctctttccctggcaaccctgattgattatctgatcctataattttgccttttctagaatgtcatataaatggagtcacactgatgtcgccttttgagtctggcatctttccctcagcttaatgcttttgagtcattcatgatgtgtgcgtgtggtttgttccttctccttgccgggaagtatttcattgcatgggcgtactactctgcttctttatttttacactgagcctttcgccctggaagttcttggcccagggtcttcaacttgtttgcacgaccacttccagcttgctgcttccttcagttccccaggctcctcctccaaatgccagctgtgcccacaagctgttcttagggctcacactcgccttttggcgcgtggtgggtttttggtagtgcagaaagaatccagggatgggaggggaagggacggatgggtgctcaattgctgctcacgtctgctgcaacctgaagcttgcatctcagccagcagatctgctcccttctgggacccaggcttcagtgtcacacggtccttggctatgtattgggcgttggaggctttgaaaggcgagcagaagcagcatggacaagaaggctggggctggccctggggctcatcatgatgctttcctggatctgttgcttcatctgcaagctgagggtgtttgttctagatgagtgtctcaggccaccggcaactgcatgtacctcctccctttctcatttccaatgatgtaccctgtacacgtgttcatgctgtgtctggctctcatctgcacaatcgtgcatagaattgcctcaagtcctggtgagagagatgccgtggtacttttccatttagattcaaatggagctaaaattaagagttttatgagctgttaagaatgaggtagtttctcctaggaccccccaaagacagtgcaagtaatgaccgtttggatctcattcgtcgatctttgatagtatgttctggagtctactccccaggagccaggacaggcgtgaagatggagtccttgtcgcagctggagccttgcctagctggtgatcacacagcctggcctgtacctgcaccccactggatggtggtacatggtggcagggacaggaccacacccagttaaggccagaccaggctgagtgtgacccctgaggtaaacactccactaagctgtgtcttgttcatgccccctgctcagtgaaaggtgagtcccgagaccagttgggtacctctctatgcgaaccagagacatttctggatccaggccaggtgaagattagggccaggaagcctgagcccccggggcctcaaggtagggagccgaagaggctgccaggactctgctgggttgaaatttgccggggaggactcttgtctccccctcaggagtatttttgttgaggctttcctggaggtgaagaagcaattcccattgcagcaggttagagcgagaatcagacagagggcaaaaaccaattcgcttctccccacgttctaaatgctggggcatggctgtcaggagggcttcctgggaggtgtctctgggggtggggtgaggttggggcgatggcctttggagattgcgtgtggtgttcaggactgttccttggtgtttgagggaaactttagtgggattgcagtggaatgtaaggtcagggcacgtgggtgctctctcggggtggggtgactgggagacctagagggaaagcctgctatgcagggggagagcacaggactggccctgctctgcggcctcctttgtcccataacctgaagttaagtcacatcccctgtcgggacctccgtgcactcatctgtcaagtgggggcgcttcccttccagcatcacctgcagcagacgggctctcgggagtcgtgggttccaggcagctgtgtggacccagggacagacattcaaagggacgccagccatccttggtgacaggggccccaacttagcatcccttcccttccgttaggaaggagatgaccggaagcaaccccttcacagacacgagcacatcggcaaaccctatgaaagtggaattttctaacaaaataaacttgcttgtttgatctgttttctgtaacttttgctaaatactttatacatttttcatgttaaagagccgtgtctcccgccagcactcctcaccccggtatgaatgtgtttcctccacattgtatatccttccaccctctggctgcctagatcagtaaataaaattgatgtaatataatttataagtaacactgttgaaaccctgatcccagtggaggctgtaacccacctgcccccgcaccacccccctgacccctgttaccgcatttgtgtgtattaatgctgaagaattaaatgtttaaagagtttaaattttgaaggcgtttgctatatacagttgtcctgcattattataaagagttttcaggaagttaaaacccatc

SEQ ID NO: 321608 - DNA, 2010 bp, Homo sapiens
gacgtgcgcgctcaaaggttgcccgtctctgacgcccgcatttcctggtctggagccggctgagccacagcagggtcgccgcggggtcccggggccgtgctcccctgcccctcccgggagcgcgcggggcggggcggggcggggcgggaccaggcgggcgagctgggccctcgcccctccctcgggcggtcacctgggcacgggcgctgcaggtgtcggggcctcaaccttgcggagccgacagccatcgatcctcgggtggcctcgaggtggtggcagggccgccccctgcagtccggagacgaacgcacggaccgggcctccggaggcaggttcggctggaaggaaccgctctcgcttcgtcctacacttgcgcaaatgtctccgagcttactcacatagcatattggtatatcaaaatgaaatgcaaggaaccaaaaataacataattgaaggcagtaaaagtgaaattaaataggaagatcatcagtcaaggaagacccactggagaggacagaaaatgaagcagtgttttatcatgtgtatttcagcaggtcttcttgaaatttaactaaaaatatgactgctctctcttcagagaactgctcttttcagtaccagttacgtcaaacaaaccagcccctagatgttaactatctgctattcttgatcatacttgggaaaatattattaaatatccttacactaggaatgagaagaaaaaacacctgtcaaaattttatggaatatttttgcatttcactagcattcgttgatcttttacttttggtaaacatttccattatattgtatttcagggattttgtacttttaagcattaggttcactaaataccacatctgcctatttactcaaattatttcctttacttatggctttttgcattatccagttttcctgacagcttgtatagattattgcctgaatttctctaaaacaaccaagctttcatttaagtgtcaaaaattattttatttctttacagtaattttaatttggatttcagtccttgcttatgttttgggagacccagccatctaccaaagcctgaaggcacagaatgcttattctcgtcactgtcctttctatgtcagcattcagagttactggctgtcatttttcatggtgatgattttatttgtagctttcataacctgttgggaagaagttactactttggtacaggctatcaggataacttcctatatgaatgaaactatcttatattttcctttttcatcccactccagttatactgtgagatctaaaaaaatattcttatccaagctcattgtctgttttctcagtacctggttaccatttgtactacttcaggtaatcattgttttacttaaagttcagattccagcatatattgagatgaatattccctggttatactttgtcaatagttttctcattgctacagtgtattggtttaattgtcacaagcttaatttaaaagacattggattacctttggatccatttgtcaactggaagtgctgcttcattccacttacaattcctaatcttgagcaaattgaaaagcctatatcaataatgatttgttaatattattaattaaaagttacagctgtcataagatcataattttatgaacagaaagaactcaggacatattaaaaaataaactgaactaaaacaacttttgccccctgactgatagcatttcagaatgtgtcttttgaagggctatgataccagttattaaatagtgttttattttaaaaacaaaataattccaagaagtttttatagttattcagggacactatattacaaatattactttgttattaacacaaaaagtgataagagttaacatttggctatactgatgtttgtgttactcaaaaaaactactggatgcaaactgttatgtaaatctgagatttcactgacaactttaagatatcaacctaaacatttttattaaatgttcaaatgaaagcaagaaaaaaaaaa

SEQ ID NO: 321609 - DNA, 491 bp, Homo sapiens
gccggtgaaccttgatgctgtggtcgtctagaggatcccgtgattattatacaagtaactcaataatgatttgttaatattattaattaaaagttacagctgtcataagatcataattttatgaacagaaagaactcaggacatattaaaaaataaactgaactaaaacaacttttgccccctgactgatagcatttcagaatgtgtcttttgaagggctatgataccagttattaaatagtgttttattttaaaaacaaaataattccaagaagtttttatagttattcagggacactatattacaaatattactttgttattaacacaaaaagtgataagagttaacatttggctatactgatgtttgtgttactcaaaaaaactactggatgcaaactgttatgtaaatctgagatttcactgacaactttaagatatcaacctaaacatttttattaaatgttcaaatgaaagcaagaaaaaaaaaa

SEQ ID NO: 321610 - DNA, 2386 bp, Homo sapiens
  misc_feature (2386)..(2386): n is a, c, g, or t
gacgtgcgcgctcaaaggttgcccgtctctgacgcccgcatttcctggtctggagccggctgagccacagcagggtcgccgcggggtcccggggccgtgctcccctgcccctcccgggagcgcgcggggcggggcggggcggggcgggaccaggcgggcgagctgggccctcgcccctccctcgggcggtcacctgggcacgggcgctgcaggtgtcggggcctcaaccttgcggagccgacagccatcgatcctcgggtggcctcgaggtggtggcagggccgccccctgcagtccggagacgaacgcacggaccgggcctccggaggcaggttcggctggaaggaaccgctctcgcttcgtcctacacttgcgcaaatgtctccgagcttactcacatagcatattggtatatcaaaatgaaatgcaaggaaccaaaaataacataattgaaggcagtaaaagtgaaattaaataggaagatcatcagtcaaggaagacccactggagaggacagaaaatgaagcagtgttttatcatgtgtatttcagcaggtcttcttgaaatttaactaaaaatatgactgctctctcttcagagaactgctcttttcagtaccagttacgtcaaacaaaccagcccctagatgttaactatctgctattcttgatcatacttgggaaaatattattaaatatccttacactaggaatgagaagaaaaaacacctgtcaaaattttatggaatatttttgcatttcactagcattcgttgatcttttacttttggtaaacatttccattatattgtatttcagggattttgtacttttaagcattaggttcactaaataccacatctgcctatttactcaaattatttcctttacttatggctttttgcattatccagttttcctgacagcttgtatagattattgcctgaatttctctaaaacaaccaagctttcatttaagtgtcaaaaattattttatttctttacagtaattttaatttggatttcagtccttgcttatgttttgggagacccagccatctaccaaagcctgaaggcacagaatgcttattctcgtcactgtcctttctatgtcagcattcagagttactggctgtcatttttcatggtgatgattttatttgtagctttcataacctgttgggaagaagttactactttggtacaggctatcaggataacttcctatatgaatgaaactatcttatattttcctttttcatcccactccagttatactgtgagatctaaaaaaatattcttatccaagctcattgtctgttttctcagtacctggttaccatttgtactacttcaggtaatcattgttttacttaaagttcagattccagcatatattgagatgaatattccctggttatactttgtcaatagttttctcattgctacagtgtattggtttaattgtcacaagcttaatttaaaagacattggattacctttggatccatttgtcaactggaagtgctgcttcattccacttacaattcctaatcttgagcaaattgaaaagcctatatcaataatgatttgttaatattattaattaaaagttacagctgtcataagatcataattttatgaacagaaagaactcaggacatattaaaaaataaactgaactaaaatcaaaaaaaagaaagtatgagtagaataaaaatattgggggggcgtgggccaaaaaaagttttaaaccccatctgttgggggcggcgcgggcccccgagtggatagccgggaacatgggggcccacaagggtggttccacgaagaagaaacaccgggccaagagcacaggggcgcgtggggctctcccccccaattaaaaaaaggcagcgcggcgggacaccgcaccgtgtgtttgggaaccaatcccagaaggcgggtttcaggaggacaagtacgggctctcacacaccaggggagtccaagcgacccgatataaaataccggcgcccgtcggacgagaaccacaccacacacaacacacacaaacaccaacaccacacgcaaccccacccacaacccacacacaagacaagaagcaccacacatgaagcgagaaccaacgactaggcacaagcgagactgaccagccaacagcacaagaagcgccagcaaaatcggtacaaactacgtccgcagaccaagcacgacacacaccggacgaacgaacagaaaactgaaagatcaacaactaccgaaagcaacacaggaaaccaagcgaaaccgacaccaaaacacacacaacaacagagcaacacaagaaaaaacactagaccaacaaccacaaaaacaacaaatcaaaaccagcagacaagaaaccn

SEQ ID NO: 321611 - DNA, 1906 bp, Homo sapiens
ttatcgggctcaccaaatacagctgcagtatgaattccatcttctacacaacagtaaaccagaatgttcatgttcacagcgttcatctcccatcctgttgtctaacgcacatggtttttttaaacttttctaagattgcatgagattctgcaacacaactgattataaaaacacttgaagtttttacctttttttttactttccaactctcgtgaatgtacagaggactttccagaagctacatgatgtgtgatatttcagctgatgaaatgtagatgtatagagcttactcacatagcatattggtatatcaaaatgaaatgcaaggaaccaaaaataacataattgaaggcagtaaaagtgaaattaaataggaagatcatcagtcaaggaagacccactggagaggacagaaaatgaagcagtgttttatcatgtgtatttcagcaggtcttcttgaaatttaactaaaaatatgactgctctctcttcagagaactgctcttttcagtaccagttacgtcaaacaaaccagcccctagatgttaactatctgctattcttgatcatacttgggaaaatattattaaatatccttacactaggaatgagaagaaaaaacacctgtcaaaattttatggaatatttttgcatttcactagcattcgttgatcttttacttttggtaaacatttccattatattgtatttcagggattttgtacttttaagcattaggttcactaaataccacatctgcctatttactcaaattatttcctttacttatggctttttgcattatccagttttcctgacagcttgtatagattattgcctgaatttctctaaaacaaccaagctttcatttaagtgtcaaaaattattttatttctttacagtaattttaatttggatttcagtccttgcttatgttttgggagacccagccatctaccaaagcctgaaggcacagaatgcttattctcgtcactgtcctttctatgtcagcattcagagttactggctgtcatttttcatggtgatgattttatttgtagctttcataacctgttgggaagaagttactactttggtacaggctatcaggataacttcctatatgaatgaaactatcttatattttcctttttcatcccactccagttatactgtgagatctaaaaaaatattcttatccaagctcattgtctgttttctcagtacctggttaccatttgtactacttcaggtaatcattgttttacttaaagttcagattccagcatatattgagatgaatattccctggttatactttgtcaatagttttctcattgctacagtgtattggtttaattgtcacaagcttaatttaaaagacattggattacctttggatccatttgtcaactggaagtgctgcttcattccacttacaattcctaatcttgagcaaattgaaaagcctatatcaataatgatttgttaatattattaattaaaagttacagctgtcataagatcataattttatgaacagaaagaactcaggacatattaaaaaataaactgaactaaaacaacttttgccccctgactgatagcatttcagaatgtgtcttttgaagggctatgataccagttattaaatagtgttttattttaaaaacaaaataattccaagaagtttttatagttattcagggacactatattacaaatattactttgttattaacacaaaaagtgataagagttaacatttggctatactgatgtttgtgttactcaaaaaaactactggatgcaaactgttatgtaaatctgagatttcactgacaactttaagatatcaacctaaacatttttattaaatgttcaaatgaaagcaagaaaaaaaaaa

SEQ ID NO: 321612 - DNA, 2168 bp, Homo sapiens
gacgtgcgcgctcaaaggttgcccgtctctgacgcccgcatttcctggtctggagccggctgagccacagcagggtcgccgcggggtcccggggccgtgctcccctgcccctcccgggagcgcgcggggcggggcggggcggggcgggaccaggcgggcgagctgggccctcgcccctccctcgggcggtcacctgggcacgggcgctgcaggtgtcggggcctcaaccttgcggagccgacagccatcgatcctcgggtggcctcgaggtggtggcagggccgccccctgcagtccggagacgaacgcacggaccgggcctccggaggcaggttcggctggaaggaaccgctctcgcttcgtcctacacttgcgcaaatgtctccgagcttactcacatagcatattggtatatcaaaatgaaatgcaaggaaccaaaaataacataattgaaggcagtaaaagtgaaattaaataggaagatcatcagtcaaggaagacccactggagactgaaaccacctgttttcagagcttcaggaaaagacttaatctgaaggatcctgcagctaaaaagctttgaaaactgtgttaaggggccccataagcatcgcttctaaacttcactgacaaaagggactggggtcatgctgtctggagtcagagtgagggacagaaaatgaagcagtgttttatcatgtgtatttcagcaggtcttcttgaaatttaactaaaaatatgactgctctctcttcagagaactgctcttttcagtaccagttacgtcaaacaaaccagcccctagatgttaactatctgctattcttgatcatacttgggaaaatattattaaatatccttacactaggaatgagaagaaaaaacacctgtcaaaattttatggaatatttttgcatttcactagcattcgttgatcttttacttttggtaaacatttccattatattgtatttcagggattttgtacttttaagcattaggttcactaaataccacatctgcctatttactcaaattatttcctttacttatggctttttgcattatccagttttcctgacagcttgtatagattattgcctgaatttctctaaaacaaccaagctttcatttaagtgtcaaaaattattttatttctttacagtaattttaatttggatttcagtccttgcttatgttttgggagacccagccatctaccaaagcctgaaggcacagaatgcttattctcgtcactgtcctttctatgtcagcattcagagttactggctgtcatttttcatggtgatgattttatttgtagctttcataacctgttgggaagaagttactactttggtacaggctatcaggataacttcctatatgaatgaaactatcttatattttcctttttcatcccactccagttatactgtgagatctaaaaaaatattcttatccaagctcattgtctgttttctcagtacctggttaccatttgtactacttcaggtaatcattgttttacttaaagttcagattccagcatatattgagatgaatattccctggttatactttgtcaatagttttctcattgctacagtgtattggtttaattgtcacaagcttaatttaaaagacattggattacctttggatccatttgtcaactggaagtgctgcttcattccacttacaattcctaatcttgagcaaattgaaaagcctatatcaataatgatttgttaatattattaattaaaagttacagctgtcataagatcataattttatgaacagaaagaactcaggacatattaaaaaataaactgaactaaaacaacttttgccccctgactgatagcatttcagaatgtgtcttttgaagggctatgataccagttattaaatagtgttttattttaaaaacaaaataattccaagaagtttttatagttattcagggacactatattacaaatattactttgttattaacacaaaaagtgataagagttaacatttggctatactgatgtttgtgttactcaaaaaaactactggatgcaaactgttatgtaaatctgagatttcactgacaactttaagatatcaacctaaacatttttattaaatgttcaaatgaaagcaagaaaaaaaaaa

SEQ ID NO: 321613 - DNA, 1385 bp, Homo sapiens
gacgtgcgcgctcaaaggttgcccgtctctgacgcccgcatttcctggtctggagccggctgagccacagcagggtcgccgcggggtcccggggccgtgctcccctgcccctcccgggagcgcgcggggcggggcggggcggggcgggaccaggcgggcgagctgggccctcgcccctccctcgggcggtcacctgggcacgggcgctgcaggtgtcggggcctcaaccttgcggagccgacagccatcgatcctcgggtggcctcgaggtggtggcagggccgccccctgcagtccggagacgaacgcacggaccgggcctccggaggcaggttcggctggaaggaaccgctctcgcttcgtcctacacttgcgcaaatgtctccgccttcaggaggagaactccgttacacgtcacgaagtcaaatgccaggggaaaccattagctggaatccacaggaaaagaatgcaacacggagcacgaagcccaagcacagaagatcaaagacgccaggagaggacccctcgcaccttttccaaaccaaaaatgtgaagcagcagaacttccaaaacctccggcctcgtcttgtgattccaccaatgcagccatcgccaagcaagccttgaaatagcccatcaagggcaaacaggcccccgaaaaaaagctcaaggaaaagtcgcaaactcacggatttctaccctgtcccaaggagctccaggaagggcaaagcggagctgcaatttgaagaaagggaaagaatagatgaattggttgaaagcggaaaggaaagaaggagtgaagactgacctcatcaatgacaaaggccgggtgtgaacaccagagggagctctcccggggcgcctttgtggtagaaaagcaccggagcctcacggagatcaccgacgccacgggacccctccatggtggatctccgtggatctccacagttgaacgttttgtgcttcccatgcatgcagtcaaaaatgctgggattacaggcgtgaaccaccgcacccagctatgcaggacccattcttactgagtgagactcgggagtcatgacctggtgtctcctgcccaccctggtcccaggtaaatctgaatggaagcaggtatgagagcctgtcctcgcctttgattcccccaccccaccctgggcctcacaacggtgctacctaagaaagtctcttcccccagtcagcctggtgagtggtcagccgaagaggatctgacgggagtgtagatgtgagatagtatctttgttgtacctgtttgtggtttagctttgtatttaaacaaatgaggaaataaacttgaaaattatttgtcatcataaagttgaaacaaaaattattttaaaaaataaagttttattttaaaataa

SEQ ID NO: 321614 - DNA, 710 bp, Homo sapiens
accagaatgttcatgttcacagcgttcatctcccatcctgttgtctaacgcacatggtttttttaaacttttctaagattgcatgagattctgcaacacaactgattataaaaacacttgaagtttttacctttttttttactttccaactctcgtgaatgtacagaggactttccagaagctacatgatgtgtgatatttcagctgatgaaatgtagatgtataggtaatcggtcagagtggtgggagaaactgttgggaaaggagcaggccttctgaaaggtcggaaggcttcaggggagaataagctgaacgcagctgttctctgaccttgaggcagagggcaaggagtaggtacaaggacgtgtaggagaatttatcttaaataggcttgttcacttgtgttgtccagaaacgacttttgatcatcagcgcgcatgactgctccctgaaaggaagaacaataatgttaattacccgcagactgtgtttgctccaggctttcggcattatgtctgtactgaataaaagcaagcagctccagctgttcgaggctgctctcttcttcagccattagtgccgggcagcccactagctgctgttacactgcatatctgtgtctgagtactcctttcttcagttgcttggccagggtctgtgggacagacccagcagctggtgccctgtgtgaggaacgctgcaatggatcg

SEQ ID NO: 321615 - DNA, 1687 bp, Homo sapiens
gacgtgcgcgctcaaaggttgcccgtctctgacgcccgcatttcctggtctggagccggctgagccacagcagggtcgccgcggggtcccggggccgtgctcccctgcccctcccgggagcgcgcggggcggggcggggcggggcgggaccaggcgggcgagctgggccctcgcccctccctcgggcggtcacctgggcacgggcgctgcaggtgtcggggcctcaaccttgcggagccgacagccatcgatcctcgggtggcctcgaggtggtggcagggccgccccctgcagtccggagacgaacgcacggaccgggcctccggaggcaggttcggctggaaggaaccgctctcgcttcgtcctacacttgcgcaaatgtctccgagcttactcacatagcatattggtatatcaaaatgaaatgcaaggaaccaaaaataacataattgaaggcagtaaaagtgaaattaaataggaagatcatcagtcaaggaagacccactggagaggacagaaaatgaagcagtgttttatcatgtgtatttcagcaggtcttcttgaaatttaactaaaaatatgactgctctctcttcagagaactgctcttttcagtaccagttacgtcaaacaaaccagcccctagatgttaactatctgctattcttgatcatacttgggaaaatattattaaatatccttacactaggaatgagaagaaaaaacacctgtcaaaattttatggaatatttttgcatttcactagcattcgttgatcttttacttttggtaaacatttccattatattgtatttcagggattttgtacttttaagcattaggttcactaaataccacatctgcctatttactcaaattatttcctttacttatggctttttgcattatccagttttcctgacagcttgtatagattattgcctgaatttctctaaaacaaccaagctttcatttaagtgtcaaaaattattttatttctttacagtaattttaatttggatttcagtccttgcttatgttttgggagacccagccatctaccaaagcctgaaggcacagaatgcttattctcgtcactgtcctttctatgtcagcattcagagttactggctgtcatttttcatggtgatgattttatttgtagctttcataacctgttgggaagaagttactactttggtacaggctatcaggataacttcctatatgaatgaaactatcttatattttcctttttcatcccactccagttatactgtgagatctaaaaaaatattcttatccaagctcattgtctgttttctcagtacctggttaccatttgtactacttcaggtaatcattgttttacttaaagttcagattccagcatatattgagatgaatattccctggttatactttgtcaatagttttctcattgctacagtgtattggtttaattgtcacaagcttaatttaaaagacattggattacctttggatccatttgtcaactggaagtgctgcttcattccacttacaattcctaatcttgagcaaattgaaaagcctatatcaataatgatttgttaatattattaattaaaagttacagctgtcataagatcataattttatgaacagaaagaactcaggacatattaaaaaataaactgaactaaaa

SEQ ID NO: 321616 - DNA, 1674 bp, Homo sapiens
ccagtggcttgggagctggagcaggtggtggaggcctgaaatgactacttgagcttactcacatagcatattggtatatcaaaatgaaatgcaaggaaccaaaaataacataattgaaggcagtaaaagtgaaattaaataggaagatcatcagtcaaggaagacccactggagaggacagaaaatgaagcagtgttttatcatgtgtatttcagcaggtcttcttgaaatttaactaaaaatatgactgctctctcttcagagaactgctcttttcagtaccagttacgtcaaacaaaccagcccctagatgttaactatctgctattcttgatcatacttgggaaaatattattaaatatccttacactaggaatgagaagaaaaaacacctgtcaaaattttatggaatatttttgcatttcactagcattcgttgatcttttacttttggtaaacatttccattatattgtatttcagggattttgtacttttaagcattaggttcactaaataccacatctgcctatttactcaaattatttcctttacttatggctttttgcattatccagttttcctgacagcttgtatagattattgcctgaatttctctaaaacaaccaagctttcatttaagtgtcaaaaattattttatttctttacagtaattttaatttggatttcagtccttgcttatgttttgggagacccagccatctaccaaagcctgaaggcacagaatgcttattctcgtcactgtcctttctatgtcagcattcagagttactggctgtcatttttcatggtgatgattttatttgtagctttcataacctgttgggaagaagttactactttggtacaggctatcaggataacttcctatatgaatgaaactatcttatattttcctttttcatcccactccagttatactgtgagatctaaaaaaatattcttatccaagctcattgtctgttttctcagtacctggttaccatttgtactacttcaggtaatcattgttttacttaaagttcagattccagcatatattgagatgaatattccctggttatactttgtcaatagttttctcattgctacagtgtattggtttaattgtcacaagcttaatttaaaagacattggattacctttggatccatttgtcaactggaagtgctgcttcattccacttacaattcctaatcttgagcaaattgaaaagcctatatcaataatgatttgttaatattattaattaaaagttacagctgtcataagatcataattttatgaacagaaagaactcaggacatattaaaaaataaactgaactaaaacaacttttgccccctgactgatagcatttcagaatgtgtcttttgaagggctatgataccagttattaaatagtgttttattttaaaaacaaaataattccaagaagtttttatagttattcagggacactatattacaaatattactttgttattaacacaaaaagtgataagagttaacatttggctatactgatgtttgtgttactcaaaaaaactactggatgcaaactgttatgtaaatctgagatttcactgacaactttaagatatcaacctaaacatttttattaaatgttcaaatgaaagcaagaaaaaaaaaa

SEQ ID NO: 321617 - DNA, 1737 bp, Homo sapiens
agaagctggtggcaacttcactggggagatattgcaaataacagcgggaacatgaagccgccactcttggtgtttattgtgtgtctgctgtggttgaaagacagtcactgcgcacccacttggaaggacaaaactgctatcagtgaaaacctgaagagtttttctgaggtgggggagatagatgcagatgaagaggtgaagaaggctttgactggtattaagcaaatgaaaatcatgatggaaagaaaagagaaggaacacaccaatctaatgagcaccctgaagaaatgcagagaagaaaagcaggaggccctgaaacttctgaatgaagttcaagaacatctggaggaagaagaaaggctatgccgggagtctttggcagattcctggggtgaatgcaggtcttgcctggaaaataactgcatgagaatttatacaacctgccaacctagctggtcctctgtgaaaaataagattgaacggtttttcaggaagatatatcaatttctatttcctttccatgaagataatgaaaaagatctccccatcagtgaaaagctcattgaggaagatgcacaattgacccaaatggaggatgtgttcagccagttgactgtggatgtgaattctctctttaacaggagttttaacgtcttcagacagatgcagcaagagtttgaccagacttttcaatcacatttcatatcagatacagacctaactgagccttacttttttccagctttctctaaagagccgatgacaaaagcagatcttgagcaatgttgggacattcccaacttcttccagctgttttgtaatttcagtgtctctatttatgaaagtgtcagtgaaacaattactaagatgctgaaggcaatagaagatttaccaaaacaagacaaagctcctgaccacggaggcctgatttcaaagatgttacctgggcaggacagaggactgtgtggggaacttgaccagaatttgtcaagatgtttcaaatttcatgaaaaatgccaaaaatgtcaggctcacctatctgaagactgtcctgatgtacctgctctgcacacagaattagacgaggcgatcaggttggtcaatgtatccaatcagcagtatggccagattctccagatgacccggaagcacttggaggacaccgcctatctggtggagaagatgagagggcaatttggctgggtgtctgaactggcaaaccaggccccagaaacagagatcatctttaattcaatacaggtagttccaaggattcatgaaggaaatatttccaaacaagatgaaacaatgatgacagacttaagcattctgccttcctctaatttcacactcaagatccctcttgaagaaagtgctgagagttctaacttcattggctacgtagtggcaaaagctctacagcattttaaggaacattttaaaacctggtaagaagatctaatgcatcctatatccagtaagtagaattatctcttcatctgggacctggaaatcctgaaataaaaaaggataatgcaataaacacagttgcaggaaagtatgttagctatatactatgaagtactcttagtttacttatgttgaatggcttagctattaatactcaaattgagttaaaatgaaaattcctccttaaaaaatcaaacgtaatatgtattacatttcatggtacattagtagttctttgtatattgaataaatactaaatcacctaaa

SEQ ID NO: 321618 - DNA, 1837 bp, Homo sapiens
tgcgtcacctgcaggcccgggccgcggggttggtttccaccctggaggttgctgacaccctgtgccctcggctgacttccagccggtggcacagacgcctccagggggcagcactcaagcgcatcttaggaatgacagtaacagcgggaacatgaagccgccactcttggtgtttattgtgtgtctgctgtggttgaaagacagtcactgcgcacccacttggaaggacaaaactgctatcagtgaaaacctgaagagtttttctgaggtgggggagatagatgcagatgaagaggtgaagaaggctttgactggtattaagcaaatgaaaatcatgatggaaagaaaagagaaggaacacaccaatctaatgagcaccctgaagaaatgcagagaagaaaagcaggaggccctgaaacttctgaatgaagttcaagaacatctggaggaagaagaaaggctatgccgggagtctttggcagattcctggggtgaatgcaggtcttgcctggaaaataactgcatgagaatttatacaacctgccaacctagctggtcctctgtgaaaaataagattgaacggtttttcaggaagatatatcaatttctatttcctttccatgaagataatgaaaaagatctccccatcagtgaaaagctcattgaggaagatgcacaattgacccaaatggaggatgtgttcagccagttgactgtggatgtgaattctctctttaacaggagttttaacgtcttcagacagatgcagcaagagtttgaccagacttttcaatcacatttcatatcagatacagacctaactgagccttacttttttccagctttctctaaagagccgatgacaaaagcagatcttgagcaatgttgggacattcccaacttcttccagctgttttgtaatttcagtgtctctatttatgaaagtgtcagtgaaacaattactaagatgctgaaggcaatagaagatttaccaaaacaagacaaagctcctgaccacggaggcctgatttcaaagatgttacctgggcaggacagaggactgtgtggggaacttgaccagaatttgtcaagatgtttcaaatttcatgaaaaatgccaaaaatgtcaggctcacctatctgaagactgtcctgatgtacctgctctgcacacagaattagacgaggcgatcaggttggtcaatgtatccaatcagcagtatggccagattctccagatgacccggaagcacttggaggacaccgcctatctggtggagaagatgagagggcaatttggctgggtgtctgaactggcaaaccaggccccagaaacagagatcatctttaattcaatacaggtagttccaaggattcatgaaggaaatatttccaaacaagatgaaacaatgatgacagacttaagcattctgccttcctctaatttcacactcaagatccctcttgaagaaagtgctgagagttctaacttcattggctacgtagtggcaaaagctctacagcattttaaggaacattttaaaacctggtaagaagatctaatgcatcctatatccagtaagtagaattatctcttcatctgggacctggaaatcctgaaataaaaaaggataatgcaataaacacagttgcaggaaagtatgttagctatatactatgaagtactcttagtttacttatgttgaatggcttagctattaatactcaaattgagttaaaatgaaaattcctccttaaaaaatcaaacgtaatatgtattacatttcatggtacattagtagttctttgtatattgaataaatactaaatcacctaaa

SEQ ID NO: 321619 - DNA, 1959 bp, Homo sapiens
tgcgtcacctgcaggcccgggccgcggggttggtttccaccctggaggttgctgacaccctgtgccctcggctgacttccagccggtggcacagacgcctccagggggcagcactcaagcgcatcttaggaatgacagagttgcgtccctctcggttgccaggctggagttcagtggcatgttcatagctcactgaagcctcaaattcctgggttcaagtgaccctcctacctcagccccatgaggacctgggactacagtaacagcgggaacatgaagccgccactcttggtgtttattgtgtgtctgctgtggttgaaagacagtcactgcgcacccacttggaaggacaaaactgctatcagtgaaaacctgaagagtttttctgaggtgggggagatagatgcagatgaagaggtgaagaaggctttgactggtattaagcaaatgaaaatcatgatggaaagaaaagagaaggaacacaccaatctaatgagcaccctgaagaaatgcagagaagaaaagcaggaggccctgaaacttctgaatgaagttcaagaacatctggaggaagaagaaaggctatgccgggagtctttggcagattcctggggtgaatgcaggtcttgcctggaaaataactgcatgagaatttatacaacctgccaacctagctggtcctctgtgaaaaataagattgaacggtttttcaggaagatatatcaatttctatttcctttccatgaagataatgaaaaagatctccccatcagtgaaaagctcattgaggaagatgcacaattgacccaaatggaggatgtgttcagccagttgactgtggatgtgaattctctctttaacaggagttttaacgtcttcagacagatgcagcaagagtttgaccagacttttcaatcacatttcatatcagatacagacctaactgagccttacttttttccagctttctctaaagagccgatgacaaaagcagatcttgagcaatgttgggacattcccaacttcttccagctgttttgtaatttcagtgtctctatttatgaaagtgtcagtgaaacaattactaagatgctgaaggcaatagaagatttaccaaaacaagacaaagctcctgaccacggaggcctgatttcaaagatgttacctgggcaggacagaggactgtgtggggaacttgaccagaatttgtcaagatgtttcaaatttcatgaaaaatgccaaaaatgtcaggctcacctatctgaagactgtcctgatgtacctgctctgcacacagaattagacgaggcgatcaggttggtcaatgtatccaatcagcagtatggccagattctccagatgacccggaagcacttggaggacaccgcctatctggtggagaagatgagagggcaatttggctgggtgtctgaactggcaaaccaggccccagaaacagagatcatctttaattcaatacaggtagttccaaggattcatgaaggaaatatttccaaacaagatgaaacaatgatgacagacttaagcattctgccttcctctaatttcacactcaagatccctcttgaagaaagtgctgagagttctaacttcattggctacgtagtggcaaaagctctacagcattttaaggaacattttaaaacctggtaagaagatctaatgcatcctatatccagtaagtagaattatctcttcatctgggacctggaaatcctgaaataaaaaaggataatgcaataaacacagttgcaggaaagtatgttagctatatactatgaagtactcttagtttacttatgttgaatggcttagctattaatactcaaattgagttaaaatgaaaattcctccttaaaaaatcaaacgtaatatgtattacatttcatggtacattagtagttctttgtatattgaataaatactaaatcacctaaa

SEQ ID NO: 321620 - DNA, 788 bp, Homo sapiens
gcacccttcatcagtttatttccagagttcttttgtccaagtataagaaaatacagaaatatatcctgattttgttttccatccctttttacccaaaaagatagcatagcctactgaatactctgttcttcactttgctctttttttcactaaatatatcttggagatcttcctgcatcactaacatggagagtatcctctgtcttttcatagccatatggttaaaatgaatgtgtagatgtacctccgtttacttaacctgaaccttctggatggacatattggttatttactgccctttgctgttacacacagtgctgcagtgaacaacttgatacatgattttgttttgcctgtgaacaagtccatatttaggagaaagtctcagaagtagaacagctggactggagcataaaaaagcacttgtaattttgagattgccagattgccctccataagaattataccagtttacttcccactggcaataattacaaatacttgttccctcatatccttgctaccagaatgttaaaatttgcatttatatcagtctgacagatgaaaaaatggtatttcagtatacagtcatccctcgtcatcagcggtgtgtggggcggcgggggcggttccagaacccttcccagatactagaatctgcagaaggttaagtcctgcagttggccctgtggaatctgtggattagacaagttggccctccctatctgcaggttccacatccttgaatactctgttttccatctgaagttggttgtagccatggatat

SEQ ID NO: 321621 - DNA, 1224 bp, Homo sapiens
acccaactcgatgcttgtgccaggccttggccagtttggacggtgatggaaacatttctggattttagcgtctaagggagcactcaagggctgtaaggtttgctatcactgtcccaacactgcagagaccttgaaggttcagtgtgggatctgtagaacccatggtttgcggtgacactcagaggggatctttgggagatttatagagccggttcttagcgctttgtgggttcagaggctggctgcagtgtttatgaagaggggcagtgggctggggacactgctggggttatggctgtagtgaggtccatgtgtacttgttccttggcatgtgtctgactctgtgttgctgctgcagtacagtgggcaggggcacggttgcttggactgggctgcccgatgtctggcatggctggtggtcctgttgtcctttatttgatcgatagcagggaactgaccgccgaggttggcacaggttggcagggggatgaggatgcattgtggttgtctcctcctcctctccttcttcctcttccccttcctcctctcctttctgttcttgttctccctcatcttcctcttccttcttctccctcttcttcctcttcactctgctctcttctcttcttttcccctttcctctcctctccctttcctcaggtcacagcggagtgaatcagctcggtggtgtctttgtcaacgggcggccactgccggactccacccggcagaagattgtagagctagctcacagcggggcccggccgtgcgacatttcccgaattctgcaggtgtccaacggatgtgtgagtaaaattctgggcaggtattacgagactggctccatcagacccagggcaatcggtggtagtaaaccgagagtagcgactccagaagttgtaagcaaaatagcccagtataagcgggagtgcccgtccatctttgcttgggaaatccgagacagattactgtccgagggggtctgtaccaacgataacataccaagcgtaagttcattgagaacatctgccctccctgccctaagcccaatgctctctcctctttacctcctcccaccctctctctccactgtctcttagtctgtgtcctctccctgctccacatttgtctcctttgtacctgggggaacagagaggaatgccctgacttttctttgactgtctggaaaatgggagtcaagtgtggggagtcattcacttcatt

SEQ ID NO: 321622 - DNA, 3345 bp, Homo sapiens
gcatgttgcggagtgattagtgggtttgaaaagggaaccgtgggctcggcctcatttcccgctctggttcaggcgcaggaggaagtgttttgctggaggatgatgacagaggtcaggcttcgctaatgggccagtgaggagcggtggaggcgaggccgggcgccgcacacacacattaacacacttgagccatcaccaatcagcataggaatctgagaattgctctcacacaccaacccagcaacatccgtggagaaaactctcaccagcaactcctttaaaacaccgtcatttcaaaccattgtggtcttcaagcaacaacagcagcacaaaaaaccccaaccaaacaaaactcttgacagaagctgtgacaaccagaaaggatgcctcataaagggggaagactttaactaggggcgcgcagatgtgtgaggccttttattgtgagagtggacagacatccgagatttcagagccccatattcgagccccgtggaatcccgcggcccccagccagagccagcatgcagaacagtcacagcggagtgaatcagctcggtggtgtctttgtcaacgggcggccactgccggactccacccggcagaagattgtagagctagctcacagcggggcccggccgtgcgacatttcccgaattctgcaggtgtccaacggatgtgtgagtaaaattctgggcaggtattacgagactggctccatcagacccagggcaatcggtggtagtaaaccgagagtagcgactccagaagttgtaagcaaaatagcccagtataagcgggagtgcccgtccatctttgcttgggaaatccgagacagattactgtccgagggggtctgtaccaacgataacataccaagcgtgtcatcaataaacagagttcttcgcaacctggctagcgaaaagcaacagatgggcgcagacggcatgtatgataaactaaggatgttgaacgggcagaccggaagctggggcacccgccctggttggtatccggggacttcggtgccagggcaacctacgcaagatggctgccagcaacaggaaggagggggagagaataccaactccatcagttccaacggagaagattcagatgaggctcaaatgcgacttcagctgaagcggaagctgcaaagaaatagaacatcctttacccaagagcaaattgaggccctggagaaagagtttgagagaacccattatccagatgtgtttgcccgagaaagactagcagccaaaatagatctacctgaagcaagaatacaggtatggttttctaatcgaagggccaaatggagaagagaagaaaaactgaggaatcagagaagacaggccagcaacacacctagtcatattcctatcagcagtagtttcagcaccagtgtctaccaaccaattccacaacccaccacaccggtttcctccttcacatctggctccatgttgggccgaacagacacagccctcacaaacacctacagcgctctgccgcctatgcccagcttcaccatggcaaataacctgcctatgcaacccccagtccccagccagacctcctcatactcctgcatgctgcccaccagcccttcggtgaatgggcggagttatgatacctacacccccccacatatgcagacacacatgaacagtcagccaatgggcacctcgggcaccacttcaacaggactcatttcccctggtgtgtcagttccagttcaagttcccggaagtgaacctgatatgtctcaatactggccaagattacagtaaaaaaaaaaaaaaaaaaaaaaaggaaaggaaatattgtgttaattcagtcagtgactatggggacacaacagttgagctttcaggaaagaaagaaaaatggctgttagagccgcttcagttctacaattgtgtcctgtattgtaccactggggaaggaatggacttgaaacaaggacctttgtatacagaaggcacgatatcagttggaacaaatcttcattttggtatccaaacttttattcattttggtgtattatttgtaaatgggcatttgtatgttataatgaaaaaaagaacaatgtagactggatggatgtttgatctgtgttggtcatgaagttgttttttttttttttaaaaagaaaaccatgatcaacaagctttgccacgaatttaagagttttatcaagatatatcgaatacttctacccatctgttcatagtttatggactgatgttccaagtttgtatcattcctttgcatataattaaacctggaacaacatgcactagatttatgtcagaaatatctgttggttttccaaaggttgttaacagatgaagtttatgtgcaaaaaagggtaagatataaattcaaggaagaaaaaaagttgatagctaaaaggtagagtgtgtcttcgatataatccaatttgttttatgtcaaaatgtaagtatttgtcttccctagaaatcctcagaatgatttctataataaagttaatttcatttatatttgacaagaatatagatgttttatacacattttcatgcaatcatacgtttcttttttggccagcaaaagttaattgttcttagatatagttgtattactgttcacggtccaatcattttgtgcatctagagttcattcctaatcaattaaaagtgcttgcaagagttttaaacttaagtgttttgaagttgttcacaactacatatcaaaattaaccattgttgattgtaaaaaaccatgccaaagcctttgtatttcctttattatacagttttctttttaaccttatagtgtggtgttacaaattttatttccatgttagatcaacattctaaaccaatggttactttcacacacactctgttttacatcctgatgatccttaaaaaataatccttatagataccataaatcaaaaacgtgttagaaaaaaattccacttacagctgggtgtagatctgtgcccatttatacccacaacatatatacaaaatggtaacatttcccagttagccatttaattctaaagctcaaagtctagaaataatttaaaaatgcaacaagcgattagctaggaattgttttttgaattaggactggcattttcaatctgggcagatttccattgtcagcctatttcaacaatgatttcactgaagtatattcaaaagtagatttcttaaaggagactttctgaaagctgttgcctttttcaaataggccctctcccttttctgtctccctcccctttgcacaagaggcatcatttcccattgaaccactacagctgttcccatttgaatcttgctttctgtg

SEQ ID NO: 321623 - DNA, 2798 bp, Homo sapiens
gcatgttgcggagtgattagtgggtttgaaaagggaaccgtgggctcggcctcatttcccgctctggttcaggcgcaggaggaagtgttttgctggaggatgatgacagaggtcaggcttcgctaatgggccagtgaggagcggtggaggcgaggccgggcgccgcacacacacattaacacacttgagccatcaccaatcagcataggtgtgctggctgcagccacttccctcacccacactctttatctctcactctccagccgctgacagcccattttattgtcaatctctgtctccttcccaggaatctgagaattgctctcacacaccaacccagcaacatccgtggagaaaactctcaccagcaactcctttaaaacaccgtcatttcaaaccattgtggtcttcaagcaacaacagcagcacaaaaaaccccaaccaaacaaaactcttgacagaagctgtgacaaccagaaaggatgcctcataaagggggaagactttaactaggggcgcgcagatgtgtgaggccttttattgtgagagtggacagacatccgagatttcagagccccatattcgagccccgtggaatcccgcggcccccagccagagccagcatgcagaacagtcacagcggagtgaatcagctcggtggtgtctttgtcaacgggcggccactgccggactccacccggcagaagattgtagagctagctcacagcggggcccggccgtgcgacatttcccgaattctgcaggtgtccaacggatgtgtgagtaaaattctgggcaggtattacgagactggctccatcagacccagggcaatcggtggtagtaaaccgagagtagcgactccagaagttgtaagcaaaatagcccagtataagcgggagtgcccgtccatctttgcttgggaaatccgagacagattactgtccgagggggtctgtaccaacgataacataccaagcgtgtcatcaataaacagagttcttcgcaacctggctagcgaaaagcaacagatgggcgcagacggcatgtatgataaactaaggatgttgaacgggcagaccggaagctggggcacccgccctggttggtatccggggacttcggtgccagggcaacctacgcaagatggctgccagcaacaggaaggagggggagagaataccaactccatcagttccaacggagaagattcagatgaggctcaaatgcgacttcagctgaagcggaagctgcaaagaaatagaacatcctttacccaagagcaaattgaggccctggagaaagagtttgagagaacccattatccagatgtgtttgcccgagaaagactagcagccaaaatagatctacctgaagcaagaatacaggtatggttttctaatcgaagggccaaatggagaagagaagaaaaactgaggaatcagagaagacaggccagcaacacacctagtcatattcctatcagcagtagtttcagcaccagtgtctaccaaccaattccacaacccaccacaccggtttcctccttcacatctggctccatgttgggccgaacagacacagccctcacaaacacctacagcgctctgccgcctatgcccagcttcaccatggcaaataacctgcctatgcaacccccagtccccagccagacctcctcatactcctgcatgctgcccaccagcccttcggtgaatgggcggagttatgatacctacacccccccacatatgcagacacacatgaacagtcagccaatgggcacctcgggcaccacttcaacaggactcatttcccctggtgtgtcagttccagttcaagttcccggaagtgaacctgatatgtctcaatactggccaagattacagtaaaaaaaaaaaaaaaaaaaaaaaggaaaggaaatattgtgttaattcagtcagtgactatggggacacaacagttgagctttcaggaaagaaagaaaaatggctgttagagccgcttcagttctacaattgtgtcctgtattgtaccactggggaaggaatggacttgaaacaaggacctttgtatacagaaggcacgatatcagttggaacaaatcttcattttggtatccaaacttttattcattttggtgtattatttgtaaatgggcatttgtatgttataatgaaaaaaagaacaatgtagactggatggatgtttgatctgtgttggtcatgaagttgttttttttttttttaaaaagaaaaccatgatcaacaagctttgccacgaatttaagagttttatcaagatatatcgaatacttctacccatctgttcatagtttatggactgatgttccaagtttgtatcattcctttgcatataattaaacctggaacaacatgcactagatttatgtcagaaatatctgttggttttccaaaggttgttaacagatgaagtttatgtgcaaaaaagggtaagatataaattcaaggaagaaaaaaagttgatagctaaaaggtagagtgtgtcttcgatataatccaatttgttttatgtcaaaatgtaagtatttgtcttccctagaaatcctcagaatgatttctataataaagttaatttcatttatatttgacaagaatatagatgttttatacacattttcatgcaatcatacgtttcttttttggccagcaaaagttaattgttcttagatatagttgtattactgttcacggtccaatcattttgtgcatctagagttcattcctaatcaattaaaagtgcttgcaagagtttta

SEQ ID NO: 321624 - DNA, 2741 bp, Homo sapiens
gcatgttgcggagtgattagtgggtttgaaaagggaaccgtgggctcggcctcatttcccgctctggttcaggcgcaggaggaagtgttttgctggaggatgatgacagaggtcaggcttcgctaatgggccagtgaggagcggtggaggcgaggccgggcgccgcacacacacattaacacacttgagccatcaccaatcagcataggaatctgagaattgctctcacacaccaacccagcaacatccgtggagaaaactctcaccagcaactcctttaaaacaccgtcatttcaaaccattgtggtcttcaagcaacaacagcagcacaaaaaaccccaaccaaacaaaactcttgacagaagctgtgacaaccagaaaggatgcctcataaagggggaagactttaactaggggcgcgcagatgtgtgaggccttttattgtgagagtggacagacatccgagatttcagagccccatattcgagccccgtggaatcccgcggcccccagccagagccagcatgcagaacagtcacagcggagtgaatcagctcggtggtgtctttgtcaacgggcggccactgccggactccacccggcagaagattgtagagctagctcacagcggggcccggccgtgcgacatttcccgaattctgcagacccatgcagatgcaaaagtccaagtgctggacaatcaaaacgtgtccaacggatgtgtgagtaaaattctgggcaggtattacgagactggctccatcagacccagggcaatcggtggtagtaaaccgagagtagcgactccagaagttgtaagcaaaatagcccagtataagcgggagtgcccgtccatctttgcttgggaaatccgagacagattactgtccgagggggtctgtaccaacgataacataccaagcgtgtcatcaataaacagagttcttcgcaacctggctagcgaaaagcaacagatgggcgcagacggcatgtatgataaactaaggatgttgaacgggcagaccggaagctggggcacccgccctggttggtatccggggacttcggtgccagggcaacctacgcaagatggctgccagcaacaggaaggagggggagagaataccaactccatcagttccaacggagaagattcagatgaggctcaaatgcgacttcagctgaagcggaagctgcaaagaaatagaacatcctttacccaagagcaaattgaggccctggagaaagagtttgagagaacccattatccagatgtgtttgcccgagaaagactagcagccaaaatagatctacctgaagcaagaatacaggtatggttttctaatcgaagggccaaatggagaagagaagaaaaactgaggaatcagagaagacaggccagcaacacacctagtcatattcctatcagcagtagtttcagcaccagtgtctaccaaccaattccacaacccaccacaccggtttcctccttcacatctggctccatgttgggccgaacagacacagccctcacaaacacctacagcgctctgccgcctatgcccagcttcaccatggcaaataacctgcctatgcaacccccagtccccagccagacctcctcatactcctgcatgctgcccaccagcccttcggtgaatgggcggagttatgatacctacacccccccacatatgcagacacacatgaacagtcagccaatgggcacctcgggcaccacttcaacaggactcatttcccctggtgtgtcagttccagttcaagttcccggaagtgaacctgatatgtctcaatactggccaagattacagtaaaaaaaaaaaaaaaaaaaaaaaggaaaggaaatattgtgttaattcagtcagtgactatggggacacaacagttgagctttcaggaaagaaagaaaaatggctgttagagccgcttcagttctacaattgtgtcctgtattgtaccactggggaaggaatggacttgaaacaaggacctttgtatacagaaggcacgatatcagttggaacaaatcttcattttggtatccaaacttttattcattttggtgtattatttgtaaatgggcatttgtatgttataatgaaaaaaagaacaatgtagactggatggatgtttgatctgtgttggtcatgaagttgttttttttttttttaaaaagaaaaccatgatcaacaagctttgccacgaatttaagagttttatcaagatatatcgaatacttctacccatctgttcatagtttatggactgatgttccaagtttgtatcattcctttgcatataattaaacctggaacaacatgcactagatttatgtcagaaatatctgttggttttccaaaggttgttaacagatgaagtttatgtgcaaaaaagggtaagatataaattcaaggaagaaaaaaagttgatagctaaaaggtagagtgtgtcttcgatataatccaatttgttttatgtcaaaatgtaagtatttgtcttccctagaaatcctcagaatgatttctataataaagttaatttcatttatatttgacaagaatatagatgttttatacacattttcatgcaatcatacgtttcttttttggccagcaaaagttaattgttcttagatatagttgtattactgttcacggtccaatcattttgtgcatctagagttcattcctaatcaattaaaagtgcttgcaagagtttta

SEQ ID NO: 321625 - DNA, 2009 bp, Homo sapiens
caccaggccaaggcggtggaacgcgcgctccgagggagctcagagccgagcgggaggactgtcagcttccacccagcccccgggctcttgcccccaactccactggagcgctgagctcggaacttgaaaactctctgctccccaggcttcccccgactctcatctcccttgccttgcggaggctggggctcttccctgttctccggccccctgcgcttgggggaagactttaactaggggcgcgcagatgtgtgaggccttttattgtgagagtggacagacatccgagatttcagagccccatattcgagccccgtggaatcccgcggcccccagccagagccagcatgcagaacaatggctgccagcaacaggaaggagggggagagaataccaactccatcagttccaacggagaagattcagatgaggctcaaatgcgacttcagctgaagcggaagctgcaaagaaatagaacatcctttacccaagagcaaattgaggccctggagaaagagtttgagagaacccattatccagatgtgtttgcccgagaaagactagcagccaaaatagatctacctgaagcaagaatacaggtatggttttctaatcgaagggccaaatggagaagagaagaaaaactgaggaatcagagaagacaggccagcaacacacctagtcatattcctatcagcagtagtttcagcaccagtgtctaccaaccaattccacaacccaccacaccggtttcctccttcacatctggctccatgttgggccgaacagacacagccctcacaaacacctacagcgctctgccgcctatgcccagcttcaccatggcaaataacctgcctatgcaacccccagtccccagccagacctcctcatactcctgcatgctgcccaccagcccttcggtgaatgggcggagttatgatacctacacccccccacatatgcagacacacatgaacagtcagccaatgggcacctcgggcaccacttcaacaggactcatttcccctggtgtgtcagttccagttcaagttcccggaagtgaacctgatatgtctcaatactggccaagattacagtaaaaaaaaaaaaaaaaaaaaaaaggaaaggaaatattgtgttaattcagtcagtgactatggggacacaacagttgagctttcaggaaagaaagaaaaatggctgttagagccgcttcagttctacaattgtgtcctgtattgtaccactggggaaggaatggacttgaaacaaggacctttgtatacagaaggcacgatatcagttggaacaaatcttcattttggtatccaaacttttattcattttggtgtattatttgtaaatgggcatttgtatgttataatgaaaaaaagaacaatgtagactggatggatgtttgatctgtgttggtcatgaagttgttttttttttttttaaaaagaaaaccatgatcaacaagctttgccacgaatttaagagttttatcaagatatatcgaatacttctacccatctgttcatagtttatggactgatgttccaagtttgtatcattcctttgcatataattaaacctggaacaacatgcactagatttatgtcagaaatatctgttggttttccaaaggttgttaacagatgaagtttatgtgcaaaaaagggtaagatataaattcaaggaagaaaaaaagttgatagctaaaaggtagagtgtgtcttcgatataatccaatttgttttatgtcaaaatgtaagtatttgtcttccctagaaatcctcagaatgatttctataataaagttaatttcatttatatttgacaagaatatagatgttttatacacattttcatgcaatcatacgtttcttttttggccagcaaaagttaattgttcttagatatagttgtattactgttcacggtccaatcattttgtgcatctagagttcattcctaatcaattaaaagtgcttgcaagagtttta

SEQ ID NO: 321626 - DNA, 1297 bp, Homo sapiens
cgaaccacacaggcttaaggagggtccccagcaccttatccatctgttttggaaacgccggtcgccccctggtgcttccggggctggtcacagcggagtgaatcagctcggtggtgtctttgtcaacgggcggccactgccggactccacccggcagaagattgtagagctagctcacagcggggcccggccgtgcgacatttcccgaattctgcagacccatgcagatgcaaaagtccaagtgctggacaatcaaaacgtgtccaacggatgtgtgagtaaaattctgggcaggtattacgagagactcatttcccctggtgtgtcagttccagttcaagttcccggaagtgaacctgatatgtctcaatactggccaagattacagtaaaaaaaaaaaaaaaaaaaaaaaggaaaggaaatattgtgttaattcagtcagtgactatggggacacaacagttgagctttcaggaaagaaagaaaaatggctgttagagccgcttcagttctacaattgtgtcctgtattgtaccactggggaaggaatggacttgaaacaaggacctttgtatacagaaggcacgatatcagttggaacaaatcttcattttggtatccaaacttttattcattttggtgtattatttgtaaatgggcatttgtatgttataatgaaaaaaagaacaatgtagactggatggatgtttgatctgtgttggtcatgaagttgttttttttttttttaaaaagaaaaccatgatcaacaagctttgccacgaatttaagagttttatcaagatatatcgaatacttctacccatctgttcatagtttatggactgatgttccaagtttgtatcattcctttgcatataattaaacctggaacaacatgcactagatttatgtcagaaatatctgttggttttccaaaggttgttaacagatgaagtttatgtgcaaaaaagggtaagatataaattcaaggaagaaaaaaagttgatagctaaaaggtagagtgtgtcttcgatataatccaatttgttttatgtcaaaatgtaagtatttgtcttccctagaaatcctcagaatgatttctataataaagttaatttcatttatatttgacaagaatatagatgttttatacacattttcatgcaatcatacgtttcttttttggccagcaaaagttaattgttcttagatatagttgtattactgttcacggtccaatcattttgtgcatctagagttcattcctaatcaattaaaagtgcttgcaagagtttta

SEQ ID NO: 321627 - DNA, 166 bp, Homo sapiens
tttgtaaacctataaatttgtattccatgtctgtttctcaaagggaatatctacatggctatttctttcatccacttctagggactcatttcccctggtgtgtcagttccagttcaagttcccggaagtgaacctgatatgtctcaatactggccaagattacagt

SEQ ID NO: 321628 - DNA, 2699 bp, Homo sapiens
gcatgttgcggagtgattagtgggtttgaaaagggaaccgtgggctcggcctcatttcccgctctggttcaggcgcaggaggaagtgttttgctggaggatgatgacagaggtcaggcttcgctaatgggccagtgaggagcggtggaggcgaggccgggcgccgcacacacacattaacacacttgagccatcaccaatcagcataggaatctgagaattgctctcacacaccaacccagcaacatccgtggagaaaactctcaccagcaactcctttaaaacaccgtcatttcaaaccattgtggtcttcaagcaacaacagcagcacaaaaaaccccaaccaaacaaaactcttgacagaagctgtgacaaccagaaaggatgcctcataaagggggaagactttaactaggggcgcgcagatgtgtgaggccttttattgtgagagtggacagacatccgagatttcagagccccatattcgagccccgtggaatcccgcggcccccagccagagccagcatgcagaacagtcacagcggagtgaatcagctcggtggtgtctttgtcaacgggcggccactgccggactccacccggcagaagattgtagagctagctcacagcggggcccggccgtgcgacatttcccgaattctgcaggtgtccaacggatgtgtgagtaaaattctgggcaggtattacgagactggctccatcagacccagggcaatcggtggtagtaaaccgagagtagcgactccagaagttgtaagcaaaatagcccagtataagcgggagtgcccgtccatctttgcttgggaaatccgagacagattactgtccgagggggtctgtaccaacgataacataccaagcgtgtcatcaataaacagagttcttcgcaacctggctagcgaaaagcaacagatgggcgcagacggcatgtatgataaactaaggatgttgaacgggcagaccggaagctggggcacccgccctggttggtatccggggacttcggtgccagggcaacctacgcaagatggctgccagcaacaggaaggagggggagagaataccaactccatcagttccaacggagaagattcagatgaggctcaaatgcgacttcagctgaagcggaagctgcaaagaaatagaacatcctttacccaagagcaaattgaggccctggagaaagagtttgagagaacccattatccagatgtgtttgcccgagaaagactagcagccaaaatagatctacctgaagcaagaatacaggtatggttttctaatcgaagggccaaatggagaagagaagaaaaactgaggaatcagagaagacaggccagcaacacacctagtcatattcctatcagcagtagtttcagcaccagtgtctaccaaccaattccacaacccaccacaccggtttcctccttcacatctggctccatgttgggccgaacagacacagccctcacaaacacctacagcgctctgccgcctatgcccagcttcaccatggcaaataacctgcctatgcaacccccagtccccagccagacctcctcatactcctgcatgctgcccaccagcccttcggtgaatgggcggagttatgatacctacacccccccacatatgcagacacacatgaacagtcagccaatgggcacctcgggcaccacttcaacaggactcatttcccctggtgtgtcagttccagttcaagttcccggaagtgaacctgatatgtctcaatactggccaagattacagtaaaaaaaaaaaaaaaaaaaaaaaggaaaggaaatattgtgttaattcagtcagtgactatggggacacaacagttgagctttcaggaaagaaagaaaaatggctgttagagccgcttcagttctacaattgtgtcctgtattgtaccactggggaaggaatggacttgaaacaaggacctttgtatacagaaggcacgatatcagttggaacaaatcttcattttggtatccaaacttttattcattttggtgtattatttgtaaatgggcatttgtatgttataatgaaaaaaagaacaatgtagactggatggatgtttgatctgtgttggtcatgaagttgttttttttttttttaaaaagaaaaccatgatcaacaagctttgccacgaatttaagagttttatcaagatatatcgaatacttctacccatctgttcatagtttatggactgatgttccaagtttgtatcattcctttgcatataattaaacctggaacaacatgcactagatttatgtcagaaatatctgttggttttccaaaggttgttaacagatgaagtttatgtgcaaaaaagggtaagatataaattcaaggaagaaaaaaagttgatagctaaaaggtagagtgtgtcttcgatataatccaatttgttttatgtcaaaatgtaagtatttgtcttccctagaaatcctcagaatgatttctataataaagttaatttcatttatatttgacaagaatatagatgttttatacacattttcatgcaatcatacgtttcttttttggccagcaaaagttaattgttcttagatatagttgtattactgttcacggtccaatcattttgtgcatctagagttcattcctaatcaattaaaagtgcttgcaagagtttta

SEQ ID NO: 321629 - DNA, 2602 bp, Homo sapiens
gcatgttgcggagtgattagtgggtttgaaaagggaaccgtgggctcggcctcatttcccgctctggttcaggcgcaggaggaagtgttttgctggaggatgatgacagaggaatctgagaattgctctcacacaccaacccagcaacatccgtggagaaaactctcaccagcaactcctttaaaacaccgtcatttcaaaccattgtggtcttcaagcaacaacagcagcacaaaaaaccccaaccaaacaaaactcttgacagaagctgtgacaaccagaaaggatgcctcataaagggggaagactttaactaggggcgcgcagatgtgtgaggccttttattgtgagagtggacagacatccgagatttcagagccccatattcgagccccgtggaatcccgcggcccccagccagagccagcatgcagaacagtcacagcggagtgaatcagctcggtggtgtctttgtcaacgggcggccactgccggactccacccggcagaagattgtagagctagctcacagcggggcccggccgtgcgacatttcccgaattctgcaggtgtccaacggatgtgtgagtaaaattctgggcaggtattacgagactggctccatcagacccagggcaatcggtggtagtaaaccgagagtagcgactccagaagttgtaagcaaaatagcccagtataagcgggagtgcccgtccatctttgcttgggaaatccgagacagattactgtccgagggggtctgtaccaacgataacataccaagcgtgtcatcaataaacagagttcttcgcaacctggctagcgaaaagcaacagatgggcgcagacggcatgtatgataaactaaggatgttgaacgggcagaccggaagctggggcacccgccctggttggtatccggggacttcggtgccagggcaacctacgcaagatggctgccagcaacaggaaggagggggagagaataccaactccatcagttccaacggagaagattcagatgaggctcaaatgcgacttcagctgaagcggaagctgcaaagaaatagaacatcctttacccaagagcaaattgaggccctggagaaagagtttgagagaacccattatccagatgtgtttgcccgagaaagactagcagccaaaatagatctacctgaagcaagaatacaggtatggttttctaatcgaagggccaaatggagaagagaagaaaaactgaggaatcagagaagacaggccagcaacacacctagtcatattcctatcagcagtagtttcagcaccagtgtctaccaaccaattccacaacccaccacaccggtttcctccttcacatctggctccatgttgggccgaacagacacagccctcacaaacacctacagcgctctgccgcctatgcccagcttcaccatggcaaataacctgcctatgcaacccccagtccccagccagacctcctcatactcctgcatgctgcccaccagcccttcggtgaatgggcggagttatgatacctacacccccccacatatgcagacacacatgaacagtcagccaatgggcacctcgggcaccacttcaacaggactcatttcccctggtgtgtcagttccagttcaagttcccggaagtgaacctgatatgtctcaatactggccaagattacagtaaaaaaaaaaaaaaaaaaaaaaaggaaaggaaatattgtgttaattcagtcagtgactatggggacacaacagttgagctttcaggaaagaaagaaaaatggctgttagagccgcttcagttctacaattgtgtcctgtattgtaccactggggaaggaatggacttgaaacaaggacctttgtatacagaaggcacgatatcagttggaacaaatcttcattttggtatccaaacttttattcattttggtgtattatttgtaaatgggcatttgtatgttataatgaaaaaaagaacaatgtagactggatggatgtttgatctgtgttggtcatgaagttgttttttttttttttaaaaagaaaaccatgatcaacaagctttgccacgaatttaagagttttatcaagatatatcgaatacttctacccatctgttcatagtttatggactgatgttccaagtttgtatcattcctttgcatataattaaacctggaacaacatgcactagatttatgtcagaaatatctgttggttttccaaaggttgttaacagatgaagtttatgtgcaaaaaagggtaagatataaattcaaggaagaaaaaaagttgatagctaaaaggtagagtgtgtcttcgatataatccaatttgttttatgtcaaaatgtaagtatttgtcttccctagaaatcctcagaatgatttctataataaagttaatttcatttatatttgacaagaatatagatgttttatacacattttcatgcaatcatacgtttcttttttggccagcaaaagttaattgttcttagatatagttgtattactgttcacggtccaatcattttgtgcatctagagttcattcctaatcaattaaaagtgcttgcaagagtttta

SEQ ID NO: 321630 - DNA, 2825 bp, Homo sapiens
acccaactcgatgcttgtgccaggccttggccagtttggacggtgatggaaacatttctggattttagcgtctaagggagcactcaagggctgtaaggtttgctatcactgtcccaacactgcagagaccttgaaggttcagtgtgggatctgtagaacccatggtttgcggtgacactcagaggggatctttgggagatttatagagccggttcttagcgctttgtgggttcagaggctggctgcagtgtttatgaagaggggcagtgggctggggacactgctggggttatggctgtagtgaggtccatgtgtacttgttccttggcatgtgtctgactctgtgttgctgctgcagtacagtgggcaggggcacggttgcttggactgggctgcccgatgtctggcatggctggtggtcctgttgtcctttatttgatcgatagcagggaactgaccgccgaggttggcacaggttggcagggggatgaggatgcattgtggttgtctcctcctcctctccttcttcctcttccccttcctcctctcctttctgttcttgttctccctcatcttcctcttccttcttctccctcttcttcctcttcactctgctctcttctcttcttttcccctttcctctcctctccctttcctcaggtcacagcggagtgaatcagctcggtggtgtctttgtcaacgggcggccactgccggactccacccggcagaagattgtagagctagctcacagcggggcccggccgtgcgacatttcccgaattctgcaggtgtccaacggatgtgtgagtaaaattctgggcaggtattacgagactggctccatcagacccagggcaatcggtggtagtaaaccgagagtagcgactccagaagttgtaagcaaaatagcccagtataagcgggagtgcccgtccatctttgcttgggaaatccgagacagattactgtccgagggggtctgtaccaacgataacataccaagcgtgtcatcaataaacagagttcttcgcaacctggctagcgaaaagcaacagatgggcgcagacggcatgtatgataaactaaggatgttgaacgggcagaccggaagctggggcacccgccctggttggtatccggggacttcggtgccagggcaacctacgcaagatggctgccagcaacaggaaggagggggagagaataccaactccatcagttccaacggagaagattcagatgaggctcaaatgcgacttcagctgaagcggaagctgcaaagaaatagaacatcctttacccaagagcaaattgaggccctggagaaagagtttgagagaacccattatccagatgtgtttgcccgagaaagactagcagccaaaatagatctacctgaagcaagaatacaggtatggttttctaatcgaagggccaaatggagaagagaagaaaaactgaggaatcagagaagacaggccagcaacacacctagtcatattcctatcagcagtagtttcagcaccagtgtctaccaaccaattccacaacccaccacaccggtttcctccttcacatctggctccatgttgggccgaacagacacagccctcacaaacacctacagcgctctgccgcctatgcccagcttcaccatggcaaataacctgcctatgcaacccccagtccccagccagacctcctcatactcctgcatgctgcccaccagcccttcggtgaatgggcggagttatgatacctacacccccccacatatgcagacacacatgaacagtcagccaatgggcacctcgggcaccacttcaacaggactcatttcccctggtgtgtcagttccagttcaagttcccggaagtgaacctgatatgtctcaatactggccaagattacagtaaaaaaaaaaaaaaaaaaaaaaaggaaaggaaatattgtgttaattcagtcagtgactatggggacacaacagttgagctttcaggaaagaaagaaaaatggctgttagagccgcttcagttctacaattgtgtcctgtattgtaccactggggaaggaatggacttgaaacaaggacctttgtatacagaaggcacgatatcagttggaacaaatcttcattttggtatccaaacttttattcattttggtgtattatttgtaaatgggcatttgtatgttataatgaaaaaaagaacaatgtagactggatggatgtttgatctgtgttggtcatgaagttgttttttttttttttaaaaagaaaaccatgatcaacaagctttgccacgaatttaagagttttatcaagatatatcgaatacttctacccatctgttcatagtttatggactgatgttccaagtttgtatcattcctttgcatataattaaacctggaacaacatgcactagatttatgtcagaaatatctgttggttttccaaaggttgttaacagatgaagtttatgtgcaaaaaagggtaagatataaattcaaggaagaaaaaaagttgatagctaaaaggtagagtgtgtcttcgatataatccaatttgttttatgtcaaaatgtaagtatttgtcttccctagaaatcctcagaatgatttctataataaagttaatttcatttatatttgacaagaatatagatgttttatacacattttcatgcaatcatacgtttcttttttggccagcaaaagttaattgttcttagatatagttgtattactgttcacggtccaatcattttgtgcatctagagttcattcctaatcaattaaaagtgcttgcaagagtttta

SEQ ID NO: 321631 - DNA, 1373 bp, Homo sapiens
ctaaagtgctttagaggcttgatacataggcagctttcttctagctgtggccagtggaaggactagctcgaggcccaatcttagatttatcatatggaattccagtacttcacgtgaaggcatctttaatgatcagacttgttggcagagttcctcgggaggagggagcctggggctgtggctgtgtgatgtgttcctcagtaaccacaggtttgcctctctcctcacagcccccagtccccagccagacctcctcatactcctgcatgctgcccaccagcccttcggtgaatgggcggagttatgatacctacacccccccacatatgcagacacacatgaacagtcagccaatgggcacctcgggcaccacttcaacaggactcatttcccctggtgtgtcagttccagttcaagttcccggaagtgaacctgatatgtctcaatactggccaagattacagtaaaaaaaaaaaaaaaaaaaaaaaggaaaggaaatattgtgttaattcagtcagtgactatggggacacaacagttgagctttcaggaaagaaagaaaaatggctgttagagccgcttcagttctacaattgtgtcctgtattgtaccactggggaaggaatggacttgaaacaaggacctttgtatacagaaggcacgatatcagttggaacaaatcttcattttggtatccaaacttttattcattttggtgtattatttgtaaatgggcatttgtatgttataatgaaaaaaagaacaatgtagactggatggatgtttgatctgtgttggtcatgaagttgttttttttttttttaaaaagaaaaccatgatcaacaagctttgccacgaatttaagagttttatcaagatatatcgaatacttctacccatctgttcatagtttatggactgatgttccaagtttgtatcattcctttgcatataattaaacctggaacaacatgcactagatttatgtcagaaatatctgttggttttccaaaggttgttaacagatgaagtttatgtgcaaaaaagggtaagatataaattcaaggaagaaaaaaagttgatagctaaaaggtagagtgtgtcttcgatataatccaatttgttttatgtcaaaatgtaagtatttgtcttccctagaaatcctcagaatgatttctataataaagttaatttcatttatatttgacaagaatatagatgttttatacacattttcatgcaatcatacgtttcttttttggccagcaaaagttaattgttcttagatatagttgtattactgttcacggtccaatcattttgtgcatctagagttcattcctaatcaattaaaagtgcttgcaagagtttta

SEQ ID NO: 321632 - DNA, 429 bp, Homo sapiens
gagcctcttgcccttgcgcagagccactgtgagaggcggtgggagccaacacccttgggggagggggcagtactgctcggcacatcccagcagtactgccccctcccccaagggtggggcagtactgctcggcacatcccagcatcaggtcagatcactgaaattaaaaaatgtgaattaagttcatatccaccttttggggaagcaggacaaaccaccaccccaccaagtgtgtgacttctccatatcccactgcagtttccattttttaaatgggaattttcaatcccctgtgcttgtctaacgtctgctttaaaaagtttgagaccctgttactgtttgaaaatgcatgcatgttacgatgaatctccaacctgaggaaaaaaataaaactcaaaaagctttgtgtaaaaaaaaaaagtgtgagtc

SEQ ID NO: 321633 - DNA, 365 bp, Homo sapiens
  misc_feature (27)..(28): n is a, c, g, or t
  misc_feature (59)..(59): n is a, c, g, or t
  misc_feature (74)..(74): n is a, c, g, or t
aatgtgaattaagttcatatccacctnntgggaagcaggacaaaccccccccccccccncccagggtgacttcntccccaatccactgcaagtttccattttttaaatgtgaattaagttcatatccaccttttggggaagcaggacaaaccaccaccccaccaagtgtgtgacttctccatatcccactgcagtttccattttttaaatgggaattttcaatcccctgtgcttgtctaacgtctgctttaaaaagtttgagaccctgttactgtttgaaaatgcatgcatgttacgatgaatctccaacctgaggaaaaaaataaaactcaaaaagctttgtgtaaaaaaaaaaagtgtgagtc

SEQ ID NO: 321634 - DNA, 381 bp, Homo sapiens
ctgaagtaataagtagcatccaaagcgcagctgaaaattccattggtcagtttataccctaacagttgtagcttttgcaatggtaaaaactttaggctccagatattatcacctttgaaataatcgccttggatgattagttttccgttggagaaacttagtatatccaccaccccaccaagtgtgtgacttctccatatcccactgcagtttccattttttaaatgggaattttcaatcccctgtgcttgtctaacgtctgctttaaaaagtttgagaccctgttactgtttgaaaatgcatgcatgttacgatgaatctccaacctgaggaaaaaaataaaactcaaaaagctttgtgtaaaaaaaaaaagtgtgagtc

SEQ ID NO: 321635 - DNA, 376 bp, Homo sapiens
aattcccaattccccctccctaacccctggcaatcagtgttcaattttctgcccctatgaagttgactactctaggaacttcacataagaggaagcaaacagccaagcgaggtggctcatgcctgtaatcccagcactttgggaggctgaggtgggcggatcttctgaggtcaggagtttgagaccagcctgaccaacatggagaaacccagtctctactgaaaatacaaaattagccgggcatggtggtgcacgcctgtaatcccagctacttgggaggctgaggcaggagaatcgcttgaacccaggaggcggaggttgcggtgaccctccagcttgggcaacatgttatgaatgaaactccatctcaaaaaat

SEQ ID NO: 321636 - DNA, 5750 bp, Homo sapiens
ttgcgggaaagagccaaaccctggcgttggggggcccgggcggggagcccctcccgcggtccacagcgacgcctgcccagccctcctccccttccggctccggcacggggccccgaggcgttcggaggccaggcgggtttctgtcaggcccggggaggaggggcgggcggggcggccgctgcctccccgggacgggccgtaccacgcggacggggaggacggggccaggggactgcagggcggctgcaccgcccgggggcggggtgcggagcgggccggcgggctccccggggcggggcgggagggcggggcgtggggcggacggaaccaccggggcggggtgggaggtaacgggacgggcgcgaccatggcgcggtgagggagcgggggtggggatcggtccgggggaggcctgaggccgctggcttgtgcgctgtctccgccgcccccctctttcgccgccgccgccgccgccccgggcatgtcgtccaactgcaccagcaccacggcggtggcggtggcgccgctcagcgccagcaagaccaagaccaagaagaagcatttcgtgtgccagaaagtgaagctattccgggccagcgagccgatcctcagcgtcctgatgtggggggtgaaccacacgatcaatgagctgagcaatgttcctgttcctgtcatgctaatgccagatgacttcaaagcctacagcaagatcaaggtggacaatcatctcttcaataaggagaacctgcccagccgctttaagtttaaggagtattgccccatggtgttccgaaaccttcgggagaggtttggaattgatgatcaggattaccagaattcagtgacgcgcagcgcccccatcaacagtgacagccagggtcggtgtggcacgcgtttcctcaccacctacgaccggcgctttgtcatcaagactgtgtccagcgaggacgtggcggagatgcacaacatcttaaagaaataccaccagtttatagtggagtgtcatggcaacacgcttttgccacagttcctgggcatgtaccgcctgaccgtggatggtgtggaaacctacatggtggttaccaggaacgtgttcagccatcggctcactgtgcatcgcaagtatgacctcaagggttctacggttgccagagaagcgagcgacaaggagaaggccaaggacttgccaacattcaaagacaatgacttcctcaatgaagggcagaagctgcatgtgggagaggagagtaaaaagaacttcctggagaaactgaagcgggacgttgagttcttggcacagctgaagatcatggactacagcctgctggtgggcatccacgacgtggaccgggcagagcaggaggagatggaggtggaggagcgggcagaggacgaggagtgtgagaatgatggggtgggtggcaacctactctgctcctatggcacacctccggacagccctggcaacctcctcagctttcctcggttctttggtcctggggaattcgacccctctgttgacgtctatgccatgaaaagccatgaaagttcccccaagaaggaggtgtatttcatggccatcattgatatcctcacgccatacgatacaaagaagaaagctgcacatgctgccaaaacggtgaaacacggggcaggggccgagatctcgactgtgaaccctgagcagtactccaaacgcttcaacgagtttatgtccaacatcctgacgtagttctcttctaccttcagccagacccagagagctggatatggggtcggggatcgggacttagggagaagggtgtatttgggctagatgggagggtgggagcagagtcgggtttgggagggctttagcaatgagactgcagcctgtgacaccgaaagagactttagctgaagaggagggggatgtgctgtgtgtgcacctgctcacaggatgtaaccccaccttctgcttacccttgattttttctccccatttgacacccaggttaaaaaggggttccctttttggtaccttgtaaccttttaagataccttggggctagagatgacttcgtgggtttatttgggttttgtttctgaaatttcattgctccaggtttgctatttataatcatatttcatcagcctacccaccctccccatctttgctgagctctcagttcccttcaattaaagagatacccggtagacccagcacaagggtccttccagaaccaagtgctatggatgccagattggagaggtcagacacctcgccctgctgcatttgctcttgtctggattaactttgtaatttatggagtattgtgcacaacttcctccacctttcccttggattcaagtgaaaactgttgcattattcctccatcctgtctggaatacaccaggtcaacaccagagatctcagatcagaatcagagatctcagaggggaataagttcatcctcatgggatggtgaggggcaggaaagcggctgggctcttggacacctggttctcagagaaccctgtgatgatcacccaagccccaggctgtcttagcccctggagttcagaagtcctctctgtaaagcctgcctcccactaggtcaagaggaactagagtacctttggatttatcaggaccctcatgtttaaatggttatttccctttgggaaaacttcagaaactgatgtatcaaatgaggccctgtgccctcgatctatttccttcttccttctgacctcctcccaggcactcttacttctagccgaactcttagctctgggcagatctccaagcgcctggagtgctttttagcagagacacctcgttaagctccgggatgaccttgtaggagatctgtctccctgtgcctggagagttacagccagcaaggtgcccccatcttagagtgtggtgtccaaacgtgaggtggcttcctagttacatgaggatgtgatccaggaaatccagtttggaggcttgatgtgggttttgacctggcctcagccttggggctgtttttccttgttgccccgctctagacttttagcagatctgcagcccacaggcttttttggaaggagtggcttcctgcaggtgttccacctgccttcggagcctgccacccaggccctcagaactgagccacaggctgctctggccaggagagaaacagctctgttgttctgcattgggggaggtacattcctgcatcttctcaccccctcaaccaggaactggggatttgggatgagatatggtcagacttgtagataaccccaaagatgtgaagatcgcttgtgaaaccattttgaatgaatagattggtttcctgtggctccctccaaacctggccaagcccagcttccgaagcaggaaccagcactgtctctgtgcctgactcacagcatataggtcaggaaagaatggagacggcattcttggacttcactggggctgctggattggatgggaaaccttctggaagaggcagatgggggtcaaaccactgccttggccccaggaaggggccataggtaggtctgaacaactgccgcaagaccactacatgacttagggaacttgaaaccaactggctcatggagaaaacaaatttgacttgggaaagggattatgtaggaataatgtttggacttgatttccccacgtcataatgaagaatggaagtttggatctgctcctcgtcaggcgcagcatctctgaagcttggaaagctgtcttccagcagcctccgtggcctcgggttcctaccggcttctctgcatttggtctgctgatcatgttgccataatgtgtatggaaagtgtaacacattcttactggttaaagacgactaccaggtatctaacttgtttaacattgagtttgtgtgtgtgtgtgtatgtttgtgtgttttgtatattgtttacattttgagaggtagcattctgtttcaaatgctttttgtttttctgacagtattgttgactgggtcataacattttgagctgtggtttggtggattttcaattttttttttaaaggtcattcgctgtgctatcttcaaaaccttgagtttggcccccaatttttggcattcaaatgtttaaaagctatttatcttggtttatacaagtttcctttctcttctttttgtcatggtattctatttggtctgcagtttgaatgtagagaaagtggactgatcccccaagcgttgtctgcccccactctttcctccttgggtcccgccattcttttactgggcagtcgagggcattggaggggaagtgactgccctcagcctcactccctggggccatgaagaaaagctaaacagtctcatggcatctcagaataatgttgggtctcccaagaagaaaggtgtaagaataacgacatggctgattaggcgaggccaggatagggctaaggccaggattcctggctggcatccagtcaccccttctcccatccttccccctcttcttccacaagtccgcagccgagacactgtagtctcccagccacagtgatgagtgccctggagactccactgacctctagatgaaggcccctggccctggttcctgttaattaacctctgggtctttgagtcccccagcacaaacttctttcctgtaccctgcggcttggggtcacagggcatgccgggaagccacagctgaggggcgcagactgaagcagtgctccacctctccttctttagctcaggggttgctggtctgtggcaggcgccacgagtggcccctgtggctgttctcagtggcagtctcttaagttcccaccacaggcagctctttatcccctctccctacttgactctttctcttgcctgtgcttttggcctcaaacaggcctgctggtagcgctcagggcgtgaggctacactcctgccctgcctttcctgtcttcatggtctgccagggcataccttggggaggtggaccaaagacccaggactttttgcagtagccagtcctaccccccagttgtctttttaccaattcagggtgggagagaaaactgcagcaccccagcatgtgagttactcaggtgttgggggctagaagggacagtgcgtttaaacaacactcagagctctggccttaaacctgtggccccccaagtctaggagcctcatctcttcctggcagtcatgcgggcaggaggtcctgaaagggaaaacccattcagacaactgttccccaatctaccagccatctgcaggggtcagtgaccgtggccctctccctcctctagaatgtgccacttatgaagagtgccccatggggaaaaggagactcagctgtcccttggcagcttgtgccagtatcccagggcagaagtttccacaggagcctcttgcccttgcgcagagccactgtgagaggcggtgggagccaacacccttgggggagggggcagtactgctcggcacatcccagcatcaggtcagatcactgaaattaaaaaatgtgaattaagttcatatccaccttttggggaagcaggacaaaccaccaccccaccaagtgtgtgacttctccatatcccactgcagtttccattttttaaatgggaattttcaatcccctgtgcttgtctaacgtctgctttaaaaagtttgagaccctgttactgtttgaaaatgcatgcatgttacgatgaatctccaacctgaggaaaaaaataaaactcaaaaagctttgtgtaaaaaaaaaaagtgtgagtc

SEQ ID NO: 321637 - DNA, 5716 bp, Homo sapiens
ttgcgggaaagagccaaaccctggcgttggggggcccgggcggggagcccctcccgcggtccacagcgacgcctgcccagccctcctccccttccggctccggcacggggccccgaggcgttcggaggccaggcgggtttctgtcaggcccggggaggaggggcgggcggggcggccgctgcctccccgggacgggccgtaccacgcggacggggaggacggggccaggggactgcagggcggctgcaccgcccgggggcggggtgcggagcgggccggcgggctccccggggcggggcgggagggcggggcgtggggcggacggaaccaccggggcggggtgggaggtaacgggacgggcgcgaccatggcgcggtgagggagcgggggtggggatcggtccgggggaggcctgaggccgctggcttgtgcgctgtctccgccgcccccctctttcgccgccgccgccgccgccccgggcatgtcgtccaactgcaccagcaccacggcggtggcggtggcgccgctcagcgccagcaagaccaagaccaagaagaagcatttcgtgtgccagaaagtgaagctattccgggccagcgagccgatcctcagcgtcctgatgtggggggtgaaccacacgatcaatgagctgagcaatgttcctgttcctgtcatgctaatgccagatgacttcaaagcctacagcaagatcaaggtggacaatcatctcttcaataaggagaacctgcccagccgctttaagtttaaggagtattgccccatggtgttccgaaaccttcgggagaggtttggaattgatgatcaggattaccagaattcagtgacgcgcagcgcccccatcaacagtgacagccagggtcggtgtggcacgcgtttcctcaccacctacgaccggcgctttgtcatcaagactgtgtccagcgaggacgtggcggagatgcacaacatcttaaagaaataccaccagtttatagtggagtgtcatggcaacacgcttttgccacagttcctgggcatgtaccgcctgaccgtggatggtgtggaaacctacatggtggttaccaggaacgtgttcagccatcggctcactgtgcatcgcaagtatgacctcaagggttctacggttgccagagaagcgagcgacaaggagaaggccaaggacttgccaacattcaaagacaatgacttcctcaatgaagggcagaagctgcatgtgggagaggagagtaaaaagaacttcctggagaaactgaagcgggacgttgagttcttggcacagctgaagatcatggactacagcctgctggtgggcatccacgacgtggaccgggcagagcaggaggagatggaggtggaggagcgggcagaggacgaggagtgtgagaatgatggggtgggtggcaacctactctgctcctatggcacacctccggacagccctggcaacctcctcagctttcctcggttctttggtcctggggaattcgacccctctgttgacgtctatgccatgaaaagccatgaaagttcccccaagaaggaggtgtatttcatggccatcattgatatcctcacgccatacgatacaaagaagaaagctgcacatgctgccaaaacggtgaaacacggggcaggggccgagatctcgactgtgaaccctgagcagtactccaaacgcttcaacgagtttatgtccaacatcctgacgtagttctcttctaccttcagccagacccagagagctggatatggggtcggggatcgggacttagggagaagggtgtatttgggctagatgggagggtgggagcagagtcgggtttgggagggctttagcaatgagactgcagcctgtgacaccgaaagagactttagctgaagaggagggggatgtgctgtgtgtgcacctgctcacaggatgtaaccccaccttctgcttacccttgattttttctccccatttgacacccaggttaaaaaggggttccctttttggtaccttgtaaccttttaagataccttggggctagagatgacttcgtgggtttatttgggttttgtttctgaaatttcattgctccaggtttgctatttataatcatatttcatcagcctacccaccctccccatctttgctgagctctcagttcccttcaattaaagagatacccggtagacccagcacaagggtccttccagaaccaagtgctatggatgccagattggagaggtcagacacctcgccctgctgcatttgctcttgtctggattaactttgtaatttatggagtattgtgcacaacttcctccacctttcccttggattcaagtgaaaactgttgcattattcctccatcctgtctggaatacaccaggtcaacaccagagatctcagatcagaatcagagatctcagaggggaataagttcatcctcatgggatggtgaggggcaggaaagcggctgggctcttggacacctggttctcagagaaccctgtgatgatcacccaagccccaggctgtcttagcccctggagttcagaagtcctctctgtaaagcctgcctcccactaggtcaagaggaactagagtacctttggatttatcaggaccctcatgtttaaatggttatttccctttgggaaaacttcagaaactgatgtatcaaatgaggccctgtgccctcgatctatttccttcttccttctgacctcctcccaggcactcttacttctagccgaactcttagctctgggcagatctccaagcgcctggagtgctttttagcagagacacctcgttaagctccgggatgaccttgtaggagatctgtctccctgtgcctggagagttacagccagcaaggtgcccccatcttagagtgtggtgtccaaacgtgaggtggcttcctagttacatgaggatgtgatccaggaaatccagtttggaggcttgatgtgggttttgacctggcctcagccttggggctgtttttccttgttgccccgctctagacttttagcagatctgcagcccacaggcttttttggaaggagtggcttcctgcaggtgttccacctgccttcggagcctgccacccaggccctcagaactgagccacaggctgctctggccaggagagaaacagctctgttgttctgcattgggggaggtacattcctgcatcttctcaccccctcaaccaggaactggggatttgggatgagatatggtcagacttgtagataaccccaaagatgtgaagatcgcttgtgaaaccattttgaatgaatagattggtttcctgtggctccctccaaacctggccaagcccagcttccgaagcaggaaccagcactgtctctgtgcctgactcacagcatataggtcaggaaagaatggagacggcattcttggacttcactggggctgctggattggatgggaaaccttctggaagaggcagatgggggtcaaaccactgccttggccccaggaaggggccataggtaggtctgaacaactgccgcaagaccactacatgacttagggaacttgaaaccaactggctcatggagaaaacaaatttgacttgggaaagggattatgtaggaataatgtttggacttgatttccccacgtcataatgaagaatggaagtttggatctgctcctcgtcaggcgcagcatctctgaagcttggaaagctgtcttccagcagcctccgtggcctcgggttcctaccggcttctctgcatttggtctgctgatcatgttgccataatgtgtatggaaagtgtaacacattcttactggttaaagacgactaccaggtatctaacttgtttaacattgatatattgtttacattttgagaggtagcattctgtttcaaatgctttttgtttttctgacagtattgttgactgggtcataacattttgagctgtggtttggtggattttcaattttttttttaaaggtcattcgctgtgctatcttcaaaaccttgagtttggcccccaatttttggcattcaaatgtttaaaagctatttatcttggtttatacaagtttcctttctcttctttttgtcatggtattctatttggtctgcagtttgaatgtagagaaagtggactgatcccccaagcgttgtctgcccccactctttcctccttgggtcccgccattcttttactgggcagtcgagggcattggaggggaagtgactgccctcagcctcactccctggggccatgaagaaaagctaaacagtctcatggcatctcagaataatgttgggtctcccaagaagaaaggtgtaagaataacgacatggctgattaggcgaggccaggatagggctaaggccaggattcctggctggcatccagtcaccccttctcccatccttccccctcttcttccacaagtccgcagccgagacactgtagtctcccagccacagtgatgagtgccctggagactccactgacctctagatgaaggcccctggccctggttcctgttaattaacctctgggtctttgagtcccccagcacaaacttctttcctgtaccctgcggcttggggtcacagggcatgccgggaagccacagctgaggggcgcagactgaagcagtgctccacctctccttctttagctcaggggttgctggtctgtggcaggcgccacgagtggcccctgtggctgttctcagtggcagtctcttaagttcccaccacaggcagctctttatcccctctccctacttgactctttctcttgcctgtgcttttggcctcaaacaggcctgctggtagcgctcagggcgtgaggctacactcctgccctgcctttcctgtcttcatggtctgccagggcataccttggggaggtggaccaaagacccaggactttttgcagtagccagtcctaccccccagttgtctttttaccaattcagggtgggagagaaaactgcagcaccccagcatgtgagttactcaggtgttgggggctagaagggacagtgcgtttaaacaacactcagagctctggccttaaacctgtggccccccaagtctaggagcctcatctcttcctggcagtcatgcgggcaggaggtcctgaaagggaaaacccattcagacaactgttccccaatctaccagccatctgcaggggtcagtgaccgtggccctctccctcctctagaatgtgccacttatgaagagtgccccatggggaaaaggagactcagctgtcccttggcagcttgtgccagtatcccagggcagaagtttccacaggagcctcttgcccttgcgcagagccactgtgagaggcggtgggagccaacacccttgggggagggggcagtactgctcggcacatcccagcatcaggtcagatcactgaaattaaaaaatgtgaattaagttcatatccaccttttggggaagcaggacaaaccaccaccccaccaagtgtgtgacttctccatatcccactgcagtttccattttttaaatgggaattttcaatcccctgtgcttgtctaacgtctgctttaaaaagtttgagaccctgttactgtttgaaaatgcatgcatgttacgatgaatctccaacctgaggaaaaaaataaaactcaaaaagctttgtgtaaaaaaaaaaagtgtgagtc

SEQ ID NO: 321638 - DNA, 5248 bp, Homo sapiens
caaagaagcgagcgcaaggagaaggccaaggacttgccaacattcaaagacaatgacttcctcaatgaagggcagaagctgcatgtgggagaggagagtaaaaagaacttcctggagaaactgaagcgggacgttgagatcaatgagctgagcaatgttcctgttcctgtcatgctaatgccagatgacttcaaagcctacagcaagatcaaggtggacaatcatctcttcaataaggagaacctgcccagccgctttaagtttaaggagtattgccccatggtgttccgaaaccttcgggagaggtttggaattgatgatcaggattaccagaattcagtgacgcgcagcgcccccatcaacagtgacagccagggtcggtgtggcacgcgtttcctcaccacctacgaccggcgctttgtcatcaagactgtgtccagcgaggacgtggcggagatgcacaacatcttaaagaaataccaccagtttatagtggagtgtcatggcaacacgcttttgccacagttcctgggcatgtaccgcctgaccgtggatggtgtggaaacctacatggtggttaccaggaacgtgttcagccatcggctcactgtgcatcgcaagtatgacctcaagggttctacggttgccagagaagcgagcgacaaggagaaggccaaggacttgccaacattcaaagacaatgacttcctcaatgaagggcagaagctgcatgtgggagaggagagtaaaaagaacttcctggagaaactgaagcgggacgttgagttcttggcacagctgaagatcatggactacagcctgctggtgggcatccacgacgtggaccgggcagagcaggaggagatggaggtggaggagcgggcagaggacgaggagtgtgagaatgatggggtgggtggcaacctactctgctcctatggcacacctccggacagccctggcaacctcctcagctttcctcggttctttggtcctggggaattcgacccctctgttgacgtctatgccatgaaaagccatgaaagttcccccaagaaggaggtgtatttcatggccatcattgatatcctcacgccatacgatacaaagaagaaagctgcacatgctgccaaaacggtgaaacacggggcaggggccgagatctcgactgtgaaccctgagcagtactccaaacgcttcaacgagtttatgtccaacatcctgacgtagttctcttctaccttcagccagacccagagagctggatatggggtcggggatcgggacttagggagaagggtgtatttgggctagatgggagggtgggagcagagtcgggtttgggagggctttagcaatgagactgcagcctgtgacaccgaaagagactttagctgaagaggagggggatgtgctgtgtgtgcacctgctcacaggatgtaaccccaccttctgcttacccttgattttttctccccatttgacacccaggttaaaaaggggttccctttttggtaccttgtaaccttttaagataccttggggctagagatgacttcgtgggtttatttgggttttgtttctgaaatttcattgctccaggtttgctatttataatcatatttcatcagcctacccaccctccccatctttgctgagctctcagttcccttcaattaaagagatacccggtagacccagcacaagggtccttccagaaccaagtgctatggatgccagattggagaggtcagacacctcgccctgctgcatttgctcttgtctggattaactttgtaatttatggagtattgtgcacaacttcctccacctttcccttggattcaagtgaaaactgttgcattattcctccatcctgtctggaatacaccaggtcaacaccagagatctcagatcagaatcagagatctcagaggggaataagttcatcctcatgggatggtgaggggcaggaaagcggctgggctcttggacacctggttctcagagaaccctgtgatgatcacccaagccccaggctgtcttagcccctggagttcagaagtcctctctgtaaagcctgcctcccactaggtcaagaggaactagagtacctttggatttatcaggaccctcatgtttaaatggttatttccctttgggaaaacttcagaaactgatgtatcaaatgaggccctgtgccctcgatctatttccttcttccttctgacctcctcccaggcactcttacttctagccgaactcttagctctgggcagatctccaagcgcctggagtgctttttagcagagacacctcgttaagctccgggatgaccttgtaggagatctgtctccctgtgcctggagagttacagccagcaaggtgcccccatcttagagtgtggtgtccaaacgtgaggtggcttcctagttacatgaggatgtgatccaggaaatccagtttggaggcttgatgtgggttttgacctggcctcagccttggggctgtttttccttgttgccccgctctagacttttagcagatctgcagcccacaggcttttttggaaggagtggcttcctgcaggtgttccacctgccttcggagcctgccacccaggccctcagaactgagccacaggctgctctggccaggagagaaacagctctgttgttctgcattgggggaggtacattcctgcatcttctcaccccctcaaccaggaactggggatttgggatgagatatggtcagacttgtagataaccccaaagatgtgaagatcgcttgtgaaaccattttgaatgaatagattggtttcctgtggctccctccaaacctggccaagcccagcttccgaagcaggaaccagcactgtctctgtgcctgactcacagcatataggtcaggaaagaatggagacggcattcttggacttcactggggctgctggattggatgggaaaccttctggaagaggcagatgggggtcaaaccactgccttggccccaggaaggggccataggtaggtctgaacaactgccgcaagaccactacatgacttagggaacttgaaaccaactggctcatggagaaaacaaatttgacttgggaaagggattatgtaggaataatgtttggacttgatttccccacgtcataatgaagaatggaagtttggatctgctcctcgtcaggcgcagcatctctgaagcttggaaagctgtcttccagcagcctccgtggcctcgggttcctaccggcttctctgcatttggtctgctgatcatgttgccataatgtgtatggaaagtgtaacacattcttactggttaaagacgactaccaggtatctaacttgtttaacattgagtttgtgtgtgtgtgtgtatgtttgtgtgttttgtatattgtttacattttgagaggtagcattctgtttcaaatgctttttgtttttctgacagtattgttgactgggtcataacattttgagctgtggtttggtggattttcaattttttttttaaaggtcattcgctgtgctatcttcaaaaccttgagtttggcccccaatttttggcattcaaatgtttaaaagctatttatcttggtttatacaagtttcctttctcttctttttgtcatggtattctatttggtctgcagtttgaatgtagagaaagtggactgatcccccaagcgttgtctgcccccactctttcctccttgggtcccgccattcttttactgggcagtcgagggcattggaggggaagtgactgccctcagcctcactccctggggccatgaagaaaagctaaacagtctcatggcatctcagaataatgttgggtctcccaagaagaaaggtgtaagaataacgacatggctgattaggcgaggccaggatagggctaaggccaggattcctggctggcatccagtcaccccttctcccatccttccccctcttcttccacaagtccgcagccgagacactgtagtctcccagccacagtgatgagtgccctggagactccactgacctctagatgaaggcccctggccctggttcctgttaattaacctctgggtctttgagtcccccagcacaaacttctttcctgtaccctgcggcttggggtcacagggcatgccgggaagccacagctgaggggcgcagactgaagcagtgctccacctctccttctttagctcaggggttgctggtctgtggcaggcgccacgagtggcccctgtggctgttctcagtggcagtctcttaagttcccaccacaggcagctctttatcccctctccctacttgactctttctcttgcctgtgcttttggcctcaaacaggcctgctggtagcgctcagggcgtgaggctacactcctgccctgcctttcctgtcttcatggtctgccagggcataccttggggaggtggaccaaagacccaggactttttgcagtagccagtcctaccccccagttgtctttttaccaattcagggtgggagagaaaactgcagcaccccagcatgtgagttactcaggtgttgggggctagaagggacagtgcgtttaaacaacactcagagctctggccttaaacctgtggccccccaagtctaggagcctcatctcttcctggcagtcatgcgggcaggaggtcctgaaagggaaaacccattcagacaactgttccccaatctaccagccatctgcaggggtcagtgaccgtggccctctccctcctctagaatgtgccacttatgaagagtgccccatggggaaaaggagactcagctgtcccttggcagcttgtgccagtatcccagggcagaagtttccacaggagcctcttgcccttgcgcagagccactgtgagaggcggtgggagccaacacccttgggggagggggcagtactgctcggcacatcccagcatcaggtcagatcactgaaattaaaaaatgtgaattaagttcatatccaccttttggggaagcaggacaaaccaccaccccaccaagtgtgtgacttctccatatcccactgcagtttccattttttaaatgggaattttcaatcccctgtgcttgtctaacgtctgctttaaaaagtttgagaccctgttactgtttgaaaatgcatgcatgttacgatgaatctccaacctgaggaaaaaaataaaactcaaaaagctttgtgtaaaaaaaaaaagtgtgagtc

SEQ ID NO: 321639 - DNA, 5715 bp, Homo sapiens
ttgcgggaaagagccaaaccctggcgttggggggcccgggcggggagcccctcccgcggtccacagcgacgcctgcccagccctcctccccttccggctccggcacggggccccgaggcgttcggaggccaggcgggtttctgtcaggcccggggaggaggggcgggcggggcggccgctgcctccccgggacgggccgtaccacgcggacggggaggacggggccaggggactgcagggcggctgcaccgcccgggggcggggtgcggagcgggccggcgggctccccggggcggggcgggagggcggggcgtggggcggacggaaccaccggggcggggtgggaggtaacgggacgggcgcgaccatggcgcggtgagggagcgggggtggggatcggtccgggggaggcctgaggccgctggcttgtgcgctgtctccgccgcccccctctttcgccgccgccgccgccgccccgggcatgtcgtccaactgcaccagcaccacggcggtggcggtggcgccgctcagcgccagcaagaccaagaccaagaagaagcatttcgtgtgccagaaagtgaagctattccgggccagcgagccgatcctcagcgtcctgatgtggggggtgaaccacacgatcaatgagctgagcaatgttcctgttcctgtcatgctaatgccagatgacttcaaagcctacagcaagatcaaggtggacaatcatctcttcaataaggagaacctgcccagccgctttaagtttaaggagtattgccccatggtgttccgaaaccttcgggagaggtttggaattgatgatcaggattaccagaattcagtgacgcgcagcgcccccatcaacagtgacagccagggtcggtgtggcacgcgtttcctcaccacctacgaccggcgctttgtcatcaagactgtgtccagcgaggacgtggcggagatgcacaacatcttaaagaaataccaccagtttatagtggagtgtcatggcaacacgcttttgccacagttcctgggcatgtaccgcctgaccgtggatggtgtggaaacctacatggtggttaccaggaacgtgttcagccatcggctcactgtgcatcgcaagtatgacctcaagggttctacggttgccagagaagcgagcgacaaggagaaggccaaggacttgccaacattcaaagacaatgacttcctcaatgaagggcagaagctgcatgtgggagaggagagtaaaaagaacttcctggagaaactgaagcgggacgttgagttcttggcacagctgaagatcatggactacagcctgctggtgggcatccacgacgtggaccgggcagagcaggaggagatggaggtggaggagcgggcagaggacgaggagtgtgagaatgatggggtgggtggcaacctactctgctcctatggcacacctccggacagccctggcaacctcctcagctttcctcggttctttggtcctggggaattcgacccctctgttgacgtctatgccatgaaaagccatgaaagttcccccaagaaggaggtgtatttcatggccatcattgatatcctcacgccatacgatacaaagaagaaagctgcacatgctgccaaaacggtgaaacacggggcaggggccgagatctcgactgtgaaccctgagcagtactccaaacgcttcaacgagtttatgtccaacatcctgacgtagttctcttctaccttcagccagacccagagagctggatatggggtcggggatcgggacttagggagaagggtgtatttgggctagatgggagggtgggagcagagtcgggtttgggagggctttagcaatgagactgcagcctgtgacaccgaaagagactttagctgaagaggagggggatgtgctgtgtgtgcacctgctcacaggatgtaaccccaccttctgcttacccttgattttttctccccatttgacacccaggttaaaaaggggttccctttttggtaccttgtaaccttttaagataccttggggctagagatgacttcgtgggtttatttgggttttgtttctgaaatttcattgctccaggtttgctatttataatcatatttcatcagcctacccaccctccccatctttgctgagctctcagttcccttcaattaaagagatacccggtagacccagcacaagggtccttccagaaccaagtgctatggatgccagattggagaggtcagacacctcgccctgctgcatttgctcttgtctggattaactttgtaatttatggagtattgtgcacaacttcctccacctttcccttggattcaagtgaaaactgttgcattattcctccatcctgtctggaatacaccaggtcaacaccagagatctcagatcagaatcagagatctcagaggggaataagttcatcctcatgggatggtgaggggcaggaaagcggctgggctcttggacacctggttctcagagaaccctgtgatgatcacccaagccccaggctgtcttagcccctggagttcagaagtcctctctgtaaagcctgcctcccactaggtcaagaggaactagagtacctttggatttatcaggaccctcatgtttaaatggttatttccctttgggaaaacttcagaaactgatgtatcaaatgaggccctgtgccctcgatctatttccttcttccttctgacctcctcccaggcactcttacttctagccgaactcttagctctgggcagatctccaagcgcctggagtgctttttagcagagacacctcgttaagctccgggatgaccttgtaggagatctgtctccctgtgcctggagagttacagccagcaaggtgcccccatcttagagtgtggtgtccaaacgtgaggtggcttcctagttacatgaggatgtgatccaggaaatccagtttggaggcttgatgtgggttttgacctggcctcagccttggggctgtttttccttgttgccccgctctagacttttagcagatctgcagcccacaggcttttttggaaggagtggcttcctgcaggtgttccacctgccttcggagcctgccacccaggccctcagaactgagccacaggctgctctggccaggagagaaacagctctgttgttctgcattgggggaggtacattcctgcatcttctcaccccctcaaccaggaactggggatttgggatgagatatggtcagacttgtagataaccccaaagatgtgaagatcgcttgtgaaaccattttgaatgaatagattggtttcctgtggctccctccaaacctggccaagcccagcttccgaagcaggaaccagcactgtctctgtgcctgactcacagcatataggtcaggaaagaatggagacggcattcttggacttcactggggctgctggattggatgggaaaccttctggaagaggcagatgggggtcaaaccactgccttggccccaggaaggggccataggtaggtctgaacaactgccgcaagaccactacatgacttagggaacttgaaaccaactggctcatggagaaaacaaatttgacttgggaaagggattatgtaggaataatgtttggacttgatttccccacgtcataatgaagaatggaagtttggatctgctcctcgtcaggcgcagcatctctgaagcttggaaagctgtcttccagcagcctccgtggcctcgggttcctaccggcttctctgcatttggtctgctgatcatgttgccataatgtgtatggaaagtgtaacacattcttactggttaaagacgactaccaggtatctaacttgtttaacattgagtttgtgtgtgtgtgtgtatgtttgtgtgttttgtatattgtttacattttgagaggtagcattctgtttcaaatgctttttgtttttctgacagtattgttgactgggtcataacattttgagctgtggtttggtggattttcaattttttttttaaaggtcattcgctgtgctatcttcaaaaccttgagtttggcccccaatttttggcattcaaatgtttaaaagctatttatcttggtttatacaagtttcctttctcttctttttgtcatggtattctatttggtctgcagtttgaatgtagagaaagtggactgatcccccaagcgttgtctgcccccactctttcctccttgggtcccgccattcttttactgggcagtcgagggcattggaggggaagtgactgccctcagcctcactccctggggccatgaagaaaagctaaacagtctcatggcatctcagaataatgttgggtctcccaagaagaaaggtgtaagaataacgacatggctgattaggcgaggccaggatagggctaaggccaggattcctggctggcatccagtcaccccttctcccatccttccccctcttcttccacaagtccgcagccgagacactgtagtctcccagccacagtgatgagtgccctggagactccactgacctctagatgaaggcccctggccctggttcctgttaattaacctctgggtctttgagtcccccagcacaaacttctttcctgtaccctgcggcttggggtcacagggcatgccgggaagccacagctgaggggcgcagactgaagcagtgctccacctctccttctttagctcaggggttgctggtctgtggcaggcgccacgagtggcccctgtggctgttctcagtggcagtctcttaagttcccaccacaggcagctctttatcccctctccctacttgactctttctcttgcctgtgcttttggcctcaaacaggcctgctggtagcgctcagggcgtgaggctacactcctgccctgcctttcctgtcttcatggtctgccagggcataccttggggaggtggaccaaagacccaggactttttgcagtagccagtcctaccccccagttgtctttttaccaattcagggtgggagagaaaactgcagcaccccagcatgtgagttactcaggtgttgggggctagaagggacagtgcgtttaaacaacactcagagctctggccttaaacctgtggccccccaagtctaggagcctcatctcttcctggcagtcatgcgggcaggaggtcctgaaagggaaaacccattcagacaactgttccccaatctaccagccatctgcaggggtcagtgaccgtggccctctccctcctctagaatgtgccacttatgaagagtgccccatggggaaaaggagactcagctgtcccttggcagcttgtgccagtatcccagggcagaagtttccacaggagcctcttgcccttgcgcagagccactgtgagaggcggtgggagccaacacccttgggggagggggcagtactgctcggcacatcccagcatcaggtcagatcactgaaattaaaaaatgtgaattaagttcatatccacttggggagcgaaaaaacaccaccatgtgtgatttcataccagcattcatttaatgaattcaatccggtgtaagcgttaaagtgaacgtctgtgaacgttgttcagaatcacggaaaaatcagtggtaaaaaaacgttctggggacaaagacgactccacttagaagccatattaaaataaaataaaaccagaaatcctctc

SEQ ID NO: 321640 - DNA, 5094 bp, Homo sapiens
ttgcgggaaagagccaaaccctggcgttggggggcccgggcggggagcccctcccgcggtccacagcgacgcctgcccagccctcctccccttccggctccggcacggggccccgaggcgttcggaggccaggcgggtttctgtcaggcccggggaggaggggcgggcggggcggccgctgcctccccgggacgggccgtaccacgcggacggggaggacggggccaggggactgcagggcggctgcaccgcccgggggcggggtgcggagcgggccggcgggctccccggggcggggcgggagggcggggcgtggggcggacggaaccaccggggcggggtgggaggtaacgggacgggcgcgaccatggcgcggtgagggagcgggggtggggatcggtccgggggaggcctgaggccgctggcttgtgcgctgtctccgccgcccccctctttcgccgccgccgccgccgccccgggcatgtcgtccaactgcaccagcaccacggcggtggcggtggcgccgctcagcgccagcaagaccaagaccaagaagaagcatttcgtgtgccagaaagtgaagctattccgggccagcgagccgatcctcagcgtcctgatgtggggggtgaaccacacgatcaatgagctgagcaatgttcctgttcctgtcatgctaatgccagatgacttcaaagcctacagcaagatcaaggtggacaatcatctcttcaataaggagaacctgcccagccgctttaagtttaaggagtattgccccatggtgttccgaaaccttcgggagaggtttggaattgatgatcaggattaccagaattcagtgacgcgcagcgcccccatcaacagtgacagccagggtcggtgtggcacgcgtttcctcaccacctacgaccggcgctttgtcatcaagactgtgtccagcgaggacgtggcggagatgcacaacatcttaaagaaataccaccagtttatagtggagtgtcatggcaacacgcttttgccacagttcctgggcatgtaccgcctgaccgtggatggtgtggaaacctacatggtggttaccaggaacgtgttcagccatcggctcactgtgcatcgcaagtatgacctcaagggttctacggttgccagagaagcgagcgacaaggagaaggccaaggacttgccaacattcaaagacaatgacttcctcaatgaagggcagaagctgcatgtgggagaggagagtaaaaagaacttcctggagaaactgaagcgggacgttgagttcttggcacagctgaagatcatggactacagcctgctggtgggcatccacgacgtggaccgggcagagcaggaggagatggaggtggaggagcgggcagaggacgaggagtgtgagaatgatggggtgggtggcaacctactctgctcctatggcacacctccggacagccctggcaacctcctcagctttcctcggttctttggtcctggggaattcgacccctctgttgacgtctatgccatgaaaagccatgaaagttcccccaagaaggaggtgtatttcatggccatcattgatatcctcacgccatacgatacaaagaagaaagctgcacatgctgccaaaacggtgaaacacggggcaggggccgagatctcgactgtgaaccctgagcagtactccaaacgcttcaacgagtttatgtccaacatcctgacgtagttctcttctaccttcagccagacccagagagctggatatggggtcggggatcgggacttagggagaagggtgtatttgggctagatgggagggtgggagcagagtcgggtttgggagggctttagcaatgagactgcagcctgtgacaccgaaagagactttagctgaagaggagggggatgtgctgtgtgtgcacctgctcacaggatgtaaccccaccttctgcttacccttgattttttctccccatttgacacccaggttaaaaaggggttccctttttggtaccttgtaaccttttaagataccttggggctagagatgacttcgtgggtttatttgggttttgtttctgaaatttcattgctccaggtttgctatttataatcatatttcatcagcctacccaccctccccatctttgctgagctctcagttcccttcaattaaagagatacccggtagacccagcacaagggtccttccagaaccaagtgctatggatgccagattggagaggtcagacacctcgccctgctgcatttgctcttgtctggattaactttgtaatttatggagtattgtgcacaacttcctccacctttcccttggattcaagtgaaaactgttgcattattcctccatcctgtctggaatacaccaggtcaacaccagagatctcagatcagaatcagagatctcagaggggaataagttcatcctcatgggatggtgaggggcaggaaagcggctgggctcttggacacctggttctcagagaaccctgtgatgatcacccaagccccaggctgtcttagcccctggagttcagaagtcctctctgtaaagcctgcctcccactaggtcaagaggaactagagtacctttggatttatcaggaccctcatgtttaaatggttatttccctttgggaaaacttcagaaactgatgtatcaaatgaggccctgtgccctcgatctatttccttcttccttctgacctcctcccaggcactcttacttctagccgaactcttagctctgggcagatctccaagcgcctggagtgctttttagcagagacacctcgttaagctccgggatgaccttgtaggagatctgtctccctgtgcctggagagttacagccagcaaggtgcccccatcttagagtgtggtgtccaaacgtgaggtggcttcctagttacatgaggatgtgatccaggaaatccagtttggaggcttgatgtgggttttgacctggcctcagccttggggctgtttttccttgttgccccgctctagacttttagcagatctgcagcccacaggcttttttggaaggagtggcttcctgcaggtgttccacctgccttcggagcctgccacccaggccctcagaactgagccacaggctgctctggccaggagagaaacagctctgttgttctgcattgggggaggtacattcctgcatcttctcaccccctcaaccaggaactggggatttgggatgagatatggtcagacttgtagataaccccaaagatgtgaagatcgcttgtgaaaccattttgaatgaatagattggtttcctgtggctccctccaaacctggccaagcccagcttccgaagcaggaaccagcactgtctctgtgcctgactcacagcatataggtcaggaaagaatggagacggcattcttggacttcactggggctgctggattggatgggaaaccttctggaagaggcagatgggggtcaaaccactgccttggccccaggaaggggccataggtaggtctgaacaactgccgcaagaccactacatgacttagggaacttgaaaccaactggctcatggagaaaacaaatttgacttgggaaagggattatgtaggaataatgtttggacttgatttccccacgtcataatgaagaatggaagtttggatctgctcctcgtcaggcgcagcatctctgaagcttggaaagctgtcttccagcagcctccgtggcctcgggttcctaccggcttctctgcatttggtctgctgatcatgttgccataatgtgtatggaaagtgtaacacattcttactggttaaagacgactaccaggtatctaacttgtttaacattgagtttgtgtgtgtgtgtgtatgtttgtgtgttttgtatattgtttacattttgagaggtagcattctgtttcaaatgctttttgtttttctgacagtattgttgactgggtcataacattttgagctgtggtttggtggattttcaattttttttttaaaggtcattcgctgtgctatcttcaaaaccttgagtttggcccccaatttttggcattcaaatgtttaaaagctatttatcttggtttatacaagtttcctttctcttctttttgtcatggtattctatttggtctgcagtttgaatgtagagaaagtggactgatcccccaagcgttgtctgcccccactctttcctccttgggtcccgccattcttttactgggcagtcgagggcattggaggggaagtgactgccctcagcctcactccctggggccatgaagaaaagctaaacagtctcatggcatctcagaataatgttgggtctcccaagaagaaaggtgtaagaataacgacatggctgattaggcgaggccaggatagggctaaggccaggattcctggctggcatccagtcaccccttctcccatccttccccctcttcttccacaagtccgcagccgagacactgtagtctcccagccacagtgatgagtgccctggagactccactgacctctagatgaaggcccctggccctggttcctgttaattaacctctgggtctttgagtcccccagcacaaacttctttcctgtaccctgcggcttggggtcacagggcatgccgggaagccacagctgaggggcgcagactgaagcagtgctccacctctccttctttagctcaggggttgctggtctgtggcaggcgccacgagtggcccctgtggctgttctcaggggcagtactgctcggcacatcccagcatcaggtcagatcactgaaattaaaaaatgtgaattaagttcatatccaccttttggggaagcaggacaaaccaccaccccaccaagtgtgtgacttctccatatcccactgcagtttccattttttaaatgggaattttcaatcccctgtgcttgtctaacgtctgctttaaaaagtttgagaccctgttactgtttgaaaatgcatgcatgttacgatgaatctccaacctgaggaaaaaaataaaactcaaaaagctttgtgtaaaaaaaaaaagtgtgagtc

SEQ ID NO: 321641 - DNA, 2031 bp, Homo sapiens
atgcatttgcttttatttttttactctgatgccttttcaaattggcatgtcttctctgcatttggtctgctgatcatgttgccataatgtgtatggaaagtgtaacacattcttactggttaaagacgactaccaggtatctaacttgtttaacattgagtttgtgtgtgtgtgtgtatgtttgtgtgttttgtatattgtttacattttgagaggtagcattctgtttcaaatgctttttgtttttctgacagtattgttgactgggtcataacattttgagctgtggtttggtggattttcaattttttttttaaaggtcattcgctgtgctatcttcaaaaccttgagtttggcccccaatttttggcattcaaatgtttaaaagctatttatcttggtttatacaagtttcctttctcttctttttgtcatggtattctatttggtctgcagtttgaatgtagagaaagtggactgatcccccaagcgttgtctgcccccactctttcctccttgggtcccgccattcttttactgggcagtcgagggcattggaggggaagtgactgccctcagcctcactccctggggccatgaagaaaagctaaacagtctcatggcatctcagaataatgttgggtctcccaagaagaaaggtgtaagaataacgacatggctgattaggcgaggccaggatagggctaaggccaggattcctggctggcatccagtcaccccttctcccatccttccccctcttcttccacaagtccgcagccgagacactgtagtctcccagccacagtgatgagtgccctggagactccactgacctctagatgaaggcccctggccctggttcctgttaattaacctctgggtctttgagtcccccagcacaaacttctttcctgtaccctgcggcttggggtcacagggcatgccgggaagccacagctgaggggcgcagactgaagcagtgctccacctctccttctttagctcaggggttgctggtctgtggcaggcgccacgagtggcccctgtggctgttctcagtggcagtctcttaagttcccaccacaggcagctctttatcccctctccctacttgactctttctcttgcctgtgcttttggcctcaaacaggcctgctggtagcgctcagggcgtgaggctacactcctgccctgcctttcctgtcttcatggtctgccagggcataccttggggaggtggaccaaagacccaggactttttgcagtagccagtcctaccccccagttgtctttttaccaattcagggtgggagagaaaactgcagcaccccagcatgtgagttactcaggtgttgggggctagaagggacagtgcgtttaaacaacactcagagctctggccttaaacctgtggccccccaagtctaggagcctcatctcttcctggcagtcatgcgggcaggaggtcctgaaagggaaaacccattcagacaactgttccccaatctaccagccatctgcaggggtcagtgaccgtggccctctccctcctctagaatgtgccacttatgaagagtgccccatggggaaaaggagactcagctgtcccttggcagcttgtgccagtatcccagggcagaagtttccacaggagcctcttgcccttgcgcagagccactgtgagaggcggtgggagccaacacccttgggggagggggcagtactgctcggcacatcccagcatcaggtcagatcactgaaattaaaaaatgtgaattaagttcatatccaccttttggggaagcaggacaaaccaccaccccaccaagtgtgtgacttctccatatcccactgcagtttccattttttaaatgggaattttcaatcccctgtgcttgtctaacgtctgctttaaaaagtttgagaccctgttactgtttgaaaatgcatgcatgttacgatgaatctccaacctgaggaaaaaaataaaactcaaaaagctttgtgtaaaaaaaaaaagtgtgagtc

SEQ ID NO: 321642 - DNA, 1592 bp, Homo sapiens
ttgcgggaaagagccaaaccctggcgttggggggcccgggcggggagcccctcccgcggtccacagcgacgcctgcccagccctcctccccttccggctccggcacggggccccgaggcgttcggaggccaggcgggtttctgtcaggcccggggaggaggggcgggcggggcggccgctgcctccccgggacgggccgtaccacgcggacggggaggacggggccaggggactgcagggcggctgcaccgcccgggggcggggtgcggagcgggccggcgggctccccggggcggggcgggagggcggggcgtggggcggacggaaccaccggggcggggtgggaggtaacgggacgggcgcgaccatggcgcggtgagggagcgggggtggggatcggtccgggggaggcctgaggccgctggcttgtgcgctgtctccgccgcccccctctttcgccgccgccgccgccgccccgggcatgtcgtccaactgcaccagcaccacggcggtggcggtggcgccgctcagcgccagcaagaccaagaccaagaagaagcatttcgtgtgccagaaagtgaagctattccgggccagcgagccgatcctcagcgtcctgatgtggggggtgaaccacacgatcaatgagctgagcaatgttcctgttcctgtcatgctaatgccagatgacttcaaagcctacagcaagatcaaggtggacaatcatctcttcaataaggagaacctgcccagccgctttaagtttaaggagtattgccccatggtgttccgaaaccttcgggagaggtttggaattgatgatcaggattaccagaattcagtgacgcgcagcgcccccatcaacagtgacagccagggtcggtgtggcacgcgtttcctcaccacctacgaccggcgctttgtcatcaagactgtgtccagcgaggacgtggcggagatgcacaacatcttaaagaaataccaccagtttatagtggagtgtcatggcaacacgcttttgccacagttcctgggcatgtaccgcctgaccgtggatggtgtggaaacctacatggtggttaccaggaacgtgttcagccatcggctcactgtgcatcgcaagtatgacctcaagggttctacggttgccagagaagcgagcgacaaggagaaggccaaggacttgccaacattcaaagacaatgatttccacaggagcctcttgcccttgcgcagagccactgtgagaggcggtgggagccaacacccttgggggagggggcagtactgctcggcacatcccagcatcaggtcagatcactgaaattaaaaaatgtgaattaagttcatatccaccttttggggaagcaggacaaaccaccaccccaccaagtgtgtgacttctccatatcccactgcagtttccattttttaaatgggaattttcaatcccctgtgcttgtctaacgtctgctttaaaaagtttgagaccctgttactgtttgaaaatgcatgcatgttacgatgaatctccaacctgaggaaaaaaataaaactcaaaaagctttgtgtaaaaaaaaaaagtgtgagtc

SEQ ID NO: 321643 - DNA, 1713 bp, Homo sapiens
ttgcgggaaagagccaaaccctggcgttggggggcccgggcggggagcccctcccgcggtccacagcgacgcctgcccagccctcctccccttccggctccggcacggggccccgaggcgttcggaggccaggcgggtttctgtcaggcccggggaggaggggcgggcggggcggccgctgcctccccgggacgggccgtaccacgcggacggggaggacggggccaggggactgcagggcggctgcaccgcccgggggcggggtgcggagcgggccggcgggctccccggggcggggcgggagggcggggcgtggggcggacggaaccaccggggcggggtgggaggtaacgggacgggcgcgaccatggcgcggtgagggagcgggggtggggatcggtccgggggaggcctgaggccgctggcttgtgcgctgtctccgccgcccccctctttcgccgccgccgccgccgccccgggcatgtcgtccaactgcaccagcaccacggcggtggcggtggcgccgctcagcgccagcaagaccaagaccaagaagaagcatttcgtgtgccagaaagtgaagctattccgggccagcgagccgatcctcagcgtcctgatgtggggggtgaaccacacgatcaatgagctgagcaatgttcctgttcctgtcatgctaatgccagatgacttcaaagcctacagcaagatcaaggtggacaatcatctcttcaataaggagaacctgcccagccgctttaagtttaaggagtattgccccatggtgttccgaaaccttcgggagaggtttggaattgatgatcaggattaccagaattcagtgacgcgcagcgcccccatcaacagtgacagccagggtcggtgtggcacgcgtttcctcaccacctacgaccggcgctttgtcatcaagactgtgtccagcgaggacgtggcggagatgcacaacatcttaaagaaataccaccagtttatagtggagtgtcatggcaacacgcttttgccacagttcctgggcatgtaccgcctgaccgtggatggtgtggaaacctacatggtggttaccaggaacgtgttcagccatcggctcactgtgcatcgcaagtatgacctcaagggttctacggttgccagagaagcgagcgacaaggagaaggccaaggacttgccaacattcaaagacaatgacttcctcaatgaagggcagaagctgcatgtgggagaggagagtaaaaagaacttcctggagaaactgaagcgggacgttgagttcttggcacagctgaagatcatggactacagcctgctggtgggcatccacgacgtggaccgggcagagcaggaggagatggaggtggaggagcgggcagaggacgaggagtgtgagaatgatggggtgggtggcaacctactctgctcctatggcacacctccggacagccctggcaacctcctcagctttcctcggttctttggtcctggggaattcgacccctctgttgacttctccatatcccactgcagtttccattttttaaatgggaattttcaatcccctgtgcttgtctaacgtctgctttaaaaagtttgagaccctgttactgtttgaaaatgcatgcatgttacgatgaatctccaacctgaggaaaaaaataaaactcaaaaagctttgtgtaaaaaaaaaaagtgtgagtc

SEQ ID NO: 321644 - DNA, 1565 bp, Homo sapiens
ttgcgggaaagagccaaaccctggcgttggggggcccgggcggggagcccctcccgcggtccacagcgacgcctgcccagccctcctccccttccggctccggcacggggccccgaggcgttcggaggccaggcgggtttctgtcaggcccggggaggaggggcgggcggggcggccgctgcctccccgggacgggccgtaccacgcggacggggaggacggggccaggggactgcagggcggctgcaccgcccgggggcggggtgcggagcgggccggcgggctccccggggcggggcgggagggcggggcgtggggcggacggaaccaccggggcggggtgggaggtaacgggacgggcgcgaccatggcgcggtgagggagcgggggtggggatcggtccgggggaggcctgaggccgctggcttgtgcgctgtctccgccgcccccctctttcgccgccgccgccgccgccccgggcatgtcgtccaactgcaccagcaccacggcggtggcggtggcgccgctcagcgccagcaagaccaagaccaagaagaagcatttcgtgtgccagaaagtgaagctattccgggccagcgagccgatcctcagcgtcctgatgtggggggtgaaccacacgatcaatgagctgagcaatgttcctgttcctgtcatgctaatgccagatgacttcaaagcctacagcaagatcaaggtggacaatcatctcttcaataaggagaacctgcccagccgctttaagtttaaggagtattgccccatggtgttccgaaaccttcgggagaggtttggaattgatgatcaggattaccagaattcagtgacgcgcagcgcccccatcaacagtgacagccagggtcggtgtggcacgcgtttcctcaccacctacgaccggcgctttgtcatcaagactgtgtccagcgaggacgtggcggagatgcacaacatcttaaagaaataccaccagtttatagtggagtgtcatggcaacacgcttttgccacagttcctgggcatgtaccgcctgaccgtggatggtgtggaaacctacatggtggttaccaggaacgtgttcagccatcggctcactgtgcatcgcaagtatgacctcaaggtaaagggctctgtgtttgccggagctgtgcctcccctctatctgagccccgaaggggccactactccaacttccatgtaattgggaagctggagcctatgtgttggcatggacagggaactctggagtggatatgcctgattcttgtggaccaaaggcagtttgaagtccaggtgacagtaacaggagattatttaagccctaaatgtgccatatttatgcagcagttgatgttcctgtctgtggaatgtgcacagtgagggaggccgtgctgacgcatgcactttagcatccatcaggcccccatggactgccagcacaagtgcatctctagactctgagaaggacacacttgtggctgtgaactagggtgctccgtgttcttgaacctggcttctgacttctgtcaccttatgccgccatcccttcc

SEQ ID NO: 321645 - DNA, 452 bp, Homo sapiens
caaagaagcgagcgcaaggagaaggccaaggacttgccaacattcaaagacaatgacttcctcaatgaagggcagaagctgcatgtgggagaggagagtaaaaagaacttcctggagaaactgaagcgggacgttgagttgactactctaggaacttcacataagaggaagcaaacagccaagcgaggtggctcatgcctgtaatcccagcactttgggaggctgaggtgggcggatcttctgaggtcaggagtttgagaccagcctgaccaacatggagaaacccagtctctactgaaaatacaaaattagccgggcatggtggtgcacgcctgtaatcccagctacttgggaggctgaggcaggagaatcgcttgaacccaggaggcggaggttgcggtgaccctccagcttgggcaacatgttatgaatgaaactccatctcaaaaaat

SEQ ID NO: 321646 - DNA, 5391 bp, Homo sapiens
tccggtcttactttggctctccttgcaaagttatttctagttaatcattatgcagaaggtataggggttagtccttgctatagtgacgttcctcatcccgggatgaggaacgtcacccgggcatgtcgtccaactgcaccagcaccacggcggtggcggtggcgccgctcagcgccagcaagaccaagaccaagaagaagcatttcgtgtgccagaaagtgaagctattccgggccagcgagccgatcctcagcgtcctgatgtggggggtgaaccacacgatcaatgagctgagcaatgttcctgttcctgtcatgctaatgccagatgacttcaaagcctacagcaagatcaaggtggacaatcatctcttcaataaggagaacctgcccagccgctttaagtttaaggagtattgccccatggtgttccgaaaccttcgggagaggtttggaattgatgatcaggattaccagaattcagtgacgcgcagcgcccccatcaacagtgacagccagggtcggtgtggcacgcgtttcctcaccacctacgaccggcgctttgtcatcaagactgtgtccagcgaggacgtggcggagatgcacaacatcttaaagaaataccaccagtttatagtggagtgtcatggcaacacgcttttgccacagttcctgggcatgtaccgcctgaccgtggatggtgtggaaacctacatggtggttaccaggaacgtgttcagccatcggctcactgtgcatcgcaagtatgacctcaagggttctacggttgccagagaagcgagcgacaaggagaaggccaaggacttgccaacattcaaagacaatgacttcctcaatgaagggcagaagctgcatgtgggagaggagagtaaaaagaacttcctggagaaactgaagcgggacgttgagttcttggcacagctgaagatcatggactacagcctgctggtgggcatccacgacgtggaccgggcagagcaggaggagatggaggtggaggagcgggcagaggacgaggagtgtgagaatgatggggtgggtggcaacctactctgctcctatggcacacctccggacagccctggcaacctcctcagctttcctcggttctttggtcctggggaattcgacccctctgttgacgtctatgccatgaaaagccatgaaagttcccccaagaaggaggtgtatttcatggccatcattgatatcctcacgccatacgatacaaagaagaaagctgcacatgctgccaaaacggtgaaacacggggcaggggccgagatctcgactgtgaaccctgagcagtactccaaacgcttcaacgagtttatgtccaacatcctgacgtagttctcttctaccttcagccagacccagagagctggatatggggtcggggatcgggacttagggagaagggtgtatttgggctagatgggagggtgggagcagagtcgggtttgggagggctttagcaatgagactgcagcctgtgacaccgaaagagactttagctgaagaggagggggatgtgctgtgtgtgcacctgctcacaggatgtaaccccaccttctgcttacccttgattttttctccccatttgacacccaggttaaaaaggggttccctttttggtaccttgtaaccttttaagataccttggggctagagatgacttcgtgggtttatttgggttttgtttctgaaatttcattgctccaggtttgctatttataatcatatttcatcagcctacccaccctccccatctttgctgagctctcagttcccttcaattaaagagatacccggtagacccagcacaagggtccttccagaaccaagtgctatggatgccagattggagaggtcagacacctcgccctgctgcatttgctcttgtctggattaactttgtaatttatggagtattgtgcacaacttcctccacctttcccttggattcaagtgaaaactgttgcattattcctccatcctgtctggaatacaccaggtcaacaccagagatctcagatcagaatcagagatctcagaggggaataagttcatcctcatgggatggtgaggggcaggaaagcggctgggctcttggacacctggttctcagagaaccctgtgatgatcacccaagccccaggctgtcttagcccctggagttcagaagtcctctctgtaaagcctgcctcccactaggtcaagaggaactagagtacctttggatttatcaggaccctcatgtttaaatggttatttccctttgggaaaacttcagaaactgatgtatcaaatgaggccctgtgccctcgatctatttccttcttccttctgacctcctcccaggcactcttacttctagccgaactcttagctctgggcagatctccaagcgcctggagtgctttttagcagagacacctcgttaagctccgggatgaccttgtaggagatctgtctccctgtgcctggagagttacagccagcaaggtgcccccatcttagagtgtggtgtccaaacgtgaggtggcttcctagttacatgaggatgtgatccaggaaatccagtttggaggcttgatgtgggttttgacctggcctcagccttggggctgtttttccttgttgccccgctctagacttttagcagatctgcagcccacaggcttttttggaaggagtggcttcctgcaggtgttccacctgccttcggagcctgccacccaggccctcagaactgagccacaggctgctctggccaggagagaaacagctctgttgttctgcattgggggaggtacattcctgcatcttctcaccccctcaaccaggaactggggatttgggatgagatatggtcagacttgtagataaccccaaagatgtgaagatcgcttgtgaaaccattttgaatgaatagattggtttcctgtggctccctccaaacctggccaagcccagcttccgaagcaggaaccagcactgtctctgtgcctgactcacagcatataggtcaggaaagaatggagacggcattcttggacttcactggggctgctggattggatgggaaaccttctggaagaggcagatgggggtcaaaccactgccttggccccaggaaggggccataggtaggtctgaacaactgccgcaagaccactacatgacttagggaacttgaaaccaactggctcatggagaaaacaaatttgacttgggaaagggattatgtaggaataatgtttggacttgatttccccacgtcataatgaagaatggaagtttggatctgctcctcgtcaggcgcagcatctctgaagcttggaaagctgtcttccagcagcctccgtggcctcgggttcctaccggcttctctgcatttggtctgctgatcatgttgccataatgtgtatggaaagtgtaacacattcttactggttaaagacgactaccaggtatctaacttgtttaacattgagtttgtgtgtgtgtgtgtatgtttgtgtgttttgtatattgtttacattttgagaggtagcattctgtttcaaatgctttttgtttttctgacagtattgttgactgggtcataacattttgagctgtggtttggtggattttcaattttttttttaaaggtcattcgctgtgctatcttcaaaaccttgagtttggcccccaatttttggcattcaaatgtttaaaagctatttatcttggtttatacaagtttcctttctcttctttttgtcatggtattctatttggtctgcagtttgaatgtagagaaagtggactgatcccccaagcgttgtctgcccccactctttcctccttgggtcccgccattcttttactgggcagtcgagggcattggaggggaagtgactgccctcagcctcactccctggggccatgaagaaaagctaaacagtctcatggcatctcagaataatgttgggtctcccaagaagaaaggtgtaagaataacgacatggctgattaggcgaggccaggatagggctaaggccaggattcctggctggcatccagtcaccccttctcccatccttccccctcttcttccacaagtccgcagccgagacactgtagtctcccagccacagtgatgagtgccctggagactccactgacctctagatgaaggcccctggccctggttcctgttaattaacctctgggtctttgagtcccccagcacaaacttctttcctgtaccctgcggcttggggtcacagggcatgccgggaagccacagctgaggggcgcagactgaagcagtgctccacctctccttctttagctcaggggttgctggtctgtggcaggcgccacgagtggcccctgtggctgttctcagtggcagtctcttaagttcccaccacaggcagctctttatcccctctccctacttgactctttctcttgcctgtgcttttggcctcaaacaggcctgctggtagcgctcagggcgtgaggctacactcctgccctgcctttcctgtcttcatggtctgccagggcataccttggggaggtggaccaaagacccaggactttttgcagtagccagtcctaccccccagttgtctttttaccaattcagggtgggagagaaaactgcagcaccccagcatgtgagttactcaggtgttgggggctagaagggacagtgcgtttaaacaacactcagagctctggccttaaacctgtggccccccaagtctaggagcctcatctcttcctggcagtcatgcgggcaggaggtcctgaaagggaaaacccattcagacaactgttccccaatctaccagccatctgcaggggtcagtgaccgtggccctctccctcctctagaatgtgccacttatgaagagtgccccatggggaaaaggagactcagctgtcccttggcagcttgtgccagtatcccagggcagaagtttccacaggagcctcttgcccttgcgcagagccactgtgagaggcggtgggagccaacacccttgggggagggggcagtactgctcggcacatcccagcatcaggtcagatcactgaaattaaaaaatgtgaattaagttcatatccaccttttggggaagcaggacaaaccaccaccccaccaagtgtgtgacttctccatatcccactgcagtttccattttttaaatgggaattttcaatcccctgtgcttgtctaacgtctgctttaaaaagtttgagaccctgttactgtttgaaaatgcatgcatgttacgatgaatctccaacctgaggaaaaaaataaaactcaaaaagctttgtgtaaaaaaaaaaagtgtgagtc

SEQ ID NO: 321647 - DNA, 5117 bp, Homo sapiens
gagcctcttgcccttgcgcagagccactgtgagaggcggtgggagccaacacccttgggggagggggcagtactgctcggcacatcccagcatcaggtcagatcattgaaattaaaaaatgtgatttaagtttaaggagtattgccccatggtgttccgaaaccttcgggagaggtttggaattgatgatcaggattaccagaattcagtgacgcgcagcgcccccatcaacagtgacagccagggtcggtgtggcacgcgtttcctcaccacctacgaccggcgctttgtcatcaagactgtgtccagcgaggacgtggcggagatgcacaacatcttaaagaaataccaccagtttatagtggagtgtcatggcaacacgcttttgccacagttcctgggcatgtaccgcctgaccgtggatggtgtggaaacctacatggtggttaccaggaacgtgttcagccatcggctcactgtgcatcgcaagtatgacctcaagggttctacggttgccagagaagcgagcgacaaggagaaggccaaggacttgccaacattcaaagacaatgacttcctcaatgaagggcagaagctgcatgtgggagaggagagtaaaaagaacttcctggagaaactgaagcgggacgttgagttcttggcacagctgaagatcatggactacagcctgctggtgggcatccacgacgtggaccgggcagagcaggaggagatggaggtggaggagcgggcagaggacgaggagtgtgagaatgatggggtgggtggcaacctactctgctcctatggcacacctccggacagccctggcaacctcctcagctttcctcggttctttggtcctggggaattcgacccctctgttgacgtctatgccatgaaaagccatgaaagttcccccaagaaggaggtgtatttcatggccatcattgatatcctcacgccatacgatacaaagaagaaagctgcacatgctgccaaaacggtgaaacacggggcaggggccgagatctcgactgtgaaccctgagcagtactccaaacgcttcaacgagtttatgtccaacatcctgacgtagttctcttctaccttcagccagacccagagagctggatatggggtcggggatcgggacttagggagaagggtgtatttgggctagatgggagggtgggagcagagtcgggtttgggagggctttagcaatgagactgcagcctgtgacaccgaaagagactttagctgaagaggagggggatgtgctgtgtgtgcacctgctcacaggatgtaaccccaccttctgcttacccttgattttttctccccatttgacacccaggttaaaaaggggttccctttttggtaccttgtaaccttttaagataccttggggctagagatgacttcgtgggtttatttgggttttgtttctgaaatttcattgctccaggtttgctatttataatcatatttcatcagcctacccaccctccccatctttgctgagctctcagttcccttcaattaaagagatacccggtagacccagcacaagggtccttccagaaccaagtgctatggatgccagattggagaggtcagacacctcgccctgctgcatttgctcttgtctggattaactttgtaatttatggagtattgtgcacaacttcctccacctttcccttggattcaagtgaaaactgttgcattattcctccatcctgtctggaatacaccaggtcaacaccagagatctcagatcagaatcagagatctcagaggggaataagttcatcctcatgggatggtgaggggcaggaaagcggctgggctcttggacacctggttctcagagaaccctgtgatgatcacccaagccccaggctgtcttagcccctggagttcagaagtcctctctgtaaagcctgcctcccactaggtcaagaggaactagagtacctttggatttatcaggaccctcatgtttaaatggttatttccctttgggaaaacttcagaaactgatgtatcaaatgaggccctgtgccctcgatctatttccttcttccttctgacctcctcccaggcactcttacttctagccgaactcttagctctgggcagatctccaagcgcctggagtgctttttagcagagacacctcgttaagctccgggatgaccttgtaggagatctgtctccctgtgcctggagagttacagccagcaaggtgcccccatcttagagtgtggtgtccaaacgtgaggtggcttcctagttacatgaggatgtgatccaggaaatccagtttggaggcttgatgtgggttttgacctggcctcagccttggggctgtttttccttgttgccccgctctagacttttagcagatctgcagcccacaggcttttttggaaggagtggcttcctgcaggtgttccacctgccttcggagcctgccacccaggccctcagaactgagccacaggctgctctggccaggagagaaacagctctgttgttctgcattgggggaggtacattcctgcatcttctcaccccctcaaccaggaactggggatttgggatgagatatggtcagacttgtagataaccccaaagatgtgaagatcgcttgtgaaaccattttgaatgaatagattggtttcctgtggctccctccaaacctggccaagcccagcttccgaagcaggaaccagcactgtctctgtgcctgactcacagcatataggtcaggaaagaatggagacggcattcttggacttcactggggctgctggattggatgggaaaccttctggaagaggcagatgggggtcaaaccactgccttggccccaggaaggggccataggtaggtctgaacaactgccgcaagaccactacatgacttagggaacttgaaaccaactggctcatggagaaaacaaatttgacttgggaaagggattatgtaggaataatgtttggacttgatttccccacgtcataatgaagaatggaagtttggatctgctcctcgtcaggcgcagcatctctgaagcttggaaagctgtcttccagcagcctccgtggcctcgggttcctaccggcttctctgcatttggtctgctgatcatgttgccataatgtgtatggaaagtgtaacacattcttactggttaaagacgactaccaggtatctaacttgtttaacattgagtttgtgtgtgtgtgtgtatgtttgtgtgttttgtatattgtttacattttgagaggtagcattctgtttcaaatgctttttgtttttctgacagtattgttgactgggtcataacattttgagctgtggtttggtggattttcaattttttttttaaaggtcattcgctgtgctatcttcaaaaccttgagtttggcccccaatttttggcattcaaatgtttaaaagctatttatcttggtttatacaagtttcctttctcttctttttgtcatggtattctatttggtctgcagtttgaatgtagagaaagtggactgatcccccaagcgttgtctgcccccactctttcctccttgggtcccgccattcttttactgggcagtcgagggcattggaggggaagtgactgccctcagcctcactccctggggccatgaagaaaagctaaacagtctcatggcatctcagaataatgttgggtctcccaagaagaaaggtgtaagaataacgacatggctgattaggcgaggccaggatagggctaaggccaggattcctggctggcatccagtcaccccttctcccatccttccccctcttcttccacaagtccgcagccgagacactgtagtctcccagccacagtgatgagtgccctggagactccactgacctctagatgaaggcccctggccctggttcctgttaattaacctctgggtctttgagtcccccagcacaaacttctttcctgtaccctgcggcttggggtcacagggcatgccgggaagccacagctgaggggcgcagactgaagcagtgctccacctctccttctttagctcaggggttgctggtctgtggcaggcgccacgagtggcccctgtggctgttctcagtggcagtctcttaagttcccaccacaggcagctctttatcccctctccctacttgactctttctcttgcctgtgcttttggcctcaaacaggcctgctggtagcgctcagggcgtgaggctacactcctgccctgcctttcctgtcttcatggtctgccagggcataccttggggaggtggaccaaagacccaggactttttgcagtagccagtcctaccccccagttgtctttttaccaattcagggtgggagagaaaactgcagcaccccagcatgtgagttactcaggtgttgggggctagaagggacagtgcgtttaaacaacactcagagctctggccttaaacctgtggccccccaagtctaggagcctcatctcttcctggcagtcatgcgggcaggaggtcctgaaagggaaaacccattcagacaactgttccccaatctaccagccatctgcaggggtcagtgaccgtggccctctccctcctctagaatgtgccacttatgaagagtgccccatggggaaaaggagactcagctgtcccttggcagcttgtgccagtatcccagggcagaagtttccacaggagcctcttgcccttgcgcagagccactgtgagaggcggtgggagccaacacccttgggggagggggcagtactgctcggcacatcccagcatcaggtcagatcactgaaattaaaaaatgtgaattaagttcatatccaccttttggggaagcaggacaaaccaccaccccaccaagtgtgtgacttctccatatcccactgcagtttccattttttaaatgggaattttcaatcccctgtgcttgtctaacgtctgctttaaaaagtttgagaccctgttactgtttgaaaatgcatgcatgttacgatgaatctccaacctgaggaaaaaaataaaactcaaaaagctttgtgtaaaaaaaaaaagtgtgagtc

SEQ ID NO: 321648 - DNA, 5210 bp, Homo sapiens
ttgcgggaaagagccaaaccctggcgttggggggcccgggcggggagcccctcccgcggtccacagcgacgcctgcccagccctcctccccttccggctccggcacggggccccgaggcgttcggaggccaggcgggtttctgtcaggcccggggaggaggggcgggcggggcggccgctgcctccccgggacgggccgtaccacgcggacggggaggacggggccaggggactgcagggcggctgcaccgcccgggggcggggtgcggagcgggccggcgggctccccggggcggggcgggagggcggggcgtggggcggacggaaccaccggggcggggtgggaggtaacgggacgggcgcgaccatggcgcggtgagggagcgggggtggggatcggtccgggggaggcctgaggccgctggcttgtgcgctgtctccgccgcccccctctttcgccgccgccgccgccgccccgggcatgtcgtccaactgcaccagcaccacggcggtggcggtggcgccgctcagcgccagcaagaccaagaccaagaagaagcatttcgtgtgccagaaagtgaagctattccgggccagcgagccgatcctcagcgtcctgatgtggggggtgaaccacacgatcaatgagctgagcaatgttcctgttcctgtcatgctaatgccagatgacttcaaagcctacagcaagatcaaggtggacaatcatctcttcaataaggagaacctgcccagccgctttaagtttaaggagtattgccccatggtgttccgaaaccttcgggagaggtttggaattgatgatcaggattaccagaattcagtgacgcgcagcgcccccatcaacagtgacagccagggtcggtgtggcacgcgtttcctcaccacctacgaccggcgctttgtcatcaagactgtgtccagcgaggacgtggcggagatgcacaacatcttaaagaaataccaccagtttatagtggagtgtcatggcaacacgcttttgccacagttcctgggcatgtaccgcctgaccgtggatggtgtggaaacctacatggtggttaccaggaacgtgttcagccatcggctcactgtgcatcgcaagtatgacctcaagggttctacggttgccagagaagcgagcgacaaggagaaggccaaggacttgccaacattcaaagacaatgacttcctcaatgaagggcagaagctgcatgtgggagaggagagtaaaaagaacttcctggagaaactgaagcgggacgttgagttcttggcacagctgaagatcatggactacagcctgctggtgggcatccacgacgtggaccgggcagagcaggaggagatggaggtggaggagcgggcagaggacgaggagtgtgagaatgatggggtgggtggcaacctactctgctcctatggcacacctccggacagccctggcaacctcctcagctttcctcggttctttggtcctggggaattcgacccctctgttgacgtctatgccatgaaaagccatgaaagttcccccaagaaggaggtgtatttcatggccatcattgatatcctcacgccatacgatacaaagaagaaagctgcacatgctgccaaaacggtgaaacacggggcaggggccgagatctcgactgtgaaccctgagcagtactccaaacgcttcaacgagtttatgtccaacatcctgacgtagttctcttctaccttcagccagacccagagagctggatatggggtcggggatcgggacttagggagaagggtgtatttgggctagatgggagggtgggagcagagtcgggtttgggagggctttagcaatgagactgcagcctgtgacaccgaaagagactttagctgaagaggagggggatgtgctgtgtgtgcacctgctcacaggatgtaaccccaccttctgcttacccttgattttttctccccatttgacacccaggttaaaaaggggttccctttttggtaccttgtaaccttttaagataccttggggctagagatgacttcgtgggtttatttgggttttgtttctgaaatttcattgctccaggtttgctatttataatcatatttcatcagcctacccaccctccccatctttgctgagctctcagttcccttcaattaaagagatacccggtagacccagcacaagggtccttccagaaccaagtgctatggatgccagattggagaggtcagacacctcgccctgctgcatttgctcttgtctggattaactttgtaatttatggagtattgtgcacaacttcctccacctttcccttggattcaagtgaaaactgttgcattattcctccatcctgtctggaatacaccaggtcaacaccagagatctcagatcagaatcagagatctcagaggggaataagttcatcctcatgggatggtgaggggcaggaaagcggctgggctcttggacacctggttctcagagaaccctgtgatgatcacccaagccccaggctgtcttagcccctggagttcagaagtcctctctgtaaagcctgcctcccactaggtcaagaggaactagagtacctttggatttatcaggaccctcatgtttaaatggttatttccctttgggaaaacttcagaaactgatgtatcaaatgaggccctgtgccctcgatctatttccttcttccttctgacctcctcccaggcactcttacttctagccgaactcttagctctgggcagatctccaagcgcctggagtgctttttagcagagacacctcgttaagctccgggatgaccttgtaggagatctgtctccctgtgcctggagagttacagccagcaaggtgcccccatcttagagtgtggtgtccaaacgtgaggtggcttcctagttacatgaggatgtgatccaggaaatccagtttggaggcttgatgtgggttttgacctggcctcagccttggggctgtttttccttgttgccccgctctagacttttagcagatctgcagcccacaggcttttttggaaggagtggcttcctgcaggtgttccacctgccttcggagcctgccacccaggccctcagaactgagccacaggctgctctggccaggagagaaacagctctgttgttctgcattgggggaggtacattcctgcatcttctcaccccctcaaccaggaactggggatttgggatgagatatggtcagacttgtagataaccccaaagatgtgaagatcgcttgtgaaaccattttgaatgaatagattggtttcctgtggctccctccaaacctggccaagcccagcttccgaagcaggaaccagcactgtctctgtgcctgactcacagcatataggtcaggaaagaatggagacggcattcttggacttcactggggctgctggattggatgggaaaccttctggaagaggcagatgggggtcaaaccactgccttggccccaggaaggggccataggtaggtctgaacaactgccgcaagaccactacatgacttagggaacttgaaaccaactggctcatggagaaaacaaatttgacttgggaaagggattatgtaggaataatgtttggacttgatttccccacgtcataatgaagaatggaagtttggatctgctcctcgtcaggcgcagcatctctgaagcttggaaagctgtcttccagcagcctccgtggcctcgggttcctaccggcttctctgcatttggtctgctgatcatgttgccataatgtgtatggaaagtgtaacacattcttactggttaaagacgactaccaggtatctaacttgtttaacattgagtttgtgtgtgtgtgtgtatgtttgtgtgttttgtatattgtttacattttgagaggtagcattctgtttcaaatgctttttgtttttctgacagtattgttgactgggtcataacattttgagctgtggtttggtggattttcaattttttttttaaaggtcattcgctgtgctatcttcaaaaccttgagtttggcccccaatttttggcattcaaatgtttaaaagctatttatcttggtttatacaagtttcctttctcttctttttgtcatggtattctatttggtctgcagtttgaatgtagagaaagtggactgatcccccaagcgttgtctgcccccactctttcctccttgggtcccgccattcttttactgggcagtcgagggcattggaggggaagtgactgccctcagcctcactccctggggccatgaagaaaagctaaacagtctcatggcatctcagaataatgttgggtctcccaagaagaaaggtgtaagaataacgacatggctgattaggcgaggccaggatagggctaaggccaggattcctggctggcatccagtcaccccttctcccatccttccccctcttcttccacaagtccgcagccgagacactgtagtctcccagccacagtgatgagtgccctggagactccactgacctctagatgaaggcccctggccctggttcctgttaattaacctctgggtctttgagtcccccagcacaaacttctttcctgtaccctgcggcttggggtcacagggcatgccgggaagccacagctgaggggcgcagactgaagcagtgctccacctctccttctttagctcaggggttgctggtctgtggcaggcgccacgagtggcccctgtggctgttctcagtggcagtctcttaagttcccaccacaggcagctctttatcccctctccctacttgactctttctcttgcgcagagccactgtgagaggcggtgggagccaacacccttgggggagggggcagtactgctcggcacatcccagcatcaggtcagatcactgaaattaaaaaatgtgaattaagttcatatccaccttttggggaagcaggacaaaccaccaccccaccaagtgtgtgacttctccatatcccactgcagtttccattttttaaatgggaattttcaatcccctgtgcttgtctaacgtctgctttaaaaagtttgagaccctgttactgtttgaaaatgcatgcatgttacgatgaatctccaacctgaggaaaaaaataaaactcaaaaagctttgtgtaaaaaaaaaaagtgtgagtc

SEQ ID NO: 321649 - DNA, 3260 bp, Homo sapiens
ttgcgggaaagagccaaaccctggcgttggggggcccgggcggggagcccctcccgcggtccacagcgacgcctgcccagccctcctccccttccggctccggcacggggccccgaggcgttcggaggccaggcgggtttctgtcaggcccggggaggaggggcgggcggggcggccgctgcctccccgggacgggccgtaccacgcggacggggaggacggggccaggggactgcagggcggctgcaccgcccgggggcggggtgcggagcgggccggcgggctccccggggcggggcgggagggcggggcgtggggcggacggaaccaccggggcggggtgggaggtaacgggacgggcgcgaccatggcgcggtgagggagcgggggtggggatcggtccgggggaggcctgaggccgctggcttgtgcgctgtctccgccgcccccctctttcgccgccgccgccgccgccccgggcatgtcgtccaactgcaccagcaccacggcggtggcggtggcgccgctcagcgccagcaagaccaagaccaagaagaagcatttcgtgtgccagaaagtgaagctattccgggccagcgagccgatcctcagcgtcctgatgtggggggtgaaccacacgatcaatgagctgagcaatgttcctgttcctgtcatgctaatgccagatgacttcaaagcctacagcaagatcaaggtggacaatcatctcttcaataaggagaacctgcccagccgctttaagtttaaggagtattgccccatggtgttccgaaaccttcgggagaggtttggaattgatgatcaggattaccagaattcagtgacgcgcagcgcccccatcaacagtgacagccagggtcggtgtggcacgcgtttcctcaccacctacgaccggcgctttgtcatcaagactgtgtccagcgaggacgtggcggagatgcacaacatcttaaagaaataccaccagtttatagtggagtgtcatggcaacacgcttttgccacagttcctgggcatgtaccgcctgaccgtggatggtgtggaaacctacatggtggttaccaggaacgtgttcagccatcggctcactgtgcatcgcaagtatgacctcaagggttctacggttgccagagaagcgagcgacaaggagaaggccaaggacttgccaacattcaaagacaatgacttcctcaatgaagggcagaagctgcatgtgggagaggagagtaaaaagaacttcctggagaaactgaagcgggacgttgagttcttggcacagctgaagatcatggactacagcctgctggtgggcatccacgacgtggaccgggcagagcaggaggagatggaggtggaggagcgggcagaggacgaggagtgtgagaatgatggggtgggtggcaacctactctgctcctatggcacacctccggacagccctggcaacctcctcagctttcctcggttctttggtcctggggaattcgacccctctgttgacgtctatgccatgaaaagccatgaaagttcccccaagaaggaggtgtatttcatggccatcattgatatcctcacgccatacgatacaaagaagaaagctgcacatgctgccaaaacggtgaaacacggggcaggggccgagatctcgactgtgaaccctgagcagtactccaaacgcttcaacgagtttatgtccaacatcctgacgtagttctcttctaccttcagccagacccagagagctggatatggggtcggggatcgggacttagggagaagggtgtatttgggctagatgggagggtgggagcagagtcgggtttgggagggctttagcaatgagactgcagcctgtgacaccgaaagagactttagctgaagaggagggggatgtgctgtgtgtgcacctgctcacaggatgtaaccccaccttctgcttacccttgattttttctccccatttgacacccaggttaaaaaggggttccctttttggtaccttgtaaccttttaagataccttggggctagagatgacttcgtgggtttatttgggttttgtttctgaaatttcattgctccaggtttgctatttataatcatatttcatcagcctacccaccctccccatctttgctgagctctcagttcccttcaattaaagagatacccggtagacccagcacaagggtccttccagaaccaagtgctatggatgccagattggagaggtcagacacctcgccctgctgcatttgctcttgtctggattaactttgtaatttatggagtattgtgcacaacttcctccacctttcccttggattcaagtgaaaactgttgcattattcctccatcctgtctggaatacaccaggtcaacaccagagatctcagatcagaatcagagatctcagaggggaataagttcatcctcatgggatggtgaggggcaggaaagcggctgggctcttggacacctggttctcagagaaccctgtgatgatcacccaagccccaggctgtcttagcccctggagttcagaagtcctctctgtaaagcctgcctcccactaggtcaagaggaactagagtacctttggatttatcaggaccctcatgtttaaatggttatttccctttgggaaaacttcagaaactgatgtatcaaatgaggccctgtgccctcgatctatttccttcttccttctgacctcctcccaggcactcttacttctagccgaactcttagctctgggcagatctccaagcgcctggagtgctttttagcagagacacctcgttaagctccgggatgaccttgtaggagatctgtctccctgtgcctggagagttacagccagcaaggtgcccccatcttagagtgtggtgtccaaacgtgaggtggcttcctagttacatgaggatgtgatccaggaaatccagtttggaggcttgatgtgggttttgacctggcctcagccttggggctgtttttccttgttgccccgctctagacttttagcagatctgcagcccacaggcttttttggaaggagtggcttcctgcaggtgttccacctgccttcggagcctgccacccaggccctcagaactgagccacaggctgctctggccaggtttggagggagccacaggaaaccaatctattcattcaaaatggtttcacaagcgatcttcacatctttggggttatctacaagtctgaccatatctcatc

SEQ ID NO: 321650 - DNA, 2171 bp, Homo sapiens
ttgcgggaaagagccaaaccctggcgttggggggcccgggcggggagcccctcccgcggtccacagcgacgcctgcccagccctcctccccttccggctccggcacggggccccgaggcgttcggaggccaggcgggtttctgtcaggcccggggaggaggggcgggcggggcggccgctgcctccccgggacgggccgtaccacgcggacggggaggacggggccaggggactgcagggcggctgcaccgcccgggggcggggtgcggagcgggccggcgggctccccggggcggggcgggagggcggggcgtggggcggacggaaccaccggggcggggtgggaggtaacgggacgggcgcgaccatggcgcggtgagggagcgggggtggggatcggtccgggggaggcctgaggccgctggcttgtgcgctgtctccgccgcccccctctttcgccgccgccgccgccgccccgggcatgtcgtccaactgcaccagcaccacggcggtggcggtggcgccgctcagcgccagcaagaccaagaccaagaagaagcatttcgtgtgccagaaagtgaagctattccgggccagcgagccgatcctcagcgtcctgatgtggggggtgaaccacacgatcaatgagctgagcaatgttcctgttcctgtcatgctaatgccagatgacttcaaagcctacagcaagatcaaggtggacaatcatctcttcaataaggagaacctgcccagccgctttaagtttaaggagtattgccccatggtgttccgaaaccttcgggagaggtttggaattgatgatcaggattaccagaattcagtgacgcgcagcgcccccatcaacagtgacagccagggtcggtgtggcacgcgtttcctcaccacctacgaccggcgctttgtcatcaagactgtgtccagcgaggacgtggcggagatgcacaacatcttaaagaaataccaccagtttatagtggagtgtcatggcaacacgcttttgccacagttcctgggcatgtaccgcctgaccgtggatggtgtggaaacctacatggtggttaccaggaacgtgttcagccatcggctcactgtgcatcgcaagtatgacctcaagggttctacggttgccagagaagcgagcgacaaggagaaggccaaggacttgccaacattcaaagacaatgacttcctcaatgaagggcagaagctgcatgtgggagaggagagtaaaaagaacttcctggagaaactgaagcgggacgttgaggtacttactaaccttcattttcacctgcaaggctccttctgtacctagagtaggcgcctcttaaaccttaagaagaatggaattcagtactttccaggagtatggacaaaagggtggtgatttgagcagcgtgggcacttatgggcacctaaagcaagtgcaaatgatcattccacctgacggagcatagttggcgccagtaggacctttgtaatttagtttagaatgcttttcccttttcactaattcattccaacacctttttcaaactcccttctgctgttgtccctacaatggagagggcatctggccatcagagctgtaggaacccagctattaaggtcctgtaaccccaacattttgggaggctgaggtgggaggatcgcttgagctcagcagttcaataccagcctaggcaacatagcaagacctcatctctactaaaaattaaaaaatttagccaggcgtaggggcacacacctgtagtcccagctacttgggaggctgaggcgaaaggattgtttgagcccgggagatgaggctgcagtgagctgtggtctcaccactacactccagcctgggcaacagagcaagacattgtctcaaaacaaaaaccgaaaaagttggctaagcatggtggcttactcttgtaatcccagcaccttggaagggtgaggcaggaggatcactggagcctggcagatcaaggcaacatgagctgtgatcatgccactgtgctccagcctgggtgacagagcaagaccctgtctcaaaaaacaaaaatccactaatcaggttcttctctggctctggctctgattctccacttacctagcaaacttctgtttgtaatctggggaggacaggtgctaaatagtgaaaa

SEQ ID NO: 321651 - DNA, 1281 bp, Homo sapiens
ttgcgggaaagagccaaaccctggcgttggggggcccgggcggggagcccctcccgcggtccacagcgacgcctgcccagccctcctccccttccggctccggcacggggccccgaggcgttcggaggccaggcgggtttctgtcaggcccggggaggaggggcgggcggggcggccgctgcctccccgggacgggccgtaccacgcggacggggaggacggggccaggggactgcagggcggctgcaccgcccgggggcggggtgcggagcgggccggcgggctccccggggcggggcgggagggcggggcgtggggcggacggaaccaccggggcggggtgggaggtaacgggacgggcgcgaccatggcgcggtgagggagcgggggtggggatcggtccgggggaggcctgaggccgctggcttgtgcgctgtctccgccgcccccctctttcgccgccgccgccgccgccccgggcatgtcgtccaactgcaccagcaccacggcggtggcggtggcgccgctcagcgccagcaagaccaagaccaagaagaagcatttcgtgtgccagaaagtgaagctattccgggccagcgagccgatcctcagcgtcctgatgtggggggtgaaccacacgatcaatgagctgagcaatgttcctgttcctgtcatgctaatgccagatgacttcaaagcctacagcaagatcaaggtggacaatcatctcttcaataaggagaacctgcccagccgctttaagtttaaggagtattgccccatggtgttccgaaaccttcgggagaggtttggaattgatgatcaggattaccagaattcagtgacgcgcagcgcccccatcaacagtgacagccagggtcggtgtggcacgcgtttcctcaccacctacgaccggcgctttgtcatcaagactgtgtccagcgaggacgtggcggagatgcacaacatcttaaagaaataccaccagtttatagtggagtgtcatggcaacacgcttttgccacagttcctgggcatgtaccgccttttggggaagcaggacaaaccaccaccccaccaagtgtgtgacttctccatatcccactgcagtttccattttttaaatgggaattttcaatcccctgtgcttgtctaacgtctgctttaaaaagtttgagaccctgttactgtttgaaaatgcatgcatgttacgatgaatctccaacctgaggaaaaaaataaaactcaaaaagctttgtgtaaaaaaaaaaagtgtgagtc

SEQ ID NO: 321652 - DNA, 5119 bp, Homo sapiens
gctggcggagagcggcctgcgggcgatcgggccgagcctcgctcaaggagcacccccggggcaccctcctgtccgatggcagcccggccctgtccaggaatgtcggtatgacggtctctcagaaagggggtccccagccaacaccgagcccggctggccctgggacgcaactcggaccaatcacaggagagatggatgaagccgattctgcgtttttaaaatttaagcagacagctgatgactctctgtcccttacatctccaaacaccgagtccatttttgtagaagatccctacaccgcctcgctgaggagtgagattgagtcagacggccacgagtttgaagctgagtcctggagcctcgccgtggatgcagcctacgccaagaagcaaaagagggaggtggtgaaaagacaagatgtcctttatgagctgatgcagacagaggtgcaccacgtgcggacgctcaagatcatgctgaaggtgtactccagggccctgcaggaggagctgcagttcagcagcaaggccattggccgcctcttcccatgcgctgacgacctgctggagacgcacagccacttcctcgctcggctcaaggagcgccgccaggagtccctggaggagggcagtgaccggaattatgtcatccagaaaatcggcgacctcctggttcagcagttttcaggtgaaaatggggagagaatgaaagaaaagtacggtgtgttttgtagtggccacaatgaagctgttagtcattacaagttgctgcttcagcaaaacaagaaatttcaaaacttgatcaagaaaattggcaacttctccatcgtgcggcggcttggcgtgcaggagtgcattctcctggttacacaacgcataaccaaatacccagtgctggtggagcgcatcatccagaacacggaagctggcactgaggactatgaagacctgacccaggccttgaacctcatcaaagatatcatctcacaagtggacgccaaggtcagtgagtgtgagaagggccagcgcctcagggagatcgcagggaagatggacctgaagtcttccagcaaactcaagaacgggctcaccttccgcaaggaagacatgcttcagcggcagctccacctggagggcatgctatgctggaagaccacatcagggcgcttgaaagatatcctggctatcctgctgaccgacgtacttttgctgctacaagaaaaagatcagaaatacgtctttgcttctgtggactcaaagccacccgtcatctcgttacaaaagctcatcgtgagggaagtggccaacgaggagaaagcgatgtttctgatcagcgcctccttgcaagggccggagatgtatgaaatctacacgagctccaaagaggacaggaacgcctggatggcccacatccaaagggctgtggagagctgccctgacgaggaggaggggcccttcagcctgcccgaagaggaaaggaaggtggtcgaggcccgcgccacgagactccgggactttcaagagcggttgagcatgaaagaccagctgatcgcacagagcctcctagagaaacagcagatctacctggagatggccgagatgggcggcctcgaagacctgccccagccccgaggcctattccgtggaggggacccatccgagaccctgcagggggagctaattctcaagtcggccatgagcgagatcgagggcatccagagcctgatctgcaggcggctgggcagcgccaacggccaggcggaagacggaggcagctccacaggcccgcccaggagggctgagaccttcgcgggctacgactgcacaaacagccccaccaagaatggcagtttcaagaagaaagtcagcagcactgaccccaggccccgagactggcgaggccccccaaacagcccggacttgaagctcagtgacagtgacattcctgggagctctgaggaatcgccgcaggtggtggaggcgccaggcacggaatccgatccccgtctgcccaccgtcctggagtcggagcttgtccagcggatccagacactgtcccagctgctcctgaaccttcaggcggtaatcgcccaccaggacagctatgtggagacgcagcgggctgccatccaggagcgggagaagcagttccggctgcagtcgacgcgtgggaacctgctgctggagcaggagcggcaacgcaacttcgagaagcagcgggaggagcgcgcggccctggagaagctgcagagccagctgcggcacgagcagcagcgctgggagcgcgagcgccagtggcagcaccaggagctggagcgtgcgggcgcgcggctgcaggagcgcgagggcgaggcgcggcagctacgcgagcggctggagcaggagcgggccgagctggagcgccagcgccaggcctaccagcacgacctggagcggctgcgcgaggcccagcgtgccgtggagcgcgagcgggagcgcctggagctgctgcgccgcctcaagaagcagaacaccgcgccaggcgcgctgccgcccgacacactggccgaggcccagcccccaagccaccctcccagcttcaacggggaagggctggagggccctcgtgtgagcatgctgccatccggcgtggggccagagtacgcagagcgccccgaggtggctcgccgggacagcgcccccaccgagaaccggctggccaagagcgatgtgcccatccagctgctcagcgccaccaaccagttccagaggcaggcggccgtgcagcagcagatccccaccaagctggcggcctccaccaagggtggcaaggacaagggcggcaagagcaggggctctcagcgctgggagagctcagcgtccttcgacctgaagcagcagctgctgctcaacaagctcatggggaaagatgagagcacctcacggaaccgccgctcgctgagccctatcctgcccggcagacacagtcctgcgcccccaccagaccctggcttccccgccccgagcccaccgccagctgacagcccctccgagggcttctctctcaaggccgggggcacagccctcctgcccggccccccagctccctcgccactgccggccacaccactcagcgccaaggaggacgccagcaaagaagacgtcatcttcttctaaaagggccgtgactcaaggaaagtttttaatggaaagttgagccagaactaaaccagggagctgtctgaaatcatagcaccccatccgggtggcggggagatcaactccgagctgtttttccgaggcagtgaggaacggtgccggctctgcacggagctgaggacaggacagaccttgctttgagaaggagctgccggccggggccacgctccacagccgccgcgcgacagtggagccaagggttagggcaccaggaggggccaggtggcgtcggcagcatctgtccccagaatcaggcagaatccacttcccaaacagagccccacgcaggttcaccatgaacctcagggtcagggaatgagccaggcacgggggcatgggcagagagggccacggggcagggcccactgagggaacatcagtggccctccagtcaggttctgtgggtttggaagcccatcgtgaaaggggctgacctttgcccctttttacttggcattggttttgaaaccagctgtttcccaaactctgcttcccaagggcaaccgttgctgttcacacgctcagcctgtctgggggagcgggcctctagcttcagccagggcgggtacacaccctgggcacagggtcctcagcccccgggaaatgagctcccagggctggcgtcccaccttccaggtgggggctggcacatcacagactgtcgagagcgccatgtcccagggcatgcagaggatgcacctagagacgttgcagcaagtggacaagtggccgctgtgcgggcccctcgcttgtagtgagctgttgcagcttacggtccgttccctggaggggtggaggaaggaggtgttgggcagcatcaaaggtgctgggacatcccagggtggtgagatccatccacgatccagctccggtggagaaagggcccatgtcaagccttgttctgcaccccaagcattggtggtaggactgggtcctggctgatcgtccttgttcccagtggggtacatgtgagcccctgccagggccaagtccttctcccgaacccagggtcctgggaactgcagatcccggggggattcagcccttctcccactgtgctggcagaggcactcctgtgacgctgaatacagtgaacagggacattcccgccactcggggacagatgggcacaagggaggggaaactccatcaggaagtgctcccctgggcagaggcgcccactgggtgctgtgggctcaggagggggcggggcaggagctggtgccaaccgggaaccagagccccacagccatacagcccattggtgacaaggtcctgagaacacagtggccaggtgtccccaggctcctggcccctccgacgacctcaactctgcccagcccggtccctggccatcagcgacgctgtccgccccccgtcagatcccatgtgtgccatgtttatcatcagtgttttgtatttttgtactgagtatcggagcactttacagaagctgactgtacattcctgttctgttgtgaagagaacattcccagaccctggcaccctcctgagccggcgtgtgccggtccagccctccgagatgccacaattccttggatgggggagaagttcaaggaatttctgctcggccacgcggtgggaaccccgcgtccccgccatgtggcagaggggtctcagtcgtgctaggcatcgggcggcagcgccgacagcccttccctcgccagtgcccctcggccactcctgggttggagcccgattttatttgtaaagttgacagtcgagcaaatgttcctattttcgtgggatctgcacacgtctttgtcagttgtggtcatgatcttagtcacctgctaattatttttacaatgattacaacatttcctcactgcgggatatttctgacccgctttagaacttaagacctgattctagcaataaacgtgtccgagatgaaaaaa

SEQ ID NO: 321653 - DNA, 5179 bp, Homo sapiens
agcaccaactctgtccttgcctctgtcacagcctcgctcaaggagcacccccggggcaccctcctgtccgatggcagcccggccctgtccaggaatgtcggtatgacggtctctcagaaagggggtccccagccaacaccgagcccggctggccctgggacgcaactcggaccaatcacaggagagatggatgaagccgattctgcgtttttaaaatttaagcagacagctgatgactctctgtcccttacatctccaaacaccgagtccatttttgtagaagatccctacaccgcctcgctgaggagtgagattgagtcagacggccacgagtttgaagctgagtcctggagcctcgccgtggatgcagcctacgccaagaagcaaaagagggaggtggtgaaaagacaagatgtcctttatgagctgatgcagacagaggtgcaccacgtgcggacgctcaagatcatgctgaaggtgtactccagggccctgcaggaggagctgcagttcagcagcaaggccattggccgcctcttcccatgcgctgacgacctgctggagacgcacagccacttcctcgctcggctcaaggagcgccgccaggagtccctggaggagggcagtgaccggaattatgtcatccagaaaatcggcgacctcctggttcagcagttttcaggtgaaaatggggagagaatgaaagaaaagtacggtgtgttttgtagtggccacaatgaagctgttagtcattacaagttgctgcttcagcaaaacaagaaatttcaaaacttgatcaagaaaattggcaacttctccatcgtgcggcggcttggcgtgcaggagtgcattctcctggttacacaacgcataaccaaatacccagtgctggtggagcgcatcatccagaacacggaagctggcactgaggactatgaagacctgacccaggccttgaacctcatcaaagatatcatctcacaagtggacgccaaggtcagtgagtgtgagaagggccagcgcctcagggagatcgcagggaagatggacctgaagtcttccagcaaactcaagaacgggctcaccttccgcaaggaagacatgcttcagcggcagctccacctggagggcatgctatgctggaagaccacatcagggcgcttgaaagatatcctggctatcctgctgaccgacgtacttttgctgctacaagaaaaagatcagaaatacgtctttgcttctgtggactcaaagccacccgtcatctcgttacaaaagctcatcgtgagggaagtggccaacgaggagaaagcgatgtttctgatcagcgcctccttgcaagggccggagatgtatgaaatctacacgagctccaaagaggacaggaacgcctggatggcccacatccaaagggctgtggagagctgccctgacgaggaggaggggcccttcagcctgcccgaagaggaaaggaaggtggtcgaggcccgcgccacgagactccgggactttcaagagcggttgagcatgaaagaccagctgatcgcacagagcctcctagagaaacagcagatctacctggagatggccgagatgggcggcctcgaagacctgccccagccccgagccaggagggctgagaccttcgcgggctacgactgcacaaacagccccaccaagaatggcagtttcaagaagaaagtcagcagcactgaccccaggccccgagactggcgaggccccccaaacagcccggacttgaagctcagtgacagtgacattcctgggagctctgaggaatcgccgcaggtggtggaggcgccaggcacggaatccgatccccgtctgcccaccgtcctggagtcggagcttgtccagcggatccagacactgtcccagctgctcctgaaccttcaggcggtaatcgcccaccaggacagctatgtggagacgcagcgggctgccatccaggagcgggagaagcagttccggctgcagtcgacgcgtgggaacctgctgctggagcaggagcggcaacgcaacttcgagaagcagcgggaggagcgcgcggccctggagaagctgcagagccagctgcggcacgagcagcagcgctgggagcgcgagcgccagtggcagcaccaggagctggagcgtgcgggcgcgcggctgcaggagcgcgagggcgaggcgcggcagctacgcgagcggctggagcaggagcgggccgagctggagcgccagcgccaggcctaccagcacgacctggagcggctgcgcgaggcccagcgtgccgtggagcgcgagcgggagcgcctggagctgctgcgccgcctcaagaagcagaacaccgcgccaggcgcgctgccgcccgacacactggccgaggcccagcccccaagccaccctcccagcttcaacggggaagggctggagggccctcgtgtgagcatgctgccatccggcgtggggccagagtacgcagagcgccccgaggtggctcgccgggacagcgcccccaccgagaaccggctggccaagagcgatgtgcccatccagctgctcagcgccaccaaccagttccagaggcaggcggccgtgcagcagcagatccccaccaagctggcggcctccaccaagggtggcaaggacaagggcggcaagagcaggggctctcagcgctgggagagctcagcgtccttcgacctgaagcagcagctgctgctcaacaagctcatggggaaagatgagagcacctcacggaaccgccgctcgctgagccctatcctgcccggcagacacagtcctgcgcccccaccagaccctggcttccccgccccgagcccaccgccagctgacagcccctccgagggcttctctctcaaggccgggggcacagccctcctgcccggccccccagctccctcgccactgccggccacaccactcagcgccaaggaggacgccagcaaagaagacgtcatcttcttctaaaagggccgtgactcaaggtgcaaggcccctccctgccctgcccacccttcctgctctctggggacccccatggggtcaccatgcccacccagctgtcccctcctcttccctagcaaaccactgatgaccgcctggcaggggccagcctgtcggtgctctgggccttgcagctgtttctgtagggttagcggtggtgccggggtcactttctgaatctctttttttttttttcaaaaaggaaagtttttaatggaaagttgagccagaactaaaccagggagctgtctgaaatcatagcaccccatccgggtggcggggagatcaactccgagctgtttttccgaggcagtgaggaacggtgccggctctgcacggagctgaggacaggacagaccttgctttgagaaggagctgccggccggggccacgctccacagccgccgcgcgacagtggagccaagggttagggcaccaggaggggccaggtggcgtcggcagcatctgtccccagaatcaggcagaatccacttcccaaacagagccccacgcaggttcaccatgaacctcagggtcagggaatgagccaggcacgggggcatgggcagagagggccacggggcagggcccactgagggaacatcagtggccctccagtcaggttctgtgggtttggaagcccatcgtgaaaggggctgacctttgcccctttttacttggcattggttttgaaaccagctgtttcccaaactctgcttcccaagggcaaccgttgctgttcacacgctcagcctgtctgggggagcgggcctctagcttcagccagggcgggtacacaccctgggcacagggtcctcagcccccgggaaatgagctcccagggctggcgtcccaccttccaggtgggggctggcacatcacagactgtcgagagcgccatgtcccagggcatgcagaggatgcacctagagacgttgcagcaagtggacaagtggccgctgtgcgggcccctcgcttgtagtgagctgttgcagcttacggtccgttccctggaggggtggaggaaggaggtgttgggcagcatcaaaggtgctgggacatcccagggtggtgagatccatccacgatccagctccggtggagaaagggcccatgtcaagccttgttctgcaccccaagcattggtggtaggactgggtcctggctgatcgtccttgttcccagtggggtacatgtgagcccctgccagggccaagtccttctcccgaacccagggtcctgggaactgcagatcccggggggattcagcccttctcccactgtgctggcagaggcactcctgtgacgctgaatacagtgaacagggacattcccgccactcggggacagatgggcacaagggaggggaaactccatcaggaagtgctcccctgggcagaggcgcccactgggtgctgtgggctcaggagggggcggggcaggagctggtgccaaccgggaaccagagccccacagccatacagcccattggtgacaaggtcctgagaacacagtggccaggtgtccccaggctcctggcccctccgacgacctcaactctgcccagcccggtccctggccatcagcgacgctgtccgccccccgtcagatcccatgtgtgccatgtttatcatcagtgttttgtatttttgtactgagtatcggagcactttacagaagctgactgtacattcctgttctgttgtgaagagaacattcccagaccctggcaccctcctgagccggcgtgtgccggtccagccctccgagatgccacaattccttggatgggggagaagttcaaggaatttctgctcggccacgcggtgggaaccccgcgtccccgccatgtggcagaggggtctcagtcgtgctaggcatcgggcggcagcgccgacagcccttccctcgccagtgcccctcggccactcctgggttggagcccgattttatttgtaaagttgacagtcgagcaaatgttcctattttcgtgggatctgcacacgtctttgtcagttgtggtcatgatcttagtcacctgctaattatttttacaatgattacaacatttcctcactgcgggatatttctgacccgctttagaacttaagacctgattctagcaataaacgtgtccgagatgaaaaaa

SEQ ID NO: 321654 - DNA, 4563 bp, Homo sapiens
tccttgtaatccaagcagtcgtatgtcatccagaaaatcggcgactcctggttcagcagttttcaggtgaaaatggggagagaatgaaagaaaagtacggtgtgttttgtagtggccacaatgaagctgttagtcattacaagttgctgcttcagcaaaacaagaaatttcaaaacttgatcaagaaaattggcaacttctccatcgtgcggcggcttggcgtgcaggagtgcattctcctggttacacaacgcataaccaaatacccagtgctggtggagcgcatcatccagaacacggaagctggcactgaggactatgaagacctgacccaggccttgaacctcatcaaagatatcatctcacaagtggacgccaaggtcagtgagtgtgagaagggccagcgcctcagggagatcgcagggaagatggacctgaagtcttccagcaaactcaagaacgggctcaccttccgcaaggaagacatgcttcagcggcagctccacctggagggcatgctatgctggaagaccacatcagggcgcttgaaagatatcctggctatcctgctgaccgacgtacttttgctgctacaagaaaaagatcagaaatacgtctttgcttctgtggactcaaagccacccgtcatctcgttacaaaagctcatcgtgagggaagtggccaacgaggagaaagcgatgtttctgatcagcgcctccttgcaagggccggagatgtatgaaatctacacgagctccaaagaggacaggaacgcctggatggcccacatccaaagggctgtggagagctgccctgacgaggaggaggggcccttcagcctgcccgaagaggaaaggaaggtggtcgaggcccgcgccacgagactccgggactttcaagagcggttgagcatgaaagaccagctgatcgcacagagcctcctagagaaacagcagatctacctggagatggccgagatgggcggcctcgaagacctgccccagccccgagccaggagggctgagaccttcgcgggctacgactgcacaaacagccccaccaagaatggcagtttcaagaagaaagtcagcagcactgaccccaggccccgagactggcgaggccccccaaacagcccggacttgaagctcagtgacagtgacattcctgggagctctgaggaatcgccgcaggtggtggaggcgccaggcacggaatccgatccccgtctgcccaccgtcctggagtcggagcttgtccagcggatccagacactgtcccagctgctcctgaaccttcaggcggtaatcgcccaccaggacagctatgtggagacgcagcgggctgccatccaggagcgggagaagcagttccggctgcagtcgacgcgtgggaacctgctgctggagcaggagcggcaacgcaacttcgagaagcagcgggaggagcgcgcggccctggagaagctgcagagccagctgcggcacgagcagcagcgctgggagcgcgagcgccagtggcagcaccaggagctggagcgtgcgggcgcgcggctgcaggagcgcgagggcgaggcgcggcagctacgcgagcggctggagcaggagcgggccgagctggagcgccagcgccaggcctaccagcacgacctggagcggctgcgcgaggcccagcgtgccgtggagcgcgagcgggagcgcctggagctgctgcgccgcctcaagaagcagaacaccgcgccaggcgcgctgccgcccgacacactggccgaggcccagcccccaagccaccctcccagcttcaacggggaagggctggagggccctcgtgtgagcatgctgccatccggcgtggggccagagtacgcagagcgccccgaggtggctcgccgggacagcgcccccaccgagaaccggctggccaagagcgatgtgcccatccagctgctcagcgccaccaaccagttccagaggcaggcggccgtgcagcagcagatccccaccaagctggcggcctccaccaagggtggcaaggacaagggcggcaagagcaggggctctcagcgctgggagagctcagcgtccttcgacctgaagcagcagctgctgctcaacaagctcatggggaaagatgagagcacctcacggaaccgccgctcgctgagccctatcctgcccggcagacacagtcctgcgcccccaccagaccctggcttccccgccccgagcccaccgccagctgacagcccctccgagggcttctctctcaaggccgggggcacagccctcctgcccggccccccagctccctcgccactgccggccacaccactcagcgccaaggaggacgccagcaaagaagacgtcatcttcttctaaaagggccgtgactcaaggtgcaaggcccctccctgccctgcccacccttcctgctctctggggacccccatggggtcaccatgcccacccagctgtcccctcctcttccctagcaaaccactgatgaccgcctggcaggggccagcctgtcggtgctctgggccttgcagctgtttctgtagggttagcggtggtgccggggtcactttctgaatctctttttttttttttcaaaaaggaaagtttttaatggaaagttgagccagaactaaaccagggagctgtctgaaatcatagcaccccatccgggtggcggggagatcaactccgagctgtttttccgaggcagtgaggaacggtgccggctctgcacggagctgaggacaggacagaccttgctttgagaaggagctgccggccggggccacgctccacagccgccgcgcgacagtggagccaagggttagggcaccaggaggggccaggtggcgtcggcagcatctgtccccagaatcaggcagaatccacttcccaaacagagccccacgcaggttcaccatgaacctcagggtcagggaatgagccaggcacgggggcatgggcagagagggccacggggcagggcccactgagggaacatcagtggccctccagtcaggttctgtgggtttggaagcccatcgtgaaaggggctgacctttgcccctttttacttggcattggttttgaaaccagctgtttcccaaactctgcttcccaagggcaaccgttgctgttcacacgctcagcctgtctgggggagcgggcctctagcttcagccagggcgggtacacaccctgggcacagggtcctcagcccccgggaaatgagctcccagggctggcgtcccaccttccaggtgggggctggcacatcacagactgtcgagagcgccatgtcccagggcatgcagaggatgcacctagagacgttgcagcaagtggacaagtggccgctgtgcgggcccctcgcttgtagtgagctgttgcagcttacggtccgttccctggaggggtggaggaaggaggtgttgggcagcatcaaaggtgctgggacatcccagggtggtgagatccatccacgatccagctccggtggagaaagggcccatgtcaagccttgttctgcaccccaagcattggtggtaggactgggtcctggctgatcgtccttgttcccagtggggtacatgtgagcccctgccagggccaagtccttctcccgaacccagggtcctgggaactgcagatcccggggggattcagcccttctcccactgtgctggcagaggcactcctgtgacgctgaatacagtgaacagggacattcccgccactcggggacagatgggcacaagggaggggaaactccatcaggaagtgctcccctgggcagaggcgcccactgggtgctgtgggctcaggagggggcggggcaggagctggtgccaaccgggaaccagagccccacagccatacagcccattggtgacaaggtcctgagaacacagtggccaggtgtccccaggctcctggcccctccgacgacctcaactctgcccagcccggtccctggccatcagcgacgctgtccgccccccgtcagatcccatgtgtgccatgtttatcatcagtgttttgtatttttgtactgagtatcggagcactttacagaagctgactgtacattcctgttctgttgtgaagagaacattcccagaccctggcaccctcctgagccggcgtgtgccggtccagccctccgagatgccacaattccttggatgggggagaagttcaaggaatttctgctcggccacgcggtgggaaccccgcgtccccgccatgtggcagaggggtctcagtcgtgctaggcatcgggcggcagcgccgacagcccttccctcgccagtgcccctcggccactcctgggttggagcccgattttatttgtaaagttgacagtcgagcaaatgttcctattttcgtgggatctgcacacgtctttgtcagttgtggtcatgatcttagtcacctgctaattatttttacaatgattacaacatttcctcactgcgggatatttctgacccgctttagaacttaagacctgattctagcaataaacgtgtccgagatgaaaaaa

SEQ ID NO: 321655 - DNA, 5045 bp, Homo sapiens
agcaccaactctgtccttgcctctgtcacagcctcgctcaaggagcacccccggggcaccctcctgtccgatggcagcccggccctgtccaggaatgtcggtatgacggtctctcagaaagggggtccccagccaacaccgagcccggctggccctgggacgcaactcggaccaatcacaggagagatggatgaagccgattctgcgtttttaaaatttaagcagacagctgatgactctctgtcccttacatctccaaacaccgagtccatttttgtagaagatccctacaccgcctcgctgaggagtgagattgagtcagacggccacgagtttgaagctgagtcctggagcctcgccgtggatgcagcctacgccaagaagcaaaagagggaggtggtgaaaagacaagatgtcctttatgagctgatgcagacagaggtgcaccacgtgcggacgctcaagatcatgctgaaggtgtactccagggccctgcaggaggagctgcagttcagcagcaaggccattggccgcctcttcccatgcgctgacgacctgctggagacgcacagccacttcctcgctcggctcaaggagcgccgccaggagtccctggaggagggcagtgaccggaattatgtcatccagaaaatcggcgacctcctggttcagcagttttcaggtgaaaatggggagagaatgaaagaaaagtacggtgtgttttgtagtggccacaatgaagctgttagtcattacaagttgctgcttcagcaaaacaagaaatttcaaaacttgatcaagaaaattggcaacttctccatcgtgcggcggcttggcgtgcaggagtgcattctcctggttacacaacgcataaccaaatacccagtgctggtggagcgcatcatccagaacacggaagctggcactgaggactatgaagacctgacccaggccttgaacctcatcaaagatatcatctcacaagtggacgccaaggtcagtgagtgtgagaagggccagcgcctcagggagatcgcagggaagatggacctgaagtcttccagcaaactcaagaacgggctcaccttccgcaaggaagacatgcttcagcggcagctccacctggagggcatgctatgctggaagaccacatcagggcgcttgaaagatatcctggctatcctgctgaccgacgtacttttgctgctacaagaaaaagatcagaaatacgtctttgcttctgtggactcaaagccacccgtcatctcgttacaaaagctcatcgtgagggaagtggccaacgaggagaaagcgatgtttctgatcagcgcctccttgcaagggccggagatgtatgaaatctacacgagctccaaagaggacaggaacgcctggatggcccacatccaaagggctgtggagagctgccctgacgaggaggaggggcccttcagcctgcccgaagaggaaaggaaggtggtcgaggcccgcgccacgagactccgggactttcaagagcggttgagcatgaaagaccagctgatcgcacagagcctcctagagaaacagcagatctacctggagatggccgagatgggcggcctcgaagacctgccccagccccgagccaggagggctgagaccttcgcgggctacgactgcacaaacagccccaccaagaatggcagtttcaagaagaaagtcagcagcactgaccccaggccccgagactggcgaggccccccaaacagcccggacttgaagctcagtgacagtgacattcctgggagctctgaggaatcgccgcaggtggtggaggcgccaggcacggaatccgatccccgtctgcccaccgtcctggagtcggagcttgtccagcggatccagacactgtcccagctgctcctgaaccttcaggcggtaatcgcccaccaggacagctatgtggagacgcagcgggctgccatccaggagcgggagaagcagttccggctgcagtcgacgcgtgggaacctgctgctggagcaggagcggcaacgcaacttcgagaagcagcgggaggagcgcgcggccctggagaagctgcagagccagctgcggcacgagcagcagcgctgggagcgcgagcgccagtggcagcaccaggagctggagcgtgcgggcgcgcggctgcaggagcgcgagggcgaggcgcggcagctacgcgagcggctggagcaggagcgggccgagctggagcgccagcgccaggcctaccagcacgacctggagcggctgcgcgaggcccagcgtgccgtggagcgcgagcgggagcgcctggagctgctgcgccgcctcaagaagcagaacaccgcgccaggcgcgctgccgcccgacacactggccgaggcccagcccccaagccaccctcccagcttcaacggggaagggctggagggccctcgtgtgagcatgctgccatccggcgtggggccagagtacgcagagcgccccgaggtggctcgccgggacagcgcccccaccgagaaccggctggccaagagcgatgtgcccatccagctgctcagcgccaccaaccagttccagaggcaggcggccgtgcagcagcagatccccaccaagctggcggcctccaccaagggtggcaaggacaagggcggcaagagcaggggctctcagcgctgggagagctcagcgtccttcgacctgaagcagcagctgctgctcaacaagctcatggggaaagatgagagcacctcacggaaccgccgctcgctgagccctatcctgcccggcagacacagtcctgcgcccccaccagaccctggcttccccgccccgagcccaccgccagctgacagcccctccgagggcttctctctcaaggccgggggcacagccctcctgcccggccccccagctccctcgccactgccggccacaccactcagcgccaaggaggacgccagcaaagaagacgtcatcttcttctaaaagggccgtgactcaaggtgcaaggcccctccctgccctgcccacccttcctgctctctggggacccccatggggtcaccatgcccacccagctgtcccctcctcttccctagcaaaccactgatgaccgcctggcaggggccagcctgtcggtgctctgggccttgcagctgtttctgtagggttagcggtggtgccggggtcactttctgaatctctttttttttttttcaaaaaggaaagtttttaatggaaagttgagccagaactaaaccagggagctgtctgaaatcatagcaccccatccgggtggcggggagatcaactccgagctgtttttccgaggcagtgaggaacggtgccgcatctgtccccagaatcaggcagaatccacttcccaaacagagccccacgcaggttcaccatgaacctcagggtcagggaatgagccaggcacgggggcatgggcagagagggccacggggcagggcccactgagggaacatcagtggccctccagtcaggttctgtgggtttggaagcccatcgtgaaaggggctgacctttgcccctttttacttggcattggttttgaaaccagctgtttcccaaactctgcttcccaagggcaaccgttgctgttcacacgctcagcctgtctgggggagcgggcctctagcttcagccagggcgggtacacaccctgggcacagggtcctcagcccccgggaaatgagctcccagggctggcgtcccaccttccaggtgggggctggcacatcacagactgtcgagagcgccatgtcccagggcatgcagaggatgcacctagagacgttgcagcaagtggacaagtggccgctgtgcgggcccctcgcttgtagtgagctgttgcagcttacggtccgttccctggaggggtggaggaaggaggtgttgggcagcatcaaaggtgctgggacatcccagggtggtgagatccatccacgatccagctccggtggagaaagggcccatgtcaagccttgttctgcaccccaagcattggtggtaggactgggtcctggctgatcgtccttgttcccagtggggtacatgtgagcccctgccagggccaagtccttctcccgaacccagggtcctgggaactgcagatcccggggggattcagcccttctcccactgtgctggcagaggcactcctgtgacgctgaatacagtgaacagggacattcccgccactcggggacagatgggcacaagggaggggaaactccatcaggaagtgctcccctgggcagaggcgcccactgggtgctgtgggctcaggagggggcggggcaggagctggtgccaaccgggaaccagagccccacagccatacagcccattggtgacaaggtcctgagaacacagtggccaggtgtccccaggctcctggcccctccgacgacctcaactctgcccagcccggtccctggccatcagcgacgctgtccgccccccgtcagatcccatgtgtgccatgtttatcatcagtgttttgtatttttgtactgagtatcggagcactttacagaagctgactgtacattcctgttctgttgtgaagagaacattcccagaccctggcaccctcctgagccggcgtgtgccggtccagccctccgagatgccacaattccttggatgggggagaagttcaaggaatttctgctcggccacgcggtgggaaccccgcgtccccgccatgtggcagaggggtctcagtcgtgctaggcatcgggcggcagcgccgacagcccttccctcgccagtgcccctcggccactcctgggttggagcccgattttatttgtaaagttgacagtcgagcaaatgttcctattttcgtgggatctgcacacgtctttgtcagttgtggtcatgatcttagtcacctgctaattatttttacaatgattacaacatttcctcactgcgggatatttctgacccgctttagaacttaagacctgattctagcaataaacgtgtccgagatgaaaaaa

SEQ ID NO: 321656 - DNA, 390 bp, Homo sapiens
tgctactcagggcacacagcctatggagcagccctgatctgcaaggagcggcatctctggcgctgctgtgcacagctgcttccatgaaagctgctgcctaacaccaccagctcacccttgaatctttgggcaaatccaagaactctcccaggctaagccccagtcttggggcttgcctgtcctgcatcatctggcaaccagcaaagggacaaggacagcggagatggtggcaattggcagagaggcaagacagcagagacagagaggcagcaattggtgagagacaagagacagcagttggcaagacagcaagagacggtgaagcagtctgtgattgaggatgtaagatctgtaacactgaggaagtaccaataaagagctgctaacact

SEQ ID NO: 321657 - DNA, 1060 bp, Homo sapiens
tgctactcagggcacacagcctatggagcagccctgatctgcaaggagcggcatctctggcgctgctgtgcacagctgcttccatgaaagctgctgcctaacaccaccagctcacccttgaatctttgggcaaatccaagaactctcccaggctaagccccagtcttggggcttgcctgtcctgcatcatctggcaaccagcaaagggacaaggacagcggagatggtggcaattggcagagaggcaagacagcagagacagagaggcagcaattggtgagagacaagagacagcagttggcaagacagcaagagacggtgaagcagtctgtgattgaggatgtggtgaaactgagtggacagccaagtgtccatagtacagctgcctcgtgtgggacccactgctctaacgagccagcccccgacacagaagctgagcacccccaagctggggaacctagagagacctgcacccgggtcccacgtggaagactggctggtgccattttgtcttctgtggatgggtgagagtcccctttgcaccctcccccagtaatatcagactggaaatctcaaaaacacacgttcagcaccaagattttcagcagcaccgcctcagaatgagacccctagaaaaaactgcgtgttttccacttgcccaacacgaggagtttttggaacacgacctgcttgaggtggagattttctagatgggcaaagagaaggaaacacttaacctaggaagagtatttaggaagaagaaagaacacagcctttctgcacaggaaaccgccgagcagaggggcatctggcctctgcagtggcctccaaatagagtccaatggctggggccagcgtggctgcttaaaggggactcaagggatataataaaatgcagattctcaggtcctagtgcagacaggctcacccaataagtctggactgcatatgggaatctctatttctaggcccttctgcaaggtattcctgctctttccaggaaccatcggcagctggtttggggaaagaagcaacgactccaagtgtgacctgtgagctg

SEQ ID NO: 321658 - DNA, 9822 bp, Homo sapiens
tgctactcagggcacacagcctatggagcagccctgatctgcaaggagcggcatctctggcgctgctgtgcacagctgcttccatgaaagctgctgcctaacaccaccagctcacccttgaatctttgggcaaatccaagaactctcccaggctaagccccagtcttggggcttgcctgtcctgcatcatctggcaaccagcaaagggacaaggacagcggagatggtggcaattggcagagaggcaagacagcagagacagagaggcagcaattggtgagagacaagagacagcagttggcaagacagcaagagacggtgaagcagtctgtgattgaggatgtggtgaaactgagtggacagccaagtgtccatagtacagctgcctcgtgtgggacccactgctctaacgagccagcccccgacacagaagctgagcacccccaagctggggaacctagagagacctgcacccgggtcccacgtggaagactggctggtgccattttgtcttctgtggatgggtgagagtcccctttgcaccctcccccagtaatatcaggtaagctaggaaataaaagcctttggctaagcggtcagttccccacggtttaggtgccttgaagcacattcttgccaccccttcacctggttctttctcctctgactccattttattgctccactttggtttcattttcagtcctaacatgtatgtcttgtttggagtcttatgtttgctttcgactttctgttaattgtatttgggcaattgtttaaggcaggacacttggttgtgagaggtcccctgttgtgttgactctgggataccagagtcacgttgtcacgttgttctatgttctgtaacctggtcttgggttcacggggttggccgcccactgggtaccccagggtttttggcactgctgtgcacagctgctttggcgagggcatccttgttggctgaaacgcaggcattttgggttctcagcatcggtattataggccaccctccagatgctctggggtttttagcactgacatttcctctaggattgtgggttatacccctttcgctaggcgaatattggtcttgtctttttccaccctgaagttaggagtattattttcctaatagccaattgcaagctccttcctgtgtactgtcttataactcccttgcctaagctgctcttggtcaaaggaattgggagctcccaggctcctggcctggcagtcagccacctacagtggtagacaagtggccagcccaatatttttttcagtatctccactactgggtaggttcttcagcaagtcagagcctctgaggtctccccttgggcaacgctgtttacccctttcccttcctccatttgtttagccccctctccacccaactctagatctctatggaatttaggctccacattcgactgcccattcgtagctcataatccatttttataacaccttgctatctatatttacacctttaaagaacacgggaatttaagagggaagagtaactaggcttttgctaaacttgggctaataaaaccctctgtagagagatccttaatataggcatggggacaacaaggagtatcccaagggactcgccgctagggtgtcttttaagctattggagcaaattcaaatttggcttaaagaaaaagaaactcattttgtattgcaacaccatttgggttaaatacaagttagacgacgaatatatctggcctaaacatggttctatatactatagtgatattttacgattaggcttattttgtaaaagagaaggaaaatgggaagagatcccttatgtacaggcttttatggctctatactggatcacgttacttccaggcattagaatgccatgcataagggatccccacctagctgctccccatagaaagttcataagcctccccagagtctcttcagtcccccagtcctgagtgggggttctcgccaattccctaatgagattccaccccaatatcatcaggcacctttcccccttatccaactagccctagcctataccctctgctgcccaagaaaatgagcccaaccagtacaccaggagtggggctccatatcagcccctaaggtcaagcctgtgtccactgtggaaagtagttgatggaaatgagggaacactcaaagagtacatatgccactttccatgtctaattagaccttataaaaggaaagaattggccagttttcagataaaccagaaaagcttatacaagagtttgttacgttgactatgttcttcaaattgccacgatttacaaatattgtcatccgcttgctgtgctgtggggaaaaaaaagtagaggaaaaagtgtgtggttaagccagtcaattatgacaaggttaaagaagtaactcggggaaaagatgaaaatcccgctctgtttcagggtcttttagttgaagcactcaggaaatatactaatgcaggcccagacaccccagaagggcaagctctcctgggtatacattttctcattcaatcttctcctgacattaggaggaatctacaaaaagcagcaatgggaccttcaagtcctatgaaacgacgcttaaacatagcctttaaagtttacaacaacagggacagggcaaaagaggggagtaaaaagaaatagccaaaaagtacaattgttaacagtgactttaagcctccttgcccctcaggattactcatcttgagaaaatgttacaaaattagcatctgggatgcctagacaagacttgatgcctgacttgctgacccctgggccagaatcactgcgcctactatacgcaaaagggcccctggcaatgcaaatgtcctaactgctctggtgagagagaacaataacaacaaaaagcttccatcaatactagagctaaccttctcctactagccccagtgagctgcttagctcaagtaagtttactgtcccagaggacagctttccacagtggcagataagcagccgcctgaacatttttctttggtatttccaccactgagtgtgctctccagtggcgtggggactccagaatctccttttgagcaatgcagtttgcttcctcccctttttagttgatgctatgggattccctgtcctgccttttcctgttttccatacctatcggggcaaacaaaatttggccaggtagatgggtcccagttctgtaaataacttgaatccagttgtcttgtataggtcattttatttaatatgtttttgggtatatgtacatgtattgtgatgtgtgttacatctagcgtgctgtcaaactggcttatagataaaagaacactcatacattcaacaaataagactactgaaagcttattagtttgaagagaatcttgtatcttctaaaatttaactttaggatttttacctaggtaagtcactgatgttcataggctttaaaatggttaaaatggctttaaatggtgaccagctttgcatggtaccttggttctcggtgatctagataaagttaaaagtgaaataattaaatacacgtaaatgggatatgcttaatgtgtggtttaaaatcataaaatggtagaatggttctcagctatagaatgacaatgtctagtgtgaagttcatgacttcttccttcctaggtttccataaaatgtgctaaagaaatgtattctttattgagaaaaaattttttgtctaatccggaagttactaaatgggaggttcaaaacatgagtgaaccagtgagtagaaaagagagatgtaaagaatattatgaatagaaaatgtattttttgtttgttttgcaaggaaggatataaagaaagagtaattttatatgtggaggaatcctgtatagtaaattccctatcctagagtaaaataactttaagaaagaggtagtatagaacatgtcaggaaattcagctatgttgtagatggtctgtgtaagtcatctgcacagtgcatgagtgtggaggtgggcgggcactcattggcccttgaactccttttgagcagtatggaagccaagaactagaagccaggaaatggggttgtaaaactgatttgtctatggattttatgtgttgagctgctgtggtcttggcttgtagtaattacctatatgaaccttcccccctcccctttagaatttaggacaggttcaaaaggccctccaatataaaaataaaatactgtccttccccacaaaggaaaaaatagctccccggttcaaccaggagacttagtcttgctaaaaccttaaagacagggtaaagacagggataccccaagaatcaattacaatgaaatggaaggggccttatcaggtattgttaagtacccccactgctgttaaacttcagggaacacctacttgggcacacagatccaggactaaacctgtttcttatgagtcacaggcacaaaggaagggcactacaaccacaaccaatatcagtaaagctttggaagacctctgctacctatttaaaataatcaacactcagccagaagaggtaatgtaatgctgtagatgggaataggagcattgatcttgctcttcttcctgactgtagtacttcctttctatggctttaaccagccacctcctcctgggaaacatctcctgtgggcttgttgggtatagaagctactctaagacccaaccagataccatgatgccactgttaattctgtttgctcttctaattaacctaagctagtgtgtatgtggacagggagggtggacaaaattctacagtaaatatttcaaaaattatagcatcatagaatcatctttatggctgccagatttgtcatcaacacccccaggatagacagtttcatcttccgacctatctggaaaatctcaggaccatgtccccagacctcctaactaaccatagcaccccaaaatacccaaacccctattgtgaagtggaactcttccccacttagtggatcccccctggaccctgctgtccccctgccctgaccactattatcggaatctgggaagttgggcatctatatctccagtgcactcataactctaacatttgcatccactcttgcattaatgacacaaaagtggaagcttccctgcgatgctctggtccaactctagttgccaagtttccaagaccacggggaggtaaatgagattccatttgtgagtgaaaagaccatatatggtaccttctcccggatgggaacatacaaaggaaaaacaactgcctgatctgggaaggtgacagtactaccttcttctagaaaacaaagattgttcaaccaccaccatgagaacaggtggaaaatatctctatagacccaacctggcaatgaagtataaacatcgcaccccgcagggcttctcttggtgccctagttgggttcatttttgtttgtgactatgaatgggaagaagtcacaccctgtaaccactccaactccctaaggagtcacctcttctttaaggaatagctttcccttgtatctaaaaaacttggaactgacatgaatgaacgttggccactcttacccctccaggggtcacaatctataacgcctaggacccaagaatatcagaaataagtaagcaataaaactaattctggcaggaatcagggtggcaataggactagcagcaccctggggtggctttgcctaccatgagttaacgctaaagaacttggctcaaatcctagaatccttagccaccaacggagatcaggcattaaagagaattcaagagttccccagactctggaaaatgtagttgttgataacagactagcattggattatttactagctgaacaaggtggggtcttgtgcagttattaataaaacctgctgcacatatattaactctggacaggttgaggttaacattcaaaagatctatgagcaagctacctagttacatagatataaccagggcactgcccccaactatatctggtcaaccatcaaaagtgccttcccaagtctcacctgtttttcacctcttctaggacctttgacaactgtcttgttacaaatgtttggtccttgcttctttaacctcttagtaaagtttgtgtattctagattaccacagttccagagacaatgctggcacaaggcttccagcccatcctgtccactgacacggagaatgaaatcgtcctgcctctgggctccttagatcaggtatccagagatttttactcctccagtgccaggcagggcctacgtccataaactcagcaggaagtagttacggaaaacagatctccgcccttctgcagcccccttaagattaaggaggagtatctaatctctgaagggggaatgaggtaggaggtgggactcaactctggaagtggggctcaggcactcagaccaaactgagcactagctaaaataggtccagggcagatgctagtttccataggacacaccgacctgtgtcaagtcagttcaccatggctctggcagcacccagaagttaccaccctcaccctggaaatgtctgcataaactgccccttcatttgcatataattaaaagtggatacaaataccactgcagaactgcctctgagctgctactgtgggcgcacagcctgtagggcagccctgctttgcaaggagcagcgcctctgctgctgctgtgcacagccggccgcttcaataaaagttgctaacaccactggcttgcccttgagttccttcctgggcaaagctaagaaccctcccgggctatgcttcaatcttagggctcgcctgtcctgcatcactgggatcatctcccagtaaactagccacacttacatccatgtgtcagggacatttctggagaaagcagcccaggacactgttgaataaaacacacaatagtctctgtggtcttctccaccccaccccacaccaggcaccctcagcttgattctcctttttaattgcctgtaagcagggaagcacaatgttttcacattctttgtaaggcctttgttctactaaaatctaacctcagagcacaattttaaactagatgaaagagttgctgcgcctgaagcactgcaaacacctcctcaccacacatgtgcactcaccctggacaccctcactcaccctgacaccctcactcctcaccctggacaccctcactcaccccagacaccgtcactcctcaccctggacacctcactctgcaccctggacaccctcactcaccctggacacgttcactcaccctgacaccctcactcaccctggacaccctcactcaccctggataccctcactcctcaccctggacaccctcactcaccctggataccctcactcctcaccctggacactctcactcaccctgacaccctcaatcctcaccctggactccctcactcctcaccctggactccctcactcctcaccctggacaccctcactcctcatcctggacaccctcactcaacctggacaccctcactcctcaccctgacaccctcactcctcaccctggacaccctcactcctcaccctgacaccctcactcctcaccctggcaccctcagtcaccctgacaccctcactcctcaccctgacaccctcaagtcttcacctccctggctgcagcctgggacacgctttccctaacttctgaaggctcagtcctcctcaagccaatctcatctcaaattgcacctcctcagagaggtcttccataaccgcccttataaagcaggattctttcaccaataccccttcccacatggcactgtctcacagcactcctctaaaagtctgtttacttccttgacaatctgtcttccttataaggggaggttctgtaaaagccaagactctctctgtctagttgactgttgcataccagggcttagaccaaggccctgacatgcagtaggtgcttaatatgttttgaggcaaggtcttgctctgttgcacatgctggagtgcagtggcacaatcgtaattcattgcagccttgaactcctgagctcaagtgatcctcctgcctcagcctcctgagtagctgggactacaggcatgcaccaccaagcttggctaatttaaaaaaaaaattatatagatagggacttgctatgttgcctaggctgatcttgaactcctaacctcaagcaatcctcccacctcggccttccaaagtgctgggattatagccatggagccgccacacccagccaatgtgccgaagaaagaaagaaaaacatgctcatcctttgagtcaggttcaaattttttctcctctttaacccccagtcactccagttataagtgatttttaactcttctcacactttaatgcatctggcaagaagatccacgtggtgttaggaacaatacaggaccttaaggatgggggaatcagcaggtgtcagcgtgccctgtatgctcagggcagctgtttccactggacattctccctttgcctctctgggcagcaactcctaggccagccgacctgctgtgtcgagtaaccaggatttctcaatcttggcatggttgccattttggaccagatcgttctttgttgtgggggctgccctgtacggcaaagaatgccgagcagcacttccagtctccacccacaggacgccagtagcaccctctaagttgtgagaactcaaaatgtccccagaggatgccagatgtcccctggggtggggacacaatcaccccaggttgagatccatggagccaggtctgtttgccaccaaggggtaaagctccattcccaccttaggagggctaggaggcagcatcgtggggccacagaaggcctgggtttgcagtcagaggacaggatgcacattccttcaagatacagacccagattgttgggcatctagttcttgggttttctgttgttgctgttccgttttgtctgtcttccctcctttgtttactagcagcctggaatttgccactttttctaaacgaagatttatggaacacttaccacacggctgacgctgcgcgaggctaaggttctaatacaccgcagctcacttaactctcgcaataccataaacgcacactgtttcatcttgaccctttcttgggaaggtgacagagaggtaggagggcaaacatcttgtgtgccccgtcccaagggtattactggtggaataatatccgccccccaccccagtttctaatttgctgtaggctgtgacgctgtggggcaagactaggagtcctgttgaaattaggaataagtgtgctgtgagggaagggctgccttattttagagcacagattttctgaatatctattttgacaggttcgatcctctccccttcctgccttccttctgtcgattttcaatgtcttgatggtgtcccacctgagtggcctttagagatgtgagttgtgaggcactggggaggcaggcacacgtcctccagcccaagactgcctaatttaacagggatttctgcattctggaacaagcctccattttccccaagcaggattactccagagggcaaaacacagcccaatagtatcacatttcctttctgctttagcaaaaataaccactgtctcattcatgggaaaaggccgccaaacaaatttgttactggaaccatttgtaacaacttctagtttgcactgccttggagcaagcacactttgtagaggagggatttgcagttacttgggcaacaaggtaaccactgatcattacaggaagcttcagaaaccgtgggaccagtgtagaagaatggagtatctgtccaaactaagaataaaaagaatgacacttgta

SEQ ID NO: 321659 - DNA, 8958 bp, Homo sapiens
ggtcggccctatccgtgttcggggttggccgcccactgggtaccccagggtttttggcactgctgtgcacagctgctttggcgagggcatccttgttggctgaaacgcaggcattttgggttctcagcatcggtattataggccaccctccagatgctctggggtttttagcactgacatttcctctaggattgtgggttatacccctttcgctaggcgaatattggtcttgtctttttccaccctgaagttaggagtattattttcctaatagccaattgcaagctccttcctgtgtactgtcttataactcccttgcctaagctgctcttggtcaaaggaattgggagctcccaggctcctggcctggcagtcagccacctacagtggtagacaagtggccagcccaatatttttttcagtatctccactactgggtaggttcttcagcaagtcagagcctctgaggtctccccttgggcaacgctgtttacccctttcccttcctccatttgtttagccccctctccacccaactctagatctctatggaatttaggctccacattcgactgcccattcgtagctcataatccatttttataacaccttgctatctatatttacacctttaaagaacacgggaatttaagagggaagagtaactaggcttttgctaaacttgggctaataaaaccctctgtagagagatccttaatataggcatggggacaacaaggagtatcccaagggactcgccgctagggtgtcttttaagctattggagcaaattcaaatttggcttaaagaaaaagaaactcattttgtattgcaacaccatttgggttaaatacaagttagacgacgaatatatctggcctaaacatggttctatatactatagtgatattttacgattaggcttattttgtaaaagagaaggaaaatgggaagagatcccttatgtacaggcttttatggctctatactggatcacgttacttccaggcattagaatgccatgcataagggatccccacctagctgctccccatagaaagttcataagcctccccagagtctcttcagtcccccagtcctgagtgggggttctcgccaattccctaatgagattccaccccaatatcatcaggcacctttcccccttatccaactagccctagcctataccctctgctgcccaagaaaatgagcccaaccagtacaccaggagtggggctccatatcagcccctaaggtcaagcctgtgtccactgtggaaagtagttgatggaaatgagggaacactcaaagagtacatatgccactttccatgtctaattagaccttataaaaggaaagaattggccagttttcagataaaccagaaaagcttatacaagagtttgttacgttgactatgttcttcaaattgccacgatttacaaatattgtcatccgcttgctgtgctgtggggaaaaaaaagtagaggaaaaagtgtgtggttaagccagtcaattatgacaaggttaaagaagtaactcggggaaaagatgaaaatcccgctctgtttcagggtcttttagttgaagcactcaggaaatatactaatgcaggcccagacaccccagaagggcaagctctcctgggtatacattttctcattcaatcttctcctgacattaggaggaatctacaaaaagcagcaatgggaccttcaagtcctatgaaacgacgcttaaacatagcctttaaagtttacaacaacagggacagggcaaaagaggggagtaaaaagaaatagccaaaaagtacaattgttaacagtgactttaagcctccttgcccctcaggattactcatcttgagaaaatgttacaaaattagcatctgggatgcctagacaagacttgatgcctgacttgctgacccctgggccagaatcactgcgcctactatacgcaaaagggcccctggcaatgcaaatgtcctaactgctctggtgagagagaacaataacaacaaaaagcttccatcaatactagagctaaccttctcctactagccccagtgagctgcttagctcaagtaagtttactgtcccagaggacagctttccacagtggcagataagcagccgcctgaacatttttctttggtatttccaccactgagtgtgctctccagtggcgtggggactccagaatctccttttgagcaatgcagtttgcttcctcccctttttagttgatgctatgggattccctgtcctgccttttcctgttttccatacctatcggggcaaacaaaatttggccaggtagatgggtcccagttctgtaaataacttgaatccagttgtcttgtataggtcattttatttaatatgtttttgggtatatgtacatgtattgtgatgtgtgttacatctagcgtgctgtcaaactggcttatagataaaagaacactcatacattcaacaaataagactactgaaagcttattagtttgaagagaatcttgtatcttctaaaatttaactttaggatttttacctaggtaagtcactgatgttcataggctttaaaatggttaaaatggctttaaatggtgaccagctttgcatggtaccttggttctcggtgatctagataaagttaaaagtgaaataattaaatacacgtaaatgggatatgcttaatgtgtggtttaaaatcataaaatggtagaatggttctcagctatagaatgacaatgtctagtgtgaagttcatgacttcttccttcctaggtttccataaaatgtgctaaagaaatgtattctttattgagaaaaaattttttgtctaatccggaagttactaaatgggaggttcaaaacatgagtgaaccagtgagtagaaaagagagatgtaaagaatattatgaatagaaaatgtattttttgtttgttttgcaaggaaggatataaagaaagagtaattttatatgtggaggaatcctgtatagtaaattccctatcctagagtaaaataactttaagaaagaggtagtatagaacatgtcaggaaattcagctatgttgtagatggtctgtgtaagtcatctgcacagtgcatgagtgtggaggtgggcgggcactcattggcccttgaactccttttgagcagtatggaagccaagaactagaagccaggaaatggggttgtaaaactgatttgtctatggattttatgtgttgagctgctgtggtcttggcttgtagtaattacctatatgaaccttcccccctcccctttagaatttaggacaggttcaaaaggccctccaatataaaaataaaatactgtccttccccacaaaggaaaaaatagctccccggttcaaccaggagacttagtcttgctaaaaccttaaagacagggtaaagacagggataccccaagaatcaattacaatgaaatggaaggggccttatcaggtattgttaagtacccccactgctgttaaacttcagggaacacctacttgggcacacagatccaggactaaacctgtttcttatgagtcacaggcacaaaggaagggcactacaaccacaaccaatatcagtaaagctttggaagacctctgctacctatttaaaataatcaacactcagccagaagaggtaatgtaatgctgtagatgggaataggagcattgatcttgctcttcttcctgactgtagtacttcctttctatggctttaaccagccacctcctcctgggaaacatctcctgtgggcttgttgggtatagaagctactctaagacccaaccagataccatgatgccactgttaattctgtttgctcttctaattaacctaagctagtgtgtatgtggacagggagggtggacaaaattctacagtaaatatttcaaaaattatagcatcatagaatcatctttatggctgccagatttgtcatcaacacccccaggatagacagtttcatcttccgacctatctggaaaatctcaggaccatgtccccagacctcctaactaaccatagcaccccaaaatacccaaacccctattgtgaagtggaactcttccccacttagtggatcccccctggaccctgctgtccccctgccctgaccactattatcggaatctgggaagttgggcatctatatctccagtgcactcataactctaacatttgcatccactcttgcattaatgacacaaaagtggaagcttccctgcgatgctctggtccaactctagttgccaagtttccaagaccacggggaggtaaatgagattccatttgtgagtgaaaagaccatatatggtaccttctcccggatgggaacatacaaaggaaaaacaactgcctgatctgggaaggtgacagtactaccttcttctagaaaacaaagattgttcaaccaccaccatgagaacaggtggaaaatatctctatagacccaacctggcaatgaagtataaacatcgcaccccgcagggcttctcttggtgccctagttgggttcatttttgtttgtgactatgaatgggaagaagtcacaccctgtaaccactccaactccctaaggagtcacctcttctttaaggaatagctttcccttgtatctaaaaaacttggaactgacatgaatgaacgttggccactcttacccctccaggggtcacaatctataacgcctaggacccaagaatatcagaaataagtaagcaataaaactaattctggcaggaatcagggtggcaataggactagcagcaccctggggtggctttgcctaccatgagttaacgctaaagaacttggctcaaatcctagaatccttagccaccaacggagatcaggcattaaagagaattcaagagttccccagactctggaaaatgtagttgttgataacagactagcattggattatttactagctgaacaaggtggggtcttgtgcagttattaataaaacctgctgcacatatattaactctggacaggttgaggttaacattcaaaagatctatgagcaagctacctagttacatagatataaccagggcactgcccccaactatatctggtcaaccatcaaaagtgccttcccaagtctcacctgtttttcacctcttctaggacctttgacaactgtcttgttacaaatgtttggtccttgcttctttaacctcttagtaaagtttgtgtattctagattaccacagttccagagacaatgctggcacaaggcttccagcccatcctgtccactgacacggagaatgaaatcgtcctgcctctgggctccttagatcaggtatccagagatttttactcctccagtgccaggcagggcctacgtccataaactcagcaggaagtagttacggaaaacagatctccgcccttctgcagcccccttaagattaaggaggagtatctaatctctgaagggggaatgaggtaggaggtgggactcaactctggaagtggggctcaggcactcagaccaaactgagcactagctaaaataggtccagggcagatgctagtttccataggacacaccgacctgtgtcaagtcagttcaccatggctctggcagcacccagaagttaccaccctcaccctggaaatgtctgcataaactgccccttcatttgcatataattaaaagtggatacaaataccactgcagaactgcctctgagctgctactgtgggcgcacagcctgtagggcagccctgctttgcaaggagcagcgcctctgctgctgctgtgcacagccggccgcttcaataaaagttgctaacaccactggcttgcccttgagttccttcctgggcaaagctaagaaccctcccgggctatgcttcaatcttagggctcgcctgtcctgcatcactgggatcatctcccagtaaactagccacacttacatccatgtgtcagggacatttctggagaaagcagcccaggacactgttgaataaaacacacaatagtctctgtggtcttctccaccccaccccacaccaggcaccctcagcttgattctcctttttaattgcctgtaagcagggaagcacaatgttttcacattctttgtaaggcctttgttctactaaaatctaacctcagagcacaattttaaactagatgaaagagttgctgcgcctgaagcactgcaaacacctcctcaccacacatgtgcactcaccctggacaccctcactcaccctgacaccctcactcctcaccctggacaccctcactcaccccagacaccgtcactcctcaccctggacacctcactctgcaccctggacaccctcactcaccctggacacgttcactcaccctgacaccctcactcaccctggacaccctcactcaccctggataccctcactcctcaccctggacaccctcactcaccctggataccctcactcctcaccctggacactctcactcaccctgacaccctcaatcctcaccctggactccctcactcctcaccctggactccctcactcctcaccctggacaccctcactcctcatcctggacaccctcactcaacctggacaccctcactcctcaccctgacaccctcactcctcaccctggacaccctcactcctcaccctgacaccctcactcctcaccctggcaccctcagtcaccctgacaccctcactcctcaccctgacaccctcaagtcttcacctccctggctgcagcctgggacacgctttccctaacttctgaaggctcagtcctcctcaagccaatctcatctcaaattgcacctcctcagagaggtcttccataaccgcccttataaagcaggattctttcaccaataccccttcccacatggcactgtctcacagcactcctctaaaagtctgtttacttccttgacaatctgtcttccttataaggggaggttctgtaaaagccaagactctctctgtctagttgactgttgcataccagggcttagaccaaggccctgacatgcagtaggtgcttaatatgttttgaggcaaggtcttgctctgttgcacatgctggagtgcagtggcacaatcgtaattcattgcagccttgaactcctgagctcaagtgatcctcctgcctcagcctcctgagtagctgggactacaggcatgcaccaccaagcttggctaatttaaaaaaaaaattatatagatagggacttgctatgttgcctaggctgatcttgaactcctaacctcaagcaatcctcccacctcggccttccaaagtgctgggattatagccatggagccgccacacccagccaatgtgccgaagaaagaaagaaaaacatgctcatcctttgagtcaggttcaaattttttctcctctttaacccccagtcactccagttataagtgatttttaactcttctcacactttaatgcatctggcaagaagatccacgtggtgttaggaacaatacaggaccttaaggatgggggaatcagcaggtgtcagcgtgccctgtatgctcagggcagctgtttccactggacattctccctttgcctctctgggcagcaactcctaggccagccgacctgctgtgtcgagtaaccaggatttctcaatcttggcatggttgccattttggaccagatcgttctttgttgtgggggctgccctgtacggcaaagaatgccgagcagcacttccagtctccacccacaggacgccagtagcaccctctaagttgtgagaactcaaaatgtccccagaggatgccagatgtcccctggggtggggacacaatcaccccaggttgagatccatggagccaggtctgtttgccaccaaggggtaaagctccattcccaccttaggagggctaggaggcagcatcgtggggccacagaaggcctgggtttgcagtcagaggacaggatgcacattccttcaagatacagacccagattgttgggcatctagttcttgggttttctgttgttgctgttccgttttgtctgtcttccctcctttgtttactagcagcctggaatttgccactttttctaaacgaagatttatggaacacttaccacacggctgacgctgcgcgaggctaaggttctaatacaccgcagctcacttaactctcgcaataccataaacgcacactgtttcatcttgaccctttcttgggaaggtgacagagaggtaggagggcaaacatcttgtgtgccccgtcccaagggtattactggtggaataatatccgccccccaccccagtttctaatttgctgtaggctgtgacgctgtggggcaagactaggagtcctgttgaaattaggaataagtgtgctgtgagggaagggctgccttattttagagcacagattttctgaatatctattttgacaggttcgatcctctccccttcctgccttccttctgtcgattttcaatgtcttgatggtgtcccacctgagtggcctttagagatgtgagttgtgaggcactggggaggcaggcacacgtcctccagcccaagactgcctaatttaacagggatttctgcattctggaacaagcctccattttccccaagcaggattactccagagggcaaaacacagcccaatagtatcacatttcctttctgctttagcaaaaataaccactgtctcattcatgggaaaaggccgccaaacaaatttgttactggaaccatttgtaacaacttctagtttgcactgccttggagcaagcacactttgtagaggagggatttgcagttacttgggcaacaaggtaaccactgatcattacaggaagcttcagaaaccgtgggaccagtgtagaagaatggagtatctgtccaaactaagaataaaaagaatgacacttgta

SEQ ID NO: 321660 - DNA, 9780 bp, Homo sapiens
tgctactcagggcacacagcctatggagcagccctgatctgcaaggagcggcatctctggcgctgctgtgcacagctgcttccatgaaagctgctgcctaacaccaccagctcacccttgaatctttgggcaaatccaagaactctcccaggctaagccccagtcttggggcttgcctgtcctgcatcatctggcaaccagcaaagggacaaggacagcggagatggtggcaattggcagagaggcaagacagcagagacagagaggcagcaattggtgagagacaagagacagcagttggcaagacagcaagagacggtgaagcagtctgtgattgaggatgtggtgaaactgagtggacagccaagtgtccatagtacagctgcctcgtgtgggacccactgctctaacgagccagcccccgacacagaagctgagcacccccaagctggggaacctagagagacctgcacccgggtcccacgtggaagactggctggtgccattttgtcttctgtggatgggtgagagtcccctttgcaccctcccccagtaatatcaggtaagctaggaaataaaagcctttggctaagcggtcagttccccacggtttaggtgccttgaagcacattcttgccaccccttcacctggttctttctcctctgactccattttattgctccactttggtttcattttcagtcctaacatgtatgtcttgtttggagtcttatgtttgctttcgactttctgttaattgtatttgggcaattgtttaaggcaggacacttggttgtgagaggtcccctgttgtgttgactctgggataccagagtcacgttgtcacgttgttctatgttctgtaacctggtcttgggttcacggggttggccgcccactgggtaccccagggtttttggcactgctgtgcacagctgctttggcgagggcatccttgttggctgaaacgcaggcattttgggttctcagcatcggtattataggccaccctccagatgctctggggtttttagcactgacatttcctctaggattgtgggttatacccctttcgctaggcgaatattggtcttgtctttttccaccctgaagttaggagtattattttcctaatagccaattgcaagctccttcctgtgtactgtcttataactcccttgcctaagctgctcttggtcaaaggaattgggagctcccaggctcctggcctggcagtcagccacctacagtggtagacaagtggccagcccaatatttttttcagtatctccactactgggtaggttcttcagcaagtcagagcctctgaggtctccccttgggcaacgctgtttacccctttcccttcctccatttgtttagccccctctccacccaactctagatctctatggaatttaggctccacattcgactgcccattcgtagctcataatccatttttataacaccttgctatctatatttacacctttaaagaacacgggaatttaagagggaagagtaactaggcttttgctaaacttgggctaataaaaccctctgtagagagatccttaatataggcatggggacaacaaggagtatcccaagggactcgccgctagggtgtcttttaagctattggagcaaattcaaatttggcttaaagaaaaagaaactcattttgtattgcaacaccatttgggttaaatacaagttagacgacgaatatatctggcctaaacatggttctatatactatagtgatattttacgattaggcttattttgtaaaagagaaggaaaatgggaagagatcccttatgtacaggcttttatggctctatactggatcacgttacttccaggcattagaatgccatgcataagggatccccacctagctgctccccatagaaagttcataagcctccccagagtctcttcagtcccccagtcctgagtgggggttctcgccaattccctaatgagattccaccccaatatcatcaggcacctttcccccttatccaactagccctagcctataccctctgctgcccaagaaaatgagcccaaccagtacaccaggagtggggctccatatcagcccctaaggtcaagcctgtgtccactgtggaaagtagttgatggaaatgagggaacactcaaagagtacatatgccactttccatgtctaattagaccttataaaaggaaagaattggccagttttcagataaaccagaaaagcttatacaagagtttgttacgttgactatgttcttcaaattgccacgatttacaaatattgtcatccgcttgctgtgctgtggggaaaaaaaagtagaggaaaaagtgtgtggttaagccagtcaattatgacaaggttaaagaagtaactcggggaaaagatgaaaatcccgctctgtttcagggtcttttagttgaagcactcaggaaatatactaatgcaggcccagacaccccagaagggcaagctctcctgggtatacattttctcattcaatcttctcctgacattaggaggaatctacaaaaagcagcaatgggaccttcaagtcctatgaaacgacgcttaaacatagcctttaaagtttacaacaacagggacagggcaaaagaggggagtaaaaagaaatagccaaaaagtacaattgttaacagtgactttaagcctccttgcccctcaggattactcatcttgagaaaatgttacaaaattagcatctgggatgcctagacaagacttgatgcctgacttgctgacccctgggccagaatcactgcgcctactatacgcaaaagggcccctggcaatgcaaatgtcctaactgctctggtgagagagaacaataacaacaaaaagcttccatcaatactagagctaaccttctcctactagccccagtgagctgcttagctcaagtaagtttactgtcccagaggacagctttccacagtggcagataagcagccgcctgaacatttttctttggtatttccaccactgagtgtgctctccagtggcgtggggactccagaatctccttttgagcaatgcagtttgcttcctcccctttttagttgatgctatgggattccctgtcctgccttttcctgttttccatacctatcggggcaaacaaaatttggccaggtagatgggtcccagttctgtaaataacttgaatccagttgtcttgtataggtcattttatttaatatgtttttgggtatatgtacatgtattgtgatgtgtgttacatctagcgtgctgtcaaactggcttatagataaaagaacactcatacattcaacaaataagactactgaaagcttattagtttgaagagaatcttgtatcttctaaaatttaactttaggatttttacctaggtaagtcactgatgttcataggctttaaaatggttaaaatggctttaaatggtgaccagctttgcatggtaccttggttctcggtgatctagataaagttaaaagtgaaataattaaatacacgtaaatgggatatgcttaatgtgtggtttaaaatcataaaatggtagaatggttctcagctatagaatgacaatgtctagtgtgaagttcatgacttcttccttcctaggtttccataaaatgtgctaaagaaatgtattctttattgagaaaaaattttttgtctaatccggaagttactaaatgggaggttcaaaacatgagtgaaccagtgagtagaaaagagagatgtaaagaatattatgaatagaaaatgtattttttgtttgttttgcaaggaaggatataaagaaagagtaattttatatgtggaggaatcctgtatagtaaattccctatcctagagtaaaataactttaagaaagaggtagtatagaacatgtcaggaaattcagctatgttgtagatggtctgtgtaagtcatctgcacagtgcatgagtgtggaggtgggcgggcactcattggcccttgaactccttttgagcagtatggaagccaagaactagaagccaggaaatggggttgtaaaactgatttgtctatggattttatgtgttgagctgctgtggtcttggcttgtagtaattacctatatgaaccttcccccctcccctttagaatttaggacaggttcaaaaggccctccaatataaaaataaaatactgtccttccccacaaaggaaaaaatagctccccggttcaaccaggagacttagtcttgctaaaaccttaaagacagggtaaagacagggataccccaagaatcaattacaatgaaatggaaggggccttatcaggtattgttaagtacccccactgctgttaaacttcagggaacacctacttgggcacacagatccaggactaaacctgtttcttatgagtcacaggcacaaaggaagggcactacaaccacaaccaatatcagtaaagctttggaagacctctgctacctatttaaaataatcaacactcagccagaagaggtaatgtaatgctgtagatgggaataggagcattgatcttgctcttcttcctgactgtagtacttcctttctatggctttaaccagccacctcctcctgggaaacatctcctgtgggcttgttgggtatagaagctactctaagacccaaccagataccatgatgccactgttaattctgtttgctcttctaattaacctaagctagtgtgtatgtggacagggagggtggacaaaattctacagtaaatatttcaaaaattatagcatcatagaatcatctttatggctgccagatttgtcatcaacacccccaggatagacagtttcatcttccgacctatctggaaaatctcaggaccatgtccccagacctcctaactaaccatagcaccccaaaatacccaaacccctattgtgaagtggaactcttccccacttagtggatcccccctggaccctgctgtccccctgccctgaccactattatcggaatctgggaagttgggcatctatatctccagtgcactcataactctaacatttgcatccactcttgcattaatgacacaaaagtggaagcttccctgcgatgctctggtccaactctagttgccaagtttccaagaccacggggaggtaaatgagattccatttgtgagtgaaaagaccatatatggtaccttctcccggatgggaacatacaaaggaaaaacaactgcctgatctgggaaggtgacagtactaccttcttctagaaaacaaagattgttcaaccaccaccatgagaacaggtggaaaatatctctatagacccaacctggcaatgaagtataaacatcgcaccccgcagggcttctcttggtgccctagttgggttcatttttgtttgtgactatgaatgggaagaagtcacaccctgtaaccactccaactccctaaggagtcacctcttctttaaggaatagctttcccttgtatctaaaaaacttggaactgacatgaatgaacgttggccactcttacccctccaggggtcacaatctataacgcctaggacccaagaatatcagaaataagtaagcaataaaactaattctggcaggaatcagggtggcaataggactagcagcaccctggggtggctttgcctaccatgagttaacgctaaagaacttggctcaaatcctagaatccttagccaccaacggagatcaggcattaaagagaattcaagagttccccagactctggaaaatgtagttgttgataacagactagcattggattatttactagctgaacaaggtggggtcttgtgcagttattaataaaacctgctgcacatatattaactctggacaggttgaggttaacattcaaaagatctatgagcaagctacctagttacatagatataaccagggcactgcccccaactatatctggtcaaccatcaaaagtgccttcccaagtctcacctgtttttcacctcttctaggacctttgacaactgtcttgttacaaatgtttggtccttgcttctttaacctcttagtaaagtttgtgtattctagattaccacagttccagagacaatgctggcacaaggcttccagcccatcctgtccactgacacggagaatgaaatcgtcctgcctctgggctccttagatcaggtatccagagatttttactcctccagtgccaggcagggcctacgtccataaactcagcaggaagtagttacggaaaacagatctccgcccttctgcagcccccttaagattaaggaggagtatctaatctctgaagggggaatgaggtaggaggtgggactcaactctggaagtggggctcaggcactcagaccaaactgagcactagctaaaataggtccagggcagatgctagtttccataggacacaccgacctgtgtcaagtcagttcaccatggctctggcagcacccagaagttaccaccctcaccctggaaatgtctgcataaactgccccttcatttgcatataattaaaagtggatacaaataccactgcagaactgcctctgagctgctactgtgggcgcacagcctgtagggcagccctgctttgcaaggagcagcgcctctgctgctgctgtgcacagccggccgcttcaataaaagttgctaacaccactggcttgcccttgagttccttcctgggcaaagctaagaaccctcccgggctatgcttcaatcttagggctcgcctgtcctgcatcactgggatcatctcccagtaaactagccacacttacatccatgtgtcagggacatttctggagaaagcagcccaggacactgttgaataaaacacacaatagtctctgtggtcttctccaccccaccccacaccaggcaccctcagcttgattctcctttttaattgcctgtaagcagggaagcacaatgttttcacattctttgtaaggcctttgttctactaaaatctaacctcagagcacaattttaaactagatgaaagagttgctgcgcctgaagcactgcaaacacctcctcaccacacatgtgcactcaccctggacaccctcactcaccctgacaccctcactcctcaccctggacaccctcactcaccccagacaccgtcactcctcaccctggacacctcactctgcaccctggacaccctcactcaccctggacacgttcactcaccctgacaccctcactcaccctggacaccctcactcaccctggataccctcactcctcaccctggacaccctcactcaccctggataccctcactcctcaccctggacactctcactcaccctgacaccctcaatcctcaccctggactccctcactcctcaccctggactccctcactcctcaccctggacaccctcactcctcatcctggacaccctcactcaaccctggacaccctcactcctcaccctgacaccctcactcctcaccctggcaccctcagtcaccctgacaccctcactcctcaccctgacaccctcaagtcttcacctccctggctgcagcctgggacacgctttccctaacttctgaaggctcagtcctcctcaagccaatctcatctcaaattgcacctcctcagagaggtcttccataaccgcccttataaagcaggattctttcaccaataccccttcccacatggcactgtctcacagcactcctctaaaagtctgtttacttccttgacaatctgtcttccttataaggggaggttctgtaaaagccaagactctctctgtctagttgactgttgcataccagggcttagaccaaggccctgacatgcagtaggtgcttaatatgttttgaggcaaggtcttgctctgttgcacatgctggagtgcagtggcacaatcgtaattcattgcagccttgaactcctgagctcaagtgatcctcctgcctcagcctcctgagtagctgggactacaggcatgcaccaccaagcttggctaatttaaaaaaaaaattatatagatagggacttgctatgttgcctaggctgatcttgaactcctaacctcaagcaatcctcccacctcggccttccaaagtgctgggattatagccatggagccgccacacccagccaatgtgccgaagaaagaaagaaaaacatgctcatcctttgagtcaggttcaaattttttctcctctttaacccccagtcactccagttataagtgatttttaactcttctcacactttaatgcatctggcaagaagatccacgtggtgttaggaacaatacaggaccttaaggatgggggaatcagcaggtgtcagcgtgccctgtatgctcagggcagctgtttccactggacattctccctttgcctctctgggcagcaactcctaggccagccgacctgctgtgtcgagtaaccaggatttctcaatcttggcatggttgccattttggaccagatcgttctttgttgtgggggctgccctgtacggcaaagaatgccgagcagcacttccagtctccacccacaggacgccagtagcaccctctaagttgtgagaactcaaaatgtccccagaggatgccagatgtcccctggggtggggacacaatcaccccaggttgagatccatggagccaggtctgtttgccaccaaggggtaaagctccattcccaccttaggagggctaggaggcagcatcgtggggccacagaaggcctgggtttgcagtcagaggacaggatgcacattccttcaagatacagacccagattgttgggcatctagttcttgggttttctgttgttgctgttccgttttgtctgtcttccctcctttgtttactagcagcctggaatttgccactttttctaaacgaagatttatggaacacttaccacacggctgacgctgcgcgaggctaaggttctaatacaccgcagctcacttaactctcgcaataccataaacgcacactgtttcatcttgaccctttcttgggaaggtgacagagaggtaggagggcaaacatcttgtgtgccccgtcccaagggtattactggtggaataatatccgccccccaccccagtttctaatttgctgtaggctgtgacgctgtggggcaagactaggagtcctgttgaaattaggaataagtgtgctgtgagggaagggctgccttattttagagcacagattttctgaatatctattttgacaggttcgatcctctccccttcctgccttccttctgtcgattttcaatgtcttgatggtgtcccacctgagtggcctttagagatgtgagttgtgaggcactggggaggcaggcacacgtcctccagcccaagactgcctaatttaacagggatttctgcattctggaacaagcctccattttccccaagcaggattactccagagggcaaaacacagcccaatagtatcacatttcctttctgctttagcaaaaataaccactgtctcattcatgggaaaaggccgccaaacaaatttgttactggaaccatttgtaacaacttctagtttgcactgccttggagcaagcacactttgtagaggagggatttgcagttacttgggcaacaaggtaaccactgatcattacaggaagcttcagaaaccgtgggaccagtgtagaagaatggagtatctgtccaaactaagaataaaaagaatgacacttgta

SEQ ID NO: 321661 - DNA, 9746 bp, Homo sapiens
tgctactcagggcacacagcctatggagcagccctgatctgcaaggagcggcatctctggcgctgctgtgcacagctgcttccatgaaagctgctgcctaacaccaccagctcacccttgaatctttgggcaaatccaagaactctcccaggctaagccccagtcttggggcttgcctgtcctgcatcatctggcaaccagcaaagggacaaggacagcggagatggtggcaattggcagagaggcaagacagcagagacagagaggcagcaattggtgagagacaagagacagcagttggcaagacagcaagagacggtgaagcagtctgtgattgaggatgtggtgaaactgagtggacagccaagtgtccatagtacagctgcctcgtgtgggacccactgctctaacgagccagcccccgacacagaagctgagcacccccaagctggggaacctagagagacctgcacccgggtcccacgtggaagactggctggtgccattttgtcttctgtggatgggtgagagtcccctttgcaccctcccccagtaatatcaggtaagctaggaaataaaagcctttggctaagcggtcagttccccacggtttaggtgccttgaagcacattcttgccaccccttcacctggttctttctcctctgactccattttattgctccactttggtttcattttcagtcctaacatgtatgtcttgtttggagtcttatgtttgctttcgactttctgttaattgtatttgggcaattgtttaaggcaggacacttggttgtgagaggtcccctgttgtgttgactctgggataccagagtcacgttgtcacgttgttctatgttctgtaacctggtcttgggttcacggggttggccgcccactgggtaccccagggtttttggcactgctgtgcacagctgctttggcgagggcatccttgttggctgaaacgcaggcattttgggttctcagcatcggtattataggccaccctccagatgctctggggtttttagcactgacatttcctctaggattgtgggttatacccctttcgctaggcgaatattggtcttgtctttttccaccctgaagttaggagtattattttcctaatagccaattgcaagctccttcctgtgtactgtcttataactcccttgcctaagctgctcttggtcaaaggaattgggagctcccaggctcctggcctggcagtcagccacctacagtggtagacaagtggccagcccaatatttttttcagtatctccactactgggtaggttcttcagcaagtcagagcctctgaggtctccccttgggcaacgctgtttacccctttcccttcctccatttgtttagccccctctccacccaactctagatctctatggaatttaggctccacattcgactgcccattcgtagctcataatccatttttataacaccttgctatctatatttacacctttaaagaacacgggaatttaagagggaagagtaactaggcttttgctaaacttgggctaataaaaccctctgtagagagatccttaatataggcatggggacaacaaggagtatcccaagggactcgccgctagggtgtcttttaagctattggagcaaattcaaatttggcttaaagaaaaagaaactcattttgtattgcaacaccatttgggttaaatacaagttagacgacgaatatatctggcctaaacatggttctatatactatagtgatattttacgattaggcttattttgtaaaagagaaggaaaatgggaagagatcccttatgtacaggcttttatggctctatactggatcacgttacttccaggcattagaatgccatgcataagggatccccacctagctgctccccatagaaagttcataagcctccccagagtctcttcagtcccccagtcctgagtgggggttctcgccaattccctaatgagattccaccccaatatcatcaggcacctttcccccttatccaactagccctagcctataccctctgctgcccaagaaaatgagcccaaccagtacaccaggagtggggctccatatcagcccctaaggtcaagcctgtgtccactgtggaaagtagttgatggaaatgagggaacactcaaagagtacatatgccactttccatgtctaattagaccttataaaaggaaagaattggccagttttcagataaaccagaaaagcttatacaagagtttgttacgttgactatgttcttcaaattgccacgatttacaaatattgtcatccgcttgctgtgctgtggggaaaaaaaagtagaggaaaaagtgtgtggttaagccagtcaattatgacaaggttaaagaagtaactcggggaaaagatgaaaatcccgctctgtttcagggtcttttagttgaagcactcaggaaatatactaatgcaggcccagacaccccagaagggcaagctctcctgggtatacattttctcattcaatcttctcctgacattaggaggaatctacaaaaagcagcaatgggaccttcaagtcctatgaaacgacgcttaaacatagcctttaaagtttacaacaacagggacagggcaaaagaggggagtaaaaagaaatagccaaaaagtacaattgttaacagtgactttaagcctccttgcccctcaggattactcatcttgagaaaatgttacaaaattagcatctgggatgcctagacaagacttgatgcctgacttgctgacccctgggccagaatcactgcgcctactatacgcaaaagggcccctggcaatgcaaatgtcctaactgctctggtgagagagaacaataacaacaaaaagcttccatcaatactagagctaaccttctcctactagccccagtgagctgcttagctcaagtaagtttactgtcccagaggacagctttccacagtggcagataagcagccgcctgaacatttttctttggtatttccaccactgagtgtgctctccagtggcgtggggactccagaatctccttttgagcaatgcagtttgcttcctcccctttttagttgatgctatgggattccctgtcctgccttttcctgttttccatacctatcggggcaaacaaaatttggccaggtagatgggtcccagttctgtaaataacttgaatccagttgtcttgtataggtcattttatttaatatgtttttgggtatatgtacatgtattgtgatgtgtgttacatctagcgtgctgtcaaactggcttatagataaaagaacactcatacattcaacaaataagactactgaaagcttattagtttgaagagaatcttgtatcttctaaaatttaactttaggatttttacctaggtaagtcactgatgttcataggctttaaaatggttaaaatggctttaaatggtgaccagctttgcatggtaccttggttctcggtgatctagataaagttaaaagtgaaataattaaatacacgtaaatgggatatgcttaatgtgtggtttaaaatcataaaatggtagaatggttctcagctatagaatgacaatgtctagtgtgaagttcatgacttcttccttcctaggtttccataaaatgtgctaaagaaatgtattctttattgagaaaaaattttttgtctaatccggaagttactaaatgggaggttcaaaacatgagtgaaccagtgagtagaaaagagagatgtaaagaatattatgaatagaaaatgtattttttgtttgttttgcaaggaaggatataaagaaagagtaattttatatgtggaggaatcctgtatagtaaattccctatcctagagtaaaataactttaagaaagaggtagtatagaacatgtcaggaaattcagctatgttgtagatggtctgtgtaagtcatctgcacagtgcatgagtgtggaggtgggcgggcactcattggcccttgaactccttttgagcagtatggaagccaagaactagaagccaggaaatggggttgtaaaactgatttgtctatggattttatgtgttgagctgctgtggtcttggcttgtagtaattacctatatgaaccttcccccctcccctttagaatttaggacaggttcaaaaggccctccaatataaaaataaaatactgtccttccccacaaaggaaaaaatagctccccggttcaaccaggagacttagtcttgctaaaaccttaaagacagggtaaagacagggataccccaagaatcaattacaatgaaatggaaggggccttatcaggtattgttaagtacccccactgctgttaaacttcagggaacacctacttgggcacacagatccaggactaaacctgtttcttatgagtcacaggcacaaaggaagggcactacaaccacaaccaatatcagtaaagctttggaagacctctgctacctatttaaaataatcaacactcagccagaagaggtaatgtaatgctgtagatgggaataggagcattgatcttgctcttcttcctgactgtagtacttcctttctatggctttaaccagccacctcctcctgggaaacatctcctgtgggcttgttgggtatagaagctactctaagacccaaccagataccatgatgccactgttaattctgtttgctcttctaattaacctaagctagtgtgtatgtggacagggagggtggacaaaattctacagtaaatatttcaaaaattatagcatcatagaatcatctttatggctgccagatttgtcatcaacacccccaggatagacagtttcatcttccgacctatctggaaaatctcaggaccatgtccccagacctcctaactaaccatagcaccccaaaatacccaaacccctattgtgaagtggaactcttccccacttagtggatcccccctggaccctgctgtccccctgccctgaccactattatcggaatctgggaagttgggcatctatatctccagtgcactcataactctaacatttgcatccactcttgcattaatgacacaaaagtggaagcttccctgcgatgctctggtccaactctagttgccaagtttccaagaccacggggaggtaaatgagattccatttgtgagtgaaaagaccatatatggtaccttctcccggatgggaacatacaaaggaaaaacaactgcctgatctgggaaggtgacagtactaccttcttctagaaaacaaagattgttcaaccaccaccatgagaacaggtggaaaatatctctatagacccaacctggcaatgaagtataaacatcgcaccccgcagggcttctcttggtgccctagttgggttcatttttgtttgtgactatgaatgggaagaagtcacaccctgtaaccactccaactccctaaggagtcacctcttctttaaggaatagctttcccttgtatctaaaaaacttggaactgacatgaatgaacgttggccactcttacccctccaggggtcacaatctataacgcctaggacccaagaatatcagaaataagtaagcaataaaactaattctggcaggaatcagggtggcaataggactagcagcaccctggggtggctttgcctaccatgagttaacgctaaagaacttggctcaaatcctagaatccttagccaccaacggagatcaggcattaaagagaattcaagagttccccagactctggaaaatgtagttgttgataacagactagcattggattatttactagctgaacaaggtggggtcttgtgcagttattaataaaacctgctgcacatatattaactctggacaggttgaggttaacattcaaaagatctatgagcaagctacctagttacatagatataaccagggcactgcccccaactatatctggtcaaccatcaaaagtgccttcccaagtctcacctgtttttcacctcttctaggacctttgacaactgtcttgttacaaatgtttggtccttgcttctttaacctcttagtaaagtttgtgtattctagattaccacagttccagagacaatgctggcacaaggcttccagcccatcctgtccactgacacggagaatgaaatcgtcctgcctctgggctccttagatcaggtatccagagatttttactcctccagtgccaggcagggcctacgtccataaactcagcaggaagtagttacggaaaacagatctccgcccttctgcagcccccttaagattaaggaggagtatctaatctctgaagggggaatgaggtaggaggtgggactcaactctggaagtggggctcaggcactcagaccaaactgagcactagctaaaataggtccagggcagatgctagtttccataggacacaccgacctgtgtcaagtcagttcaccatggctctggcagcacccagaagttaccaccctcaccctggaaatgtctgcataaactgccccttcatttgcatataattaaaagtggatacaaataccactgcagaactgcctctgagctgctactgtgggcgcacagcctgtagggcagccctgctttgcaaggagcagcgcctctgctgctgctgtgcacagccggccgcttcaataaaagttgctaacaccactggcttgcccttgagttccttcctgggcaaagctaagaaccctcccgggctatgcttcaatcttagggctcgcctgtcctgcatcactgggatcatctcccagtaaactagccacacttacatccatgtgtcagggacatttctggagaaagcagcccaggacactgttgaataaaacacacaatagtctctgtggtcttctccaccccaccccacaccaggcaccctcagcttgattctcctttttaattgcctgtaagcagggaagcacaatgttttcacattctttgtaaggcctttgttctactaaaatctaacctcagagcacaattttaaactagatgaaagagttgctgcgcctgaagcactgcaaacacctcctcaccacacatgtgcactcaccctggacaccctcactcaccctgacaccctcactcctcaccctggacaccctcactcaccccagacaccgtcactcctcaccctggacacctcactctgcaccctggacaccctcactcaccctggacacgttcactcaccctgacaccctcactcaccctggacaccctcactcaccctggataccctcactcctcaccctggacaccctcactcaccctggataccctcactcctcaccctggacactctcactcaccctgacaccctcaatcctcaccctggactccctcactcctcaccctggactccctcactcctcaccctggacaccctcactcctcatcctggacaccctcactcaaccctggacaccctcactcctcaccctgacaccctcactcctcaccctggcaccctcagtcaccctgacaccctcactcctcaccctgacaccctcaagtcttcacctccctggctgcagcctgggacacgctttccctaacttctgaaggctcagtcctcctcaagccaatctcatctcaaattgcacctcctcagagaggtcttccataaccgcccttataaagcaggattctttcaccaataccccttcccacatggcactgtctcacagcactcctctaaaagtctgtttacttccttgacaatctgtcttccttataaggggaggttctgtaaaagccaagactctctctgtctagttgactgttgcataccagggcttagaccaaggccctgacatgcagtaggtgcttaatatgttttgaggcaaggtcttgctctgttgcacatgctggagtgcagtggcacaatcgtaattcattgcagccttgaactcctgagctcaagtgatcctcctgcctcagcctcctgagtagctgggactacaggcatgcaccaccaagcttggctaatttaaaaaaaaaattatatagatagggacttgctatgttgcctaggctgatcttgaactcctaacctcaagcaatcctcccacctcggccttccaaagtgctgggattatagccatggagccgccacacccagccaatgtgccgaagaaagaaagaaaaacatgctcatcctttgagtcaggttcaaattttttctcctctttaacccccagtcactccagttataagtgatttttaactcttctcacactttaatgcatctggcaagaagatccacgtggtgttaggaacaatacaggaccttaaggatgggggaatcactgtttccactggacattctccctttgcctctctgggcagcaactcctaggccagccgacctgctgtgtcgagtaaccaggatttctcaatcttggcatggttgccattttggaccagatcgttctttgttgtgggggctgccctgtacggcaaagaatgccgagcagcacttccagtctccacccacaggacgccagtagcaccctctaagttgtgagaactcaaaatgtccccagaggatgccagatgtcccctggggtggggacacaatcaccccaggttgagatccatggagccaggtctgtttgccaccaaggggtaaagctccattcccaccttaggagggctaggaggcagcatcgtggggccacagaaggcctgggtttgcagtcagaggacaggatgcacattccttcaagatacagacccagattgttgggcatctagttcttgggttttctgttgttgctgttccgttttgtctgtcttccctcctttgtttactagcagcctggaatttgccactttttctaaacgaagatttatggaacacttaccacacggctgacgctgcgcgaggctaaggttctaatacaccgcagctcacttaactctcgcaataccataaacgcacactgtttcatcttgaccctttcttgggaaggtgacagagaggtaggagggcaaacatcttgtgtgccccgtcccaagggtattactggtggaataatatccgccccccaccccagtttctaatttgctgtaggctgtgacgctgtggggcaagactaggagtcctgttgaaattaggaataagtgtgctgtgagggaagggctgccttattttagagcacagattttctgaatatctattttgacaggttcgatcctctccccttcctgccttccttctgtcgattttcaatgtcttgatggtgtcccacctgagtggcctttagagatgtgagttgtgaggcactggggaggcaggcacacgtcctccagcccaagactgcctaatttaacagggatttctgcattctggaacaagcctccattttccccaagcaggattactccagagggcaaaacacagcccaatagtatcacatttcctttctgctttagcaaaaataaccactgtctcattcatgggaaaaggccgccaaacaaatttgttactggaaccatttgtaacaacttctagtttgcactgccttggagcaagcacactttgtagaggagggatttgcagttacttgggcaacaaggtaaccactgatcattacaggaagcttcagaaaccgtgggaccagtgtagaagaatggagtatctgtccaaactaagaataaaaagaatgacacttgta

SEQ ID NO: 321662 - DNA, 9817 bp, Homo sapiens
tgctactcagggcacacagcctatggagcagccctgatctgcaaggagcggcatctctggcgctgctgtgcacagctgcttccatgaaagctgctgcctaacaccaccagctcacccttgaatctttgggcaaatccaagaactctcccaggctaagccccagtcttggggcttgcctgtcctgcatcatctggcaaccagcaaagggacaaggacagcggagatggtggcaattggcagagaggcaagacagcagagacagagaggcagcaattggtgagagacaagagacagcagttggcaagacagcaagagacggtgaagcagtctgtgattgaggatgtggtgaaactgagtggacagccaagtgtccatagtacagctgcctcgtgtgggacccactgctctaacgagccagcccccgacacagaagctgagcacccccaagctggggaacctagagagacctgcacccgggtcccacgtggaagactggctggtgccattttgtcttctgtggatgggtgagagtcccctttgcaccctcccccagtaatatcaggtaagctaggaaataaaagcctttggctaagcggtcagttccccacggtttaggtgccttgaagcacattcttgccaccccttcacctggttctttctcctctgactccattttattgctccactttggtttcattttcagtcctaacatgtatgtcttgtttggagtcttatgtttgctttcgactttctgttaattgtatttgggcaattgtttaaggcaggacacttggttgtgagaggtcccctgttgtgttgactctgggataccagagtcacgttgtcacgttgttctatgttctgtaacctggtcttgggttcacggggttggccgcccactgggtaccccagggtttttggcactgctgtgcacagctgctttggcgagggcatccttgttggctgaaacgcaggcattttgggttctcagcatcggtattataggccaccctccagatgctctggggtttttagcactgacatttcctctaggattgtgggttatacccctttcgctaggcgaatattggtcttgtctttttccaccctgaagttaggagtattattttcctaatagccaattgcaagctccttcctgtgtactgtcttataactcccttgcctaagctgctcttggtcaaaggaattgggagctcccaggctcctggcctggcagtcagccacctacagtggtagacaagtggccagcccaatatttttttcagtatctccactactgggtaggttcttcagcaagtcagagcctctgaggtctccccttgggcaacgctgtttacccctttcccttcctccatttgtttagccccctctccacccaactctagatctctatggaatttaggctccacattcgactgcccattcgtagctcataatccatttttataacaccttgctatctatatttacacctttaaagaacacgggaatttaagagggaagagtaactaggcttttgctaaacttgggctaataaaaccctctgtagagagatccttaatataggcatggggacaacaaggagtatcccaagggactcgccgctagggtgtcttttaagctattggagcaaattcaaatttggcttaaagaaaaagaaactcattttgtattgcaacaccatttgggttaaatacaagttagacgacgaatatatctggcctaaacatggttctatatactatagtgatattttacgattaggcttattttgtaaaagagaaggaaaatgggaagagatcccttatgtacaggcttttatggctctatactggatcacgttacttccaggcattagaatgccatgcataagggatccccacctagctgctccccatagaaagttcataagcctccccagagtctcttcagtcccccagtcctgagtgggggttctcgccaattccctaatgagattccaccccaatatcatcaggcacctttcccccttatccaactagccctagcctataccctctgctgcccaagaaaatgagcccaaccagtacaccaggagtggggctccatatcagcccctaaggtcaagcctgtgtccactgtggaaagtagttgatggaaatgagggaacactcaaagagtacatatgccactttccatgtctaattagaccttataaaaggaaagaattggccagttttcagataaaccagaaaagcttatacaagagtttgttacgttgactatgttcttcaaattgccacgatttacaaatattgtcatccgcttgctgtgctgtggggaaaaaaaagtagaggaaaaagtgtgtggttaagccagtcaattatgacaaggttaaagaagtaactcggggaaaagatgaaaatcccgctctgtttcagggtcttttagttgaagcactcaggaaatatactaatgcaggcccagacaccccagaagggcaagctctcctgggtatacattttctcattcaatcttctcctgacattaggaggaatctacaaaaagcagcaatgggaccttcaagtcctatgaaacgacgcttaaacatagcctttaaagtttacaacaacagggacagggcaaaagaggggagtaaaaagaaatagccaaaaagtacaattgttaacagtgactttaagcctccttgcccctcaggattactcatcttgagaaaatgttacaaaattagcatctgggatgcctagacaagacttgatgcctgacttgctgacccctgggccagaatcactgcgcctactatacgcaaaagggcccctggcaatgcaaatgtcctaactgctctggtgagagagaacaataacaacaaaaagcttccatcaatactagagctaaccttctcctactagccccagtgagctgcttagctcaagtaagtttactgtcccagaggacagctttccacagtggcagataagcagccgcctgaacatttttctttggtatttccaccactgagtgtgctctccagtggcgtggggactccagaatctccttttgagcaatgcagtttgcttcctcccctttttagttgatgctatgggattccctgtcctgccttttcctgttttccatacctatcggggcaaacaaaatttggccaggtagatgggtcccagttctgtaaataacttgaatccagttgtcttgtataggtcattttatttaatatgtttttgggtatatgtacatgtattgtgatgtgtgttacatctagcgtgctgtcaaactggcttatagataaaagaacactcatacattcaacaaataagactactgaaagcttattagtttgaagagaatcttgtatcttctaaaatttaactttaggatttttacctaggtaagtcactgatgttcataggctttaaaatggttaaaatggctttaaatggtgaccagctttgcatggtaccttggttctcggtgatctagataaagttaaaagtgaaataattaaatacacgtaaatgggatatgcttaatgtgtggtttaaaatcataaaatggtagaatggttctcagctatagaatgacaatgtctagtgtgaagttcatgacttcttccttcctaggtttccataaaatgtgctaaagaaatgtattctttattgagaaaaaattttttgtctaatccggaagttactaaatgggaggttcaaaacatgagtgaaccagtgagtagaaaagagagatgtaaagaatattatgaatagaaaatgtattttttgtttgttttgcaaggaaggatataaagaaagagtaattttatatgtggaggaatcctgtatagtaaattccctatcctagagtaaaataactttaagaaagaggtagtatagaacatgtcaggaaattcagctatgttgtagatggtctgtgtaagtcatctgcacagtgcatgagtgtggaggtgggcgggcactcattggcccttgaactccttttgagcagtatggaagccaagaactagaagccaggaaatggggttgtaaaactgatttgtctatggattttatgtgttgagctgctgtggtcttggcttgtagtaattacctatatgaaccttcccccctcccctttagaatttaggacaggttcaaaaggccctccaatataaaaataaaatactgtccttccccacaaaggaaaaaatagctccccggttcaaccaggagacttagtcttgctaaaaccttaaagacagggtaaagacagggataccccaagaatcaattacaatgaaatggaaggggccttatcaggtattgttaagtacccccactgctgttaaacttcagggaacacctacttgggcacacagatccaggactaaacctgtttcttatgagtcacaggcacaaaggaagggcactacaaccacaaccaatatcagtaaagctttggaagacctctgctacctatttaaaataatcaacactcagccagaagaggtaatgtaatgctgtagatgggaataggagcattgatcttgctcttcttcctgactgtagtacttcctttctatggctttaaccagccacctcctcctgggaaacatctcctgtgggcttgttgggtatagaagctactctaagacccaaccagataccatgatgccactgttaattctgtttgctcttctaattaacctaagctagtgtgtatgtggacagggagggtggacaaaattctacagtaaatatttcaaaaattatagcatcatagaatcatctttatggctgccagatttgtcatcaacacccccaggatagacagtttcatcttccgacctatctggaaaatctcaggaccatgtccccagacctcctaactaaccatagcaccccaaaatacccaaacccctattgtgaagtggaactcttccccacttagtggatcccccctggaccctgctgtccccctgccctgaccactattatcggaatctgggaagttgggcatctatatctccagtgcactcataactctaacatttgcatccactcttgcattaatgacacaaaagtggaagcttccctgcgatgctctggtccaactctagttgccaagtttccaagaccacggggaggtaaatgagattccatttgtgagtgaaaagaccatatatggtaccttctcccggatgggaacatacaaaggaaaaacaactgcctgatctgggaaggtgacagtactaccttcttctagaaaacaaagattgttcaaccaccaccatgagaacaggtggaaaatatctctatagacccaacctggcaatgaagtataaacatcgcaccccgcagggcttctcttggtgccctagttgggttcatttttgtttgtgactatgaatgggaagaagtcacaccctgtaaccactccaactccctaaggagtcacctcttctttaaggaatagctttcccttgtatctaaaaaacttggaactgacatgaatgaacgttggccactcttacccctccaggggtcacaatctataacgcctaggacccaagaatatcagaaataagtaagcaataaaactaattctggcaggaatcagggtggcaataggactagcagcaccctggggtggctttgcctaccatgagttaacgctaaagaacttggctcaaatcctagaatccttagccaccaacggagatcaggcattaaagagaattcaagagttccccagactctggaaaatgtagttgttgataacagactagcattggattatttactagctgaacaaggtggggtcttgtgcagttattaataaaacctgctgcacatatattaactctggacaggttgaggttaacattcaaaagatctatgagcaagctacctagttacatagatataaccagggcactgcccccaactatatctggtcaaccatcaaaagtgccttcccaagtctcacctgtttttcacctcttctaggacctttgacaactgtcttgttacaaatgtttggtccttgcttctttaacctcttagtaaagtttgtgtattctagattaccacagttccagagacaatgctggcacaaggcttccagcccatcctgtccactgacacggagaatgaaatcgtcctgcctctgggctccttagatcaggtatccagagatttttactcctccagtgccaggcagggcctacgtccataaactcagcaggaagtagttacggaaaacagatctccgcccttctgcagcccccttaagattaaggaggagtatctaatctctgaagggggaatgaggtaggaggtgggactcaactctggaagtggggctcaggcactcagaccaaactgagcactagctaaaataggtccagggcagatgctagtttccataggacacaccgacctgtgtcaagtcagttcaccatggctctggcagcacccagaagttaccaccctcaccctggaaatgtctgcataaactgccccttcatttgcatataattaaaagtggatacaaataccactgcagaactgcctctgagctgctactgtgggcgcacagcctgtagggcagccctgctttgcaaggagcagcgcctctgctgctgctgtgcacagccggccgcttcaataaaagttgctaacaccactggcttgcccttgagttccttcctgggcaaagctaagaaccctcccgggctatgcttcaatcttagggctcgcctgtcctgcatcactgggatcatctcccagtaaactagccacacttacatccatgtgtcagggacatttctggagaaagcagcccaggacactgttgaataaaacacacaatagtctctgtggtcttctccaccccaccccacaccaggcaccctcagcttgattctcctttttaattgcctgtaagcagggaagcacaatgttttcacattctttgtaaggcctttgttctactaaaatctaacctcagagcacaattttaaactagatgaaagagttgctgcgcctgaagcactgcaaacacctcctcaccacacatgtgcactcaccctggacaccctcactcaccctgacaccctcactcctcaccctggacaccctcactcaccccagacaccgtcactcctcaccctggacacctcactctgcaccctggacaccctcactcaccctggacacgttcactcaccctgacaccctcactcaccctggacaccctcactcaccctggataccctcactcctcaccctggacaccctcactcaccctggataccctcactcctcaccctggacactctcactcaccctgacaccctcaatcctcaccctggactccctcactcctcaccctggactccctcactcctcaccctggacaccctcactcctcatcctggacaccctcactcaaccctggacaccctcactcctcaccctgacaccctcactcctcaccctggcaccctcagtcaccctgacaccctcactcctcaccctgacaccctcaagtcttcacctccctggctgcagcctgggacacgctttccctaacttctgaaggctcagtcctcctcaagccaatctcatctcaaattgcacctcctcagagaggtcttccataaccgcccttataaagcaggattctttcaccaataccccttcccacatggcactgtctcacagcactcctctaaaagtctgtttacttccttgacaatctgtcttccttataaggggaggttctgtaaaagccaagactctctctgtctagttgactgttgcataccagggcttagaccaaggccctgacatgcagtaggtgcttaatatgttttgaggcaaggtcttgctctgttgcacatgctggagtgcagtggcacaatcgtaattcattgcagccttgaactcctgagctcaagtgatcctcctgcctcagcctcctgagtagctgggactacaggcatgcaccaccaagcttggctaatttaaaaaaaaaattatatagatagggacttgctatgttgcctaggctgatcttgaactcctaacctcaagcaatcctcccacctcggccttccaaagtgctgggattatagccatggagccgccacacccagccaatgtgccgaagaaagaaagaaaaacatgctcatcctttgagtcaggttcaaattttttctcctctttaacccccagtcactccagttataagtgatttttaactcttctcacactttaatgcatctggcaagaagatccacgtggtgttaggaacaatacaggaccttaaggatgggggaatcagcaggtgtcagcgtgccctgtatgctcagggcagctgtttccactggacattctccctttgcctctctgggcagcaactcctaggccagccgacctgctgtgtcgagtaaccaggatttctcaatcttggcatggttgccattttggaccagatcgttctttgttgtgggggctgccctgtacggcaaagaatgccgagcagcacttccagtctccacccacaggacgccagtagcaccctctaagttgtgagaactcaaaatgtccccagaggatgccagatgtcccctggggtggggacacaatcaccccaggttgagatccatggagccaggtctgtttgccaccaaggggtaaagctccattcccaccttaggagggctaggaggcagcatcgtggggccacagaaggcctgggtttgcagtcagaggacaggatgcacattccttcaagatacagacccagattgttgggcatctagttcttgggttttctgttgttgctgttccgttttgtctgtcttccctcctttgtttactagcagcctggaatttgccactttttctaaacgaagatttatggaacacttaccacacggctgacgctgcgcgaggctaaggttctaatacaccgcagctcacttaactctcgcaataccataaacgcacactgtttcatcttgaccctttcttgggaaggtgacagagaggtaggagggcaaacatcttgtgtgccccgtcccaagggtattactggtggaataatatccgccccccaccccagtttctaatttgctgtaggctgtgacgctgtggggcaagactaggagtcctgttgaaattaggaataagtgtgctgtgagggaagggctgccttattttagagcacagattttctgaatatctattttgacaggttcgatcctctccccttcctgccttccttctgtcgattttcaatgtcttgatggtgtcccacctgagtggcctttagagatgtgagttgtgaggcactggggaggcaggcacacgtcctccagcccaagactgcctaatttaacagggatttctgcattctggaacaagcctccattttccccaagcaggattactccagagggcaaaacacagcccaatagtatcacatttcctttctgctttagcaaaaataaccactgtctcattcatgggaaaaggccgccaaacaaatttgttactggaaccatttgtaacaacttctagtttgcactgccttggagcaagcacactttgtagaggagggatttgcagttacttgggcaacaaggtaaccactgatcattacaggaagcttcagaaaccgtgggaccagtgtagaagaatggagtatctgtccaaactaagaataaaaagaatgacacttgtaaaaagaaataaaagttagcagaaagaaataaaagtta

SEQ ID NO: 321663 - DNA, 10168 bp, Homo sapiens
  misc_feature (9818)..(9818): n is a, c, g, or t
tgctactcagggcacacagcctatggagcagccctgatctgcaaggagcggcatctctggcgctgctgtgcacagctgcttccatgaaagctgctgcctaacaccaccagctcacccttgaatctttgggcaaatccaagaactctcccaggctaagccccagtcttggggcttgcctgtcctgcatcatctggcaaccagcaaagggacaaggacagcggagatggtggcaattggcagagaggcaagacagcagagacagagaggcagcaattggtgagagacaagagacagcagttggcaagacagcaagagacggtgaagcagtctgtgattgaggatgtggtgaaactgagtggacagccaagtgtccatagtacagctgcctcgtgtgggacccactgctctaacgagccagcccccgacacagaagctgagcacccccaagctggggaacctagagagacctgcacccgggtcccacgtggaagactggctggtgccattttgtcttctgtggatgggtgagagtcccctttgcaccctcccccagtaatatcaggtaagctaggaaataaaagcctttggctaagcggtcagttccccacggtttaggtgccttgaagcacattcttgccaccccttcacctggttctttctcctctgactccattttattgctccactttggtttcattttcagtcctaacatgtatgtcttgtttggagtcttatgtttgctttcgactttctgttaattgtatttgggcaattgtttaaggcaggacacttggttgtgagaggtcccctgttgtgttgactctgggataccagagtcacgttgtcacgttgttctatgttctgtaacctggtcttgggttcacggggttggccgcccactgggtaccccagggtttttggcactgctgtgcacagctgctttggcgagggcatccttgttggctgaaacgcaggcattttgggttctcagcatcggtattataggccaccctccagatgctctggggtttttagcactgacatttcctctaggattgtgggttatacccctttcgctaggcgaatattggtcttgtctttttccaccctgaagttaggagtattattttcctaatagccaattgcaagctccttcctgtgtactgtcttataactcccttgcctaagctgctcttggtcaaaggaattgggagctcccaggctcctggcctggcagtcagccacctacagtggtagacaagtggccagcccaatatttttttcagtatctccactactgggtaggttcttcagcaagtcagagcctctgaggtctccccttgggcaacgctgtttacccctttcccttcctccatttgtttagccccctctccacccaactctagatctctatggaatttaggctccacattcgactgcccattcgtagctcataatccatttttataacaccttgctatctatatttacacctttaaagaacacgggaatttaagagggaagagtaactaggcttttgctaaacttgggctaataaaaccctctgtagagagatccttaatataggcatggggacaacaaggagtatcccaagggactcgccgctagggtgtcttttaagctattggagcaaattcaaatttggcttaaagaaaaagaaactcattttgtattgcaacaccatttgggttaaatacaagttagacgacgaatatatctggcctaaacatggttctatatactatagtgatattttacgattaggcttattttgtaaaagagaaggaaaatgggaagagatcccttatgtacaggcttttatggctctatactggatcacgttacttccaggcattagaatgccatgcataagggatccccacctagctgctccccatagaaagttcataagcctccccagagtctcttcagtcccccagtcctgagtgggggttctcgccaattccctaatgagattccaccccaatatcatcaggcacctttcccccttatccaactagccctagcctataccctctgctgcccaagaaaatgagcccaaccagtacaccaggagtggggctccatatcagcccctaaggtcaagcctgtgtccactgtggaaagtagttgatggaaatgagggaacactcaaagagtacatatgccactttccatgtctaattagaccttataaaaggaaagaattggccagttttcagataaaccagaaaagcttatacaagagtttgttacgttgactatgttcttcaaattgccacgatttacaaatattgtcatccgcttgctgtgctgtggggaaaaaaaagtagaggaaaaagtgtgtggttaagccagtcaattatgacaaggttaaagaagtaactcggggaaaagatgaaaatcccgctctgtttcagggtcttttagttgaagcactcaggaaatatactaatgcaggcccagacaccccagaagggcaagctctcctgggtatacattttctcattcaatcttctcctgacattaggaggaatctacaaaaagcagcaatgggaccttcaagtcctatgaaacgacgcttaaacatagcctttaaagtttacaacaacagggacagggcaaaagaggggagtaaaaagaaatagccaaaaagtacaattgttaacagtgactttaagcctccttgcccctcaggattactcatcttgagaaaatgttacaaaattagcatctgggatgcctagacaagacttgatgcctgacttgctgacccctgggccagaatcactgcgcctactatacgcaaaagggcccctggcaatgcaaatgtcctaactgctctggtgagagagaacaataacaacaaaaagcttccatcaatactagagctaaccttctcctactagccccagtgagctgcttagctcaagtaagtttactgtcccagaggacagctttccacagtggcagataagcagccgcctgaacatttttctttggtatttccaccactgagtgtgctctccagtggcgtggggactccagaatctccttttgagcaatgcagtttgcttcctcccctttttagttgatgctatgggattccctgtcctgccttttcctgttttccatacctatcggggcaaacaaaatttggccaggtagatgggtcccagttctgtaaataacttgaatccagttgtcttgtataggtcattttatttaatatgtttttgggtatatgtacatgtattgtgatgtgtgttacatctagcgtgctgtcaaactggcttatagataaaagaacactcatacattcaacaaataagactactgaaagcttattagtttgaagagaatcttgtatcttctaaaatttaactttaggatttttacctaggtaagtcactgatgttcataggctttaaaatggttaaaatggctttaaatggtgaccagctttgcatggtaccttggttctcggtgatctagataaagttaaaagtgaaataattaaatacacgtaaatgggatatgcttaatgtgtggtttaaaatcataaaatggtagaatggttctcagctatagaatgacaatgtctagtgtgaagttcatgacttcttccttcctaggtttccataaaatgtgctaaagaaatgtattctttattgagaaaaaattttttgtctaatccggaagttactaaatgggaggttcaaaacatgagtgaaccagtgagtagaaaagagagatgtaaagaatattatgaatagaaaatgtattttttgtttgttttgcaaggaaggatataaagaaagagtaattttatatgtggaggaatcctgtatagtaaattccctatcctagagtaaaataactttaagaaagaggtagtatagaacatgtcaggaaattcagctatgttgtagatggtctgtgtaagtcatctgcacagtgcatgagtgtggaggtgggcgggcactcattggcccttgaactccttttgagcagtatggaagccaagaactagaagccaggaaatggggttgtaaaactgatttgtctatggattttatgtgttgagctgctgtggtcttggcttgtagtaattacctatatgaaccttcccccctcccctttagaatttaggacaggttcaaaaggccctccaatataaaaataaaatactgtccttccccacaaaggaaaaaatagctccccggttcaaccaggagacttagtcttgctaaaaccttaaagacagggtaaagacagggataccccaagaatcaattacaatgaaatggaaggggccttatcaggtattgttaagtacccccactgctgttaaacttcagggaacacctacttgggcacacagatccaggactaaacctgtttcttatgagtcacaggcacaaaggaagggcactacaaccacaaccaatatcagtaaagctttggaagacctctgctacctatttaaaataatcaacactcagccagaagaggtaatgtaatgctgtagatgggaataggagcattgatcttgctcttcttcctgactgtagtacttcctttctatggctttaaccagccacctcctcctgggaaacatctcctgtgggcttgttgggtatagaagctactctaagacccaaccagataccatgatgccactgttaattctgtttgctcttctaattaacctaagctagtgtgtatgtggacagggagggtggacaaaattctacagtaaatatttcaaaaattatagcatcatagaatcatctttatggctgccagatttgtcatcaacacccccaggatagacagtttcatcttccgacctatctggaaaatctcaggaccatgtccccagacctcctaactaaccatagcaccccaaaatacccaaacccctattgtgaagtggaactcttccccacttagtggatcccccctggaccctgctgtccccctgccctgaccactattatcggaatctgggaagttgggcatctatatctccagtgcactcataactctaacatttgcatccactcttgcattaatgacacaaaagtggaagcttccctgcgatgctctggtccaactctagttgccaagtttccaagaccacggggaggtaaatgagattccatttgtgagtgaaaagaccatatatggtaccttctcccggatgggaacatacaaaggaaaaacaactgcctgatctgggaaggtgacagtactaccttcttctagaaaacaaagattgttcaaccaccaccatgagaacaggtggaaaatatctctatagacccaacctggcaatgaagtataaacatcgcaccccgcagggcttctcttggtgccctagttgggttcatttttgtttgtgactatgaatgggaagaagtcacaccctgtaaccactccaactccctaaggagtcacctcttctttaaggaatagctttcccttgtatctaaaaaacttggaactgacatgaatgaacgttggccactcttacccctccaggggtcacaatctataacgcctaggacccaagaatatcagaaataagtaagcaataaaactaattctggcaggaatcagggtggcaataggactagcagcaccctggggtggctttgcctaccatgagttaacgctaaagaacttggctcaaatcctagaatccttagccaccaacggagatcaggcattaaagagaattcaagagttccccagactctggaaaatgtagttgttgataacagactagcattggattatttactagctgaacaaggtggggtcttgtgcagttattaataaaacctgctgcacatatattaactctggacaggttgaggttaacattcaaaagatctatgagcaagctacctagttacatagatataaccagggcactgcccccaactatatctggtcaaccatcaaaagtgccttcccaagtctcacctgtttttcacctcttctaggacctttgacaactgtcttgttacaaatgtttggtccttgcttctttaacctcttagtaaagtttgtgtattctagattaccacagttccagagacaatgctggcacaaggcttccagcccatcctgtccactgacacggagaatgaaatcgtcctgcctctgggctccttagatcaggtatccagagatttttactcctccagtgccaggcagggcctacgtccataaactcagcaggaagtagttacggaaaacagatctccgcccttctgcagcccccttaagattaaggaggagtatctaatctctgaagggggaatgaggtaggaggtgggactcaactctggaagtggggctcaggcactcagaccaaactgagcactagctaaaataggtccagggcagatgctagtttccataggacacaccgacctgtgtcaagtcagttcaccatggctctggcagcacccagaagttaccaccctcaccctggaaatgtctgcataaactgccccttcatttgcatataattaaaagtggatacaaataccactgcagaactgcctctgagctgctactgtgggcgcacagcctgtagggcagccctgctttgcaaggagcagcgcctctgctgctgctgtgcacagccggccgcttcaataaaagttgctaacaccactggcttgcccttgagttccttcctgggcaaagctaagaaccctcccgggctatgcttcaatcttagggctcgcctgtcctgcatcactgggatcatctcccagtaaactagccacacttacatccatgtgtcagggacatttctggagaaagcagcccaggacactgttgaataaaacacacaatagtctctgtggtcttctccaccccaccccacaccaggcaccctcagcttgattctcctttttaattgcctgtaagcagggaagcacaatgttttcacattctttgtaaggcctttgttctactaaaatctaacctcagagcacaattttaaactagatgaaagagttgctgcgcctgaagcactgcaaacacctcctcaccacacatgtgcactcaccctggacaccctcactcaccctgacaccctcactcctcaccctggacaccctcactcaccccagacaccgtcactcctcaccctggacacctcactctgcaccctggacaccctcactcaccctggacacgttcactcaccctgacaccctcactcaccctggacaccctcactcaccctggataccctcactcctcaccctggacaccctcactcaccctggataccctcactcctcaccctggacactctcactcaccctgacaccctcaatcctcaccctggactccctcactcctcaccctggactccctcactcctcaccctggacaccctcactcctcatcctggacaccctcactcaaccctggacaccctcactcctcaccctgacaccctcactcctcaccctggcaccctcagtcaccctgacaccctcactcctcaccctgacaccctcaagtcttcacctccctggctgcagcctgggacacgctttccctaacttctgaaggctcagtcctcctcaagccaatctcatctcaaattgcacctcctcagagaggtcttccataaccgcccttataaagcaggattctttcaccaataccccttcccacatggcactgtctcacagcactcctctaaaagtctgtttacttccttgacaatctgtcttccttataaggggaggttctgtaaaagccaagactctctctgtctagttgactgttgcataccagggcttagaccaaggccctgacatgcagtaggtgcttaatatgttttgaggcaaggtcttgctctgttgcacatgctggagtgcagtggcacaatcgtaattcattgcagccttgaactcctgagctcaagtgatcctcctgcctcagcctcctgagtagctgggactacaggcatgcaccaccaagcttggctaatttaaaaaaaaaattatatagatagggacttgctatgttgcctaggctgatcttgaactcctaacctcaagcaatcctcccacctcggccttccaaagtgctgggattatagccatggagccgccacacccagccaatgtgccgaagaaagaaagaaaaacatgctcatcctttgagtcaggttcaaattttttctcctctttaacccccagtcactccagttataagtgatttttaactcttctcacactttaatgcatctggcaagaagatccacgtggtgttaggaacaatacaggaccttaaggatgggggaatcagcaggtgtcagcgtgccctgtatgctcagggcagctgtttccactggacattctccctttgcctctctgggcagcaactcctaggccagccgacctgctgtgtcgagtaaccaggatttctcaatcttggcatggttgccattttggaccagatcgttctttgttgtgggggctgccctgtacggcaaagaatgccgagcagcacttccagtctccacccacaggacgccagtagcaccctctaagttgtgagaactcaaaatgtccccagaggatgccagatgtcccctggggtggggacacaatcaccccaggttgagatccatggagccaggtctgtttgccaccaaggggtaaagctccattcccaccttaggagggctaggaggcagcatcgtggggccacagaaggcctgggtttgcagtcagaggacaggatgcacattccttcaagatacagacccagattgttgggcatctagttcttgggttttctgttgttgctgttccgttttgtctgtcttccctcctttgtttactagcagcctggaatttgccactttttctaaacgaagatttatggaacacttaccacacggctgacgctgcgcgaggctaaggttctaatacaccgcagctcacttaactctcgcaataccataaacgcacactgtttcatcttgaccctttcttgggaaggtgacagagaggtaggagggcaaacatcttgtgtgccccgtcccaagggtattactggtggaataatatccgccccccaccccagtttctaatttgctgtaggctgtgacgctgtggggcaagactaggagtcctgttgaaattaggaataagtgtgctgtgagggaagggctgccttattttagagcacagattttctgaatatctattttgacaggttcgatcctctccccttcctgccttccttctgtcgattttcaatgtcttgatggtgtcccacctgagtggcctttagagatgtgagttgtgaggcactggggaggcaggcacacgtcctccagcccaagactgcctaatttaacagggatttctgcattctggaacaagcctccattttccccaagcaggattactccagagggcaaaacacagcccaatagtatcacatttcctttctgctttagcaaaaataaccactgtctcattcatgggaaaaggccgccaaacaaatttgttactggaaccatttgtaacaacttctagtttgcactgccttggagcaagcacactttgtagaggagggatttgcagttacttgggcaacaaggtaaccactgatcattacaggaagcttcagaaaccgtgggaccagtgtagaagaatggagtatctgtccaaactaagaataaaaagaatgacacttgtaataaaacaaaaaacaaaaacaaaaaaaaaaaacacatngtgttggggccgacattagggcccccgagaaaaacgttgctatacaacccatccggtgggggcgcagggggcgcccccaggtaaggggttaccgagacaaccgtgggacacagaaagcaggcgggcgccaagaggagaagaccacggcggcacaagcaacagacggcggcggtggggagcttcccccacacaaatagaaaaaaacggccccggggggggggacacccagaacggtccgcagaagacaaaaaacccccagacagggggagctccagagggggccaacaaggggagcttaacacaaacagcgggaggactacaaagaaaggacccgagaattccaatagtac

SEQ ID NO: 321664 - DNA, 9643 bp, Homo sapiens
tgctactcagggcacacagcctatggagcagccctgatctgcaaggagcggcatctctggcgctgctgtgcacagctgcttccatgaaagctgctgcctaacaccaccagctcacccttgaatctttgggcaaatccaagaactctcccaggctaagccccagtcttggggcttgcctgtcctgcatcatctggcaaccagcaaagggacaaggacagcggagatggtggcaattggcagagaggcaagacagcagagacagagaggcagcaattggtgagagacaagagacagcagttggcaagacagcaagagacggtgaagcagtctgtgattgaggatgtggtgaaactgagtggacagccaagtgtccatagtacagctgcctcgtgtgggacccactgctctaacgagccagcccccgacacagaagctgagcacccccaagctggggaacctagagagacctgcacccgggtcccacgtggaagactggctggtgccattttgtcttctgtggatgggtgagagtcccctttgcaccctcccccagtaatatcaggtaagctaggaaataaaagcctttggctaagcggtcagttccccacggtttaggtgccttgaagcacattcttgccaccccttcacctggttctttctcctctgactccattttattgctccactttggtttcattttcagtcctaacatgtatgtcttgtttggagtcttatgtttgctttcgactttctgttaattgtatttgggcaattgtttaaggcaggacacttggttgtgagaggtcccctgttgtgttgactctgggataccagagtcacgttgtcacgttgttctatgttctgtaacctggtcttgggttcacggggttggccgcccactgggtaccccagggtttttggcactgctgtgcacagctgctttggcgagggcatccttgttggctgaaacgcaggcattttgggttctcagcatcggtattataggccaccctccagatgctctggggtttttagcactgacatttcctctaggattgtgggttatacccctttcgctaggcgaatattggtcttgtctttttccaccctgaagttaggagtattattttcctaatagccaattgcaagctccttcctgtgtactgtcttataactcccttgcctaagctgctcttggtcaaaggaattgggagctcccaggctcctggcctggcagtcagccacctacagtggtagacaagtggccagcccaatatttttttcagtatctccactactgggtaggttcttcagcaagtcagagcctctgaggtctccccttgggcaacgctgtttacccctttcccttcctccatttgtttagccccctctccacccaactctagatctctatggaatttaggctccacattcgactgcccattcgtagctcataatccatttttataacaccttgctatctatatttacacctttaaagaacacgggaatttaagagggaagagtaactaggcttttgctaaacttgggctaataaaaccctctgtagagagatccttaatataggcatggggacaacaaggagtatcccaagggactcgccgctagggtgtcttttaagctattggagcaaattcaaatttggcttaaagaaaaagaaactcattttgtattgcaacaccatttgggttaaatacaagttagacgacgaatatatctggcctaaacatggttctatatactatagtgatattttacgattaggcttattttgtaaaagagaaggaaaatgggaagagatcccttatgtacaggcttttatggctctatactggatcacgttacttccaggcattagaatgccatgcataagggatccccacctagctgctccccatagaaagttcataagcctccccagagtctcttcagtcccccagtcctgagtgggggttctcgccaattccctaatgagattccaccccaatatcatcaggcacctttcccccttatccaactagccctagcctataccctctgctgcccaagaaaatgagcccaaccagtacaccaggagtggggctccatatcagcccctaaggtcaagcctgtgtccactgtggaaagtagttgatggaaatgagggaacactcaaagagtacatatgccactttccatgtctaattagaccttataaaaggaaagaattggccagttttcagataaaccagaaaagcttatacaagagtttgttacgttgactatgttcttcaaattgccacgatttacaaatattgtcatccgcttgctgtgctgtggggaaaaaaaagtagaggaaaaagtgtgtggttaagccagtcaattatgacaaggttaaagaagtaactcggggaaaagatgaaaatcccgctctgtttcagggtcttttagttgaagcactcaggaaatatactaatgcaggcccagacaccccagaagggcaagctctcctgggtatacattttctcattcaatcttctcctgacattaggaggaatctacaaaaagcagcaatgggaccttcaagtcctatgaaacgacgcttaaacatagcctttaaagtttacaacaacagggacagggcaaaagaggggagtaaaaagaaatagccaaaaagtacaattgttaacagtgactttaagcctccttgcccctcaggattactcatcttgagaaaatgttacaaaattagcatctgggatgcctagacaagacttgatgcctgacttgctgacccctgggccagaatcactgcgcctactatacgcaaaagggcccctggcaatgcaaatgtcctaactgctctggtgagagagaacaataacaacaaaaagcttccatcaatactagagctaaccttctcctactagccccagtgagctgcttagctcaagtaagtttactgtcccagaggacagctttccacagtggcagataagcagccgcctgaacatttttctttggtatttccaccactgagtgtgctctccagtggcgtggggactccagaatctccttttgagcaatgcagtttgcttcctcccctttttagttgatgctatgggattccctgtcctgccttttcctgttttccatacctatcggggcaaacaaaatttggccaggtagatgggtcccagttctgtaaataacttgaatccagttgtcttgtataggtcattttatttaatatgtttttgggtatatgtacatgtattgtgatgtgtgttacatctagcgtgctgtcaaactggcttatagataaaagaacactcatacattcaacaaataagactactgaaagcttattagtttgaagagaatcttgtatcttctaaaatttaactttaggatttttacctaggtaagtcactgatgttcataggctttaaaatggttaaaatggctttaaatggtgaccagctttgcatggtaccttggttctcggtgatctagataaagttaaaagtgaaataattaaatacacgtaaatgggatatgcttaatgtgtggtttaaaatcataaaatggtagaatggttctcagctatagaatgacaatgtctagtgtgaagttcatgacttcttccttcctaggtttccataaaatgtgctaaagaaatgtattctttattgagaaaaaattttttgtctaatccggaagttactaaatgggaggttcaaaacatgagtgaaccagtgagtagaaaagagagatgtaaagaatattatgaatagaaaatgtattttttgtttgttttgcaaggaaggatataaagaaagagtaattttatatgtggaggaatcctgtatagtaaattccctatcctagagtaaaataactttaagaaagaggtagtatagaacatgtcaggaaattcagctatgttgtagatggtctgtgtaagtcatctgcacagtgcatgagtgtggaggtgggcgggcactcattggcccttgaactccttttgagcagtatggaagccaagaactagaagccaggaaatggggttgtaaaactgatttgtctatggattttatgtgttgagctgctgtggtcttggcttgtagtaattacctatatgaaccttcccccctcccctttagaatttaggacaggttcaaaaggccctccaatataaaaataaaatactgtccttccccacaaaggaaaaaatagctccccggttcaaccaggagacttagtcttgctaaaaccttaaagacagggtaaagacagggataccccaagaatcaattacaatgaaatggaaggggccttatcaggtattgttaagtacccccactgctgttaaacttcagggaacacctacttgggcacacagatccaggactaaacctgtttcttatgagtcacaggcacaaaggaagggcactacaaccacaaccaatatcagtaaagctttggaagacctctgctacctatttaaaataatcaacactcagccagaagaggtaatgtaatgctgtagatgggaataggagcattgatcttgctcttcttcctgactgtagtacttcctttctatggctttaaccagccacctcctcctgggaaacatctcctgtgggcttgttgggtatagaagctactctaagacccaaccagataccatgatgccactgttaattctgtttgctcttctaattaacctaagctagtgtgtatgtggacagggagggtggacaaaattctacagtaaatatttcaaaaattatagcatcatagaatcatctttatggctgccagatttgtcatcaacacccccaggatagacagtttcatcttccgacctatctggaaaatctcaggaccatgtccccagacctcctaactaaccatagcaccccaaaatacccaaacccctattgtgaagtggaactcttccccacttagtggatcccccctggaccctgctgtccccctgccctgaccactattatcggaatctgggaagttgggcatctatatctccagtgcactcataactctaacatttgcatccactcttgcattaatgacacaaaagtggaagcttccctgcgatgctctggtccaactctagttgccaagtttccaagaccacggggaggtaaatgagattccatttgtgagtgaaaagaccatatatggtaccttctcccggatgggaacatacaaaggaaaaacaactgcctgatctgggaaggtgacagtactaccttcttctagaaaacaaagattgttcaaccaccaccatgagaacaggtggaaaatatctctatagacccaacctggcaatgaagtataaacatcgcaccccgcagggcttctcttggtgccctagttgggttcatttttgtttgtgactatgaatgggaagaagtcacaccctgtaaccactccaactccctaaggagtcacctcttctttaaggaatagctttcccttgtatctaaaaaacttggaactgacatgaatgaacgttggccactcttacccctccaggggtcacaatctataacgcctaggacccaagaatatcagaaataagtaagcaataaaactaattctggcaggaatcagggtggcaataggactagcagcaccctggggtggctttgcctaccatgagttaacgctaaagaacttggctcaaatcctagaatccttagccaccaacggagatcaggcattaaagagaattcaagagttccccagactctggaaaatgtagttgttgataacagactagcattggattatttactagctgaacaaggtggggtcttgtgcagttattaataaaacctgctgcacatatattaactctggacaggttgaggttaacattcaaaagatctatgagcaagctacctagttacatagatataaccagggcactgcccccaactatatctggtcaaccatcaaaagtgccttcccaagtctcacctgtttttcacctcttctaggacctttgacaactgtcttgttacaaatgtttggtccttgcttctttaacctcttagtaaagtttgtgtattctagattaccacagttccagagacaatgctggcacaaggcttccagcccatcctgtccactgacacggagaatgaaatcgtcctgcctctgggctccttagatcaggtatccagagatttttactcctccagtgccaggcagggcctacgtccataaactcagcaggaagtagttacggaaaacagatctccgcccttctgcagcccccttaagattaaggaggagtatctaatctctgaagggggaatgaggtaggaggtgggactcaactctggaagtggggctcaggcactcagaccaaactgagcactagctaaaataggtccagggcagatgctagtttccataggacacaccgacctgtgtcaagtcagttcaccatggctctggcagcacccagaagttaccaccctcaccctggaaatgtctgcataaactgccccttcatttgcatataattaaaagtggatacaaataccactgcagaactgcctctgagctgctactgtgggcgcacagcctgtagggcagccctgctttgcaaggagcagcgcctctgctgctgctgtgcacagccggccgcttcaataaaagttgctaacaccactggcttgcccttgagttccttcctgggcaaagctaagaaccctcccgggctatgcttcaatcttagggctcgcctgtcctgcatcactgggatcatctcccagtaaactagccacacttacatccatgtgtcagggacatttctggagaaagcagcccaggacactgttgaataaaacacacaatagtctctgtggtcttctccaccccaccccacaccaggcaccctcagcttgattctcctttttaattgcctgtaagcagggaagcacaatgttttcacattctttgtaaggcctttgttctactaaaatctaacctcagagcacaattttaaactagatgaaagagttgctgcgcctgaagcactgcaaacacctcctcaccacacatgtgcactcaccctggacaccctcactcaccctgacaccctcactcctcaccctggacaccctcactcaccccagacaccgtcactcctcaccctggacacctcactctgcaccctggacaccctcactcaccctggacacgttcactcaccctgacaccctcactcaccctggacaccctcactcaccctggataccctcactcctcaccctggacaccctcactcaccctggataccctcactcctcaccctggacactctcactcaccctgacaccctcaatcctcaccctggactccctcactcctcaccctggactccctcactcctcaccctggacaccctcactcctcatcctggacaccctcactcaaccctggacaccctcactcctcaccctgacaccctcactcctcaccctggcaccctcagtcaccctgacaccctcactcctcaccctgacaccctcaagtcttcacctccctggctgcagcctgggacacgctttccctaacttctgaaggctcagtcctcctcaagccaatctcatctcaaattgcacctcctcagagaggtcttccataaccgcccttataaagcaggattctttcaccaataccccttcccacatggcactgtctcacagcactcctctaaaagtctgtttacttccttgacaatctgtcttccttataaggggaggttctgtaaaagccaagactctctctgtctagttgactgttgcataccagggcttagaccaaggccctgacatgcagtaggtgcttaatatgttttgaggcaaggtcttgctctgttgcacatgctggagtgcagtggcacaatcgtaattcattgcagccttgaactcctgagctcaagtgatcctcctgcctcagcctcctgagtagctgggactacaggcatgcaccaccaagcttggctaatttaaaaaaaaaattatatagatagggacttgctatgttgcctaggctgatcttgaactcctaacctcaagcaatcctcccacctcggccttccaaagtgctgggattatagccatggagccgccacacccagccaatgtgccgaagaaagaaagaaaaacatgctcatcctttgagtcaggttcaaattttttctcctctttaacccccagtcactccagttataagtgatttttaactcttctcacactttaatgcatctggcaagaagatccacgtggtgttaggaacaatacaggaccttaaggatgggggaatcagcaggtgtcagcgtgccctgtatgctcagggcagctgtttccactggacattctccctttgcctctctgggcagcaactcctaggccagccgacctgctgtgtcgagtaaccaggatttctcaatcttggcatggttgccattttggaccagatcgttctttgttgtgggggctgccctgtacggcaaagaatgccgagcagcacttccagtctccacccacaggacgccagtagcaccctctaagttgtgagaactcaaaatgtccccagaggatgccagatgtcccctggggtggggacacaatcaccccaggttgagatccatggagccaggtctgtttgccaccaaggggtaaagctccattcccaccttaggagggctaggaggcagcatcgtggggccacagaaggcctgggtttgcagtcagaggacaggatgcacattccttcaagatacagacccagattgttgggcatctagttcttgggttttctgttgttgctgttccgttttgtctgtcttccctcctttgtttactagcagcctggaatttgccactttttctaaacgaagatttatggaacacttaccacacggctgacgctgcgcgaggctaaggttctaatacaccgcagctcacttaactctcgcaataccataaacgcacactgtttcatcttgaccctttcttgggaaggtgacagagaggtaggagggcaaacatcttgtgtgccccgtcccaagggtattactggtggaataatatccgccccccaccccagtttctaatttgctgtaggctgtgacgctgtggggcaagactaggagtcctgttgaaattaggaataagtgtgctgtgagggaagggctgccttattttagagcacagattttctgaatatctattttgacaggttcgatcctctccccttcctgccttccttctgtcgattttcaatgtcttgatggtgtcccacctgagtggcctttagagatgtgagttgtgaggcactggggaggcaggcacacgtcctccagcccaagactgcctaatttaacagggatttctgcattctggaacaagcctccattttccccaagcaggattactccagagggcaaaacacagcccaatagtatcacatttcctttctgctttagcaaaaataaccacttgatcattacaggaagcttcagaaaccgtgggaccagtgtagaagaatggagtatctgtccaaactaagaataaaaagaatgacacttgta

SEQ ID NO: 321665 - DNA, 9200 bp, Homo sapiens
tgctactcagggcacacagcctatggagcagccctgatctgcaaggagcggcatctctggcgctgctgtgcacagctgcttccatgaaagctgctgcctaacaccaccagctcacccttgaatctttgggcaaatccaagaactctcccaggctaagccccagtcttggggcttgcctgtcctgcatcatctggcaaccagcaaagggacaaggacagcggagatggtggcaattggcagagaggcaagacagcagagacagagaggcagcaattggtgagagacaagagacagcagttggcaagacagcaagagacggtgaagcagtctgtgattgaggatgtggtgaaactgagtggacagccaagtgtccatagtacagctgcctcgtgtgggacccactgctctaacgagccagcccccgacacagaagctgagcacccccaagctggggaacctagagagacctgcacccgggtcccacgtggaagactggctggtgccattttgtcttctgtggatgggtgagagtcccctttgcaccctcccccagtaatatcaggtaagctaggaaataaaagcctttggctaagcggtcagttccccacggtttaggtgccttgaagcacattcttgccaccccttcacctggttctttctcctctgactccattttattgctccactttggtttcattttcagtcctaacatgtatgtcttgtttggagtcttatgtttgctttcgactttctgttaattgtatttgggcaattgtttaaggcaggacacttggttgtgagaggtcccctgttgtgttgactctgggataccagagtcacgttgtcacgttgttctatgttctgtaacctggtcttgggttcacggggttggccgcccactgggtaccccagggtttttggcactgctgtgcacagctgctttggcgagggcatccttgttggctgaaacgcaggcattttgggttctcagcatcggtattataggccaccctccagatgctctggggtttttagcactgacatttcctctaggattgtgggttatacccctttcgctaggcgaatattggtcttgtctttttccaccctgaagttaggagtattattttcctaatagccaattgcaagctccttcctgtgtactgtcttataactcccttgcctaagctgctcttggtcaaaggaattgggagctcccaggctcctggcctggcagtcagccacctacagtggtagacaagtggccagcccaatatttttttcagtatctccactactgggtaggttcttcagcaagtcagagcctctgaggtctccccttgggcaacgctgtttacccctttcccttcctccatttgtttagccccctctccacccaactctagatctctatggaatttaggctccacattcgactgcccattcgtagctcataatccatttttataacaccttgctatctatatttacacctttaaagaacacgggaatttaagagggaagagtaactaggcttttgctaaacttgggctaataaaaccctctgtagagagatccttaatataggcatggggacaacaaggagtatcccaagggactcgccgctagggtgtcttttaagctattggagcaaattcaaatttggcttaaagaaaaagaaactcattttgtattgcaacaccatttgggttaaatacaagttagacgacgaatatatctggcctaaacatggttctatatactatagtgatattttacgattaggcttattttgtaaaagagaaggaaaatgggaagagatcccttatgtacaggcttttatggctctatactggatcacgttacttccaggcattagaatgccatgcataagggatccccacctagctgctccccatagaaagttcataagcctccccagagtctcttcagtcccccagtcctgagtgggggttctcgccaattccctaatgagattccaccccaatatcatcaggcacctttcccccttatccaactagccctagcctataccctctgctgcccaagaaaatgagcccaaccagtacaccaggagtggggctccatatcagcccctaaggtcaagcctgtgtccactgtggaaagtagttgatggaaatgagggaacactcaaagagtacatatgccactttccatgtctaattagaccttataaaaggaaagaattggccagttttcagataaaccagaaaagcttatacaagagtttgttacgttgactatgttcttcaaattgccacgatttacaaatattgtcatccgcttgctgtgctgtggggaaaaaaaagtagaggaaaaagtgtgtggttaagccagtcaattatgacaaggttaaagaagtaactcggggaaaagatgaaaatcccgctctgtttcagggtcttttagttgaagcactcaggaaatatactaatgcaggcccagacaccccagaagggcaagctctcctgggtatacattttctcattcaatcttctcctgacattaggaggaatctacaaaaagcagcaatgggaccttcaagtcctatgaaacgacgcttaaacatagcctttaaagtttacaacaacagggacagggcaaaagaggggagtaaaaagaaatagccaaaaagtacaattgttaacagtgactttaagcctccttgcccctcaggattactcatcttgagaaaatgttacaaaattagcatctgggatgcctagacaagacttgatgcctgacttgctgacccctgggccagaatcactgcgcctactatacgcaaaagggcccctggcaatgcaaatgtcctaactgctctggtgagagagaacaataacaacaaaaagcttccatcaatactagagctaaccttctcctactagccccagtgagctgcttagctcaagtaagtttactgtcccagaggacagctttccacagtggcagataagcagccgcctgaacatttttctttggtatttccaccactgagtgtgctctccagtggcgtggggactccagaatctccttttgagcaatgcagtttgcttcctcccctttttagttgatgctatgggattccctgtcctgccttttcctgttttccatacctatcggggcaaacaaaatttggccaggtagatgggtcccagttctgtaaataacttgaatccagttgtcttgtataggtcattttatttaatatgtttttgggtatatgtacatgtattgtgatgtgtgttacatctagcgtgctgtcaaactggcttatagataaaagaacactcatacattcaacaaataagactactgaaagcttattagtttgaagagaatcttgtatcttctaaaatttaactttaggatttttacctaggtaagtcactgatgttcataggctttaaaatggttaaaatggctttaaatggtgaccagctttgcatggtaccttggttctcggtgatctagataaagttaaaagtgaaataattaaatacacgtaaatgggatatgcttaatgtgtggtttaaaatcataaaatggtagaatggttctcagctatagaatgacaatgtctagtgtgaagttcatgacttcttccttcctaggtttccataaaatgtgctaaagaaatgtattctttattgagaaaaaattttttgtctaatccggaagttactaaatgggaggttcaaaacatgagtgaaccagtgagtagaaaagagagatgtaaagaatattatgaatagaaaatgtattttttgtttgttttgcaaggaaggatataaagaaagagtaattttatatgtggaggaatcctgtatagtaaattccctatcctagagtaaaataactttaagaaagaggtagtatagaacatgtcaggaaattcagctatgttgtagatggtctgtgtaagtcatctgcacagtgcatgagtgtggaggtgggcgggcactcattggcccttgaactccttttgagcagtatggaagccaagaactagaagccaggaaatggggttgtaaaactgatttgtctatggattttatgtgttgagctgctgtggtcttggcttgtagtaattacctatatgaaccttcccccctcccctttagaatttaggacaggttcaaaaggccctccaatataaaaataaaatactgtccttccccacaaaggaaaaaatagctccccggttcaaccaggagacttagtcttgctaaaaccttaaagacagggtaaagacagggataccccaagaatcaattacaatgaaatggaaggggccttatcaggtattgttaagtacccccactgctgttaaacttcagggaacacctacttgggcacacagatccaggactaaacctgtttcttatgagtcacaggcacaaaggaagggcactacaaccacaaccaatatcagtaaagctttggaagacctctgctacctatttaaaataatcaacactcagccagaagaggtaatgtaatgctgtagatgggaataggagcattgatcttgctcttcttcctgactgtagtacttcctttctatggctttaaccagccacctcctcctgggaaacatctcctgtgggcttgttgggtatagaagctactctaagacccaaccagataccatgatgccactgttaattctgtttgctcttctaattaacctaagctagtgtgtatgtggacagggagggtggacaaaattctacagtaaatatttcaaaaattatagcatcatagaatcatctttatggctgccagatttgtcatcaacacccccaggatagacagtttcatcttccgacctatctggaaaatctcaggaccatgtccccagacctcctaactaaccatagcaccccaaaatacccaaacccctattgtgaagtggaactcttccccacttagtggatcccccctggaccctgctgtccccctgccctgaccactattatcggaatctgggaagttgggcatctatatctccagtgcactcataactctaacatttgcatccactcttgcattaatgacacaaaagtggaagcttccctgcgatgctctggtccaactctagttgccaagtttccaagaccacggggaggtaaatgagattccatttgtgagtgaaaagaccatatatggtaccttctcccggatgggaacatacaaaggaaaaacaactgcctgatctgggaaggtgacagtactaccttcttctagaaaacaaagattgttcaaccaccaccatgagaacaggtggaaaatatctctatagacccaacctggcaatgaagtataaacatcgcaccccgcagggcttctcttggtgccctagttgggttcatttttgtttgtgactatgaatgggaagaagtcacaccctgtaaccactccaactccctaaggagtcacctcttctttaaggaatagctttcccttgtatctaaaaaacttggaactgacatgaatgaacgttggccactcttacccctccaggggtcacaatctataacgcctaggacccaagaatatcagaaataagtaagcaataaaactaattctggcaggaatcagggtggcaataggactagcagcaccctggggtggctttgcctaccatgagttaacgctaaagaacttggctcaaatcctagaatccttagccaccaacggagatcaggcattaaagagaattcaagagttccccagactctggaaaatgtagttgttgataacagactagcattggattatttactagctgaacaaggtggggtcttgtgcagttattaataaaacctgctgcacatatattaactctggacaggttgaggttaacattcaaaagatctatgagcaagctacctagttacatagatataaccagggcactgcccccaactatatctggtcaaccatcaaaagtgccttcccaagtctcacctgtttttcacctcttctaggacctttgacaactgtcttgttacaaatgtttggtccttgcttctttaacctcttagtaaagtttgtgtattctagattaccacagttccagagacaatgctggcacaaggcttccagcccatcctgtccactgacacggagaatgaaatcgtcctgcctctgggctccttagatcaggtatccagagatttttactcctccagtgccaggcagggcctacgtccataaactcagcaggaagtagttacggaaaacagatctccgcccttctgcagcccccttaagattaaggaggagtatctaatctctgaagggggaatgaggtaggaggtgggactcaactctggaagtggggctcaggcactcagaccaaactgagcactagctaaaataggtccagggcagatgctagtttccataggacacaccgacctgtgtcaagtcagttcaccatggctctggcagcacccagaagttaccaccctcaccctggaaatgtctgcataaactgccccttcatttgcatataattaaaagtggatacaaataccactgcagaactgcctctgagctgctactgtgggcgcacagcctgtagggcagccctgctttgcaaggagcagcgcctctgctgctgctgtgcacagccggccgcttcaataaaagttgctaacaccactggcttgcccttgagttccttcctgggcaaagctaagaaccctcccgggctatgcttcaatcttagggctcgcctgtcctgcatcactgggatcatctcccagtaaactagccacacttacatccatgtgtcagggacatttctggagaaagcagcccaggacactgttgaataaaacacacaatagtctctgtggtcttctccaccccaccccacaccaggcaccctcagcttgattctcctttttaattgcctgtaagcagggaagcacaatgttttcacattctttgtaaggcctttgttctactaaaatctaacctcagagcacaattttaaactagatgaaagagttgctgcgcctgaagcactgcaaacacctcctcaccacacatgtgcactcaccctggacaccctcactcaccctgacaccctcactcctcaccctggacaccctcactcaccccagacaccgtcactcctcaccctggacacctcactctgcaccctggacaccctcactcaccctggacacgttcactcaccctgacaccctcactcaccctggacaccctcactcaccctggataccctcactcctcaccctggacaccctcactcaccctggataccctcactcctcaccctggacactctcactcaccctgacaccctcaatcctcaccctggactccctcactcctcaccctggactccctcactcctcaccctggacaccctcactcctcatcctggacaccctcactcaaccctggacaccctcactcctcaccctgacaccctcactcctcaccctggcaccctcagtcaccctgacaccctcactcctcaccctgacaccctcaagtcttcacctccctggctgcagcctgggacacgctttccctaacttctgaaggctcagtcctcctcaagccaatctcatctcaaattgcacctcctcagagaggtcttccataaccgcccttataaagcaggattctttcaccaataccccttcccacatggcactgtctcacagcactcctctaaaagtctgtttacttccttgacaatctgtcttccttataaggggaggttctgtaaaagccaagactctctctgtctagttgactgttgcataccagggcttagaccaaggccctgacatgcagtaggtgcttaatatgttttgaggcaaggtcttgctctgttgcacatgctggagtgcagtggcacaatcgtaattcattgcagccttgaactcctgagctcaagtgatcctcctgcctcagcctcctgagtagctgggactacaggcatgcaccaccaagcttggctaatttaaaaaaaaaattatatagatagggacttgctatgttgcctaggctgatcttgaactcctaacctcaagcaatcctcccacctcggccttccaaagtgctgggattatagccatggagccgccacacccagccaatgtgccgaagaaagaaagaaaaacatgctcatcctttgagtcaggttcaaattttttctcctctttaacccccagtcactccagttataagtgatttttaactcttctcacactttaatgcatctggcaagaagatccacgtggtgttaggaacaatacaggaccttaaggatgggggaatcagcaggtgtcagcgtgccctgtatgctcagggcagctgtttccactggacattctccctttgcctctctgggcagcaactcctaggccagccgacctgctgtgtcgagtaaccaggatttctcaatcttggcatggttgccattttggaccagatcgttctttgttgtgggggctgccctgtacggcaaagaatgccgagcagcacttccagtctccacccacaggacgccagtagcaccctctaagttgtgagaactcaaaatgtccccagaggatgccagatgtcccctggggtggggacacaatcaccccaggttgagatccatggagccaggtctgtttgccaccaaggggtaaagctccattcccaccttaggagggctaggaggcagcatcgtggggccacagaaggcctgggtttgcagtcagaggacaggatgcacattccttcaagatacagaccaagactgcctaatttaacagggatttctgcattctggaacaagcctccattttccccaagcaggattactccagagggcaaaacacagcccaatagtatcacatttcctttctgctttagcaaaaataaccactgtctcattcatgggaaaaggccgccaaacaaatttgttactggaaccatttgtaacaacttctagtttgcactgccttggagcaagcacactttgtagaggagggatttgcagttacttgggcaacaaggtaaccactgatcattacaggaagcttcagaaaccgtgggaccagtgtagaagaatggagtatctgtccaaactaagaataaaaagaatgacacttgta

SEQ ID NO: 321666 - DNA, 8203 bp, Homo sapiens
tgctactcagggcacacagcctatggagcagccctgatctgcaaggagcggcatctctggcgctgctgtgcacagctgcttccatgaaagctgctgcctaacaccaccagctcacccttgaatctttgggcaaatccaagaactctcccaggctaagccccagtcttggggcttgcctgtcctgcatcatctggcaaccagcaaagggacaaggacagcggagatggtggcaattggcagagaggcaagacagcagagacagagaggcagcaattggtgagagacaagagacagcagttggcaagacagcaagagacggtgaagcagtctgtgattgaggatgtggtgaaactgagtggacagccaagtgtccatagtacagctgcctcgtgtgggacccactgctctaacgagccagcccccgacacagaagctgagcacccccaagctggggaacctagagagacctgcacccgggtcccacgtggaagactggctggtgccattttgtcttctgtggatgggtgagagtcccctttgcaccctcccccagtaatatcaggtaagctaggaaataaaagcctttggctaagcggtcagttccccacggtttaggtgccttgaagcacattcttgccaccccttcacctggttctttctcctctgactccattttattgctccactttggtttcattttcagtcctaacatgtatgtcttgtttggagtcttatgtttgctttcgactttctgttaattgtatttgggcaattgtttaaggcaggacacttggttgtgagaggtcccctgttgtgttgactctgggataccagagtcacgttgtcacgttgttctatgttctgtaacctggtcttgggttcacggggttggccgcccactgggtaccccagggtttttggcactgctgtgcacagctgctttggcgagggcatccttgttggctgaaacgcaggcattttgggttctcagcatcggtattataggccaccctccagatgctctggggtttttagcactgacatttcctctaggattgtgggttatacccctttcgctaggcgaatattggtcttgtctttttccaccctgaagttaggagtattattttcctaatagccaattgcaagctccttcctgtgtactgtcttataactcccttgcctaagctgctcttggtcaaaggaattgggagctcccaggctcctggcctggcagtcagccacctacagtggtagacaagtggccagcccaatatttttttcagtatctccactactgggtaggttcttcagcaagtcagagcctctgaggtctccccttgggcaacgctgtttacccctttcccttcctccatttgtttagccccctctccacccaactctagatctctatggaatttaggctccacattcgactgcccattcgtagctcataatccatttttataacaccttgctatctatatttacacctttaaagaacacgggaatttaagagggaagagtaactaggcttttgctaaacttgggctaataaaaccctctgtagagagatccttaatataggcatggggacaacaaggagtatcccaagggactcgccgctagggtgtcttttaagctattggagcaaattcaaatttggcttaaagaaaaagaaactcattttgtattgcaacaccatttgggttaaatacaagttagacgacgaatatatctggcctaaacatggttctatatactatagtgatattttacgattaggcttattttgtaaaagagaaggaaaatgggaagagatcccttatgtacaggcttttatggctctatactggatcacgttacttccaggcattagaatgccatgcataagggatccccacctagctgctccccatagaaagttcataagcctccccagagtctcttcagtcccccagtcctgagtgggggttctcgccaattccctaatgagattccaccccaatatcatcaggcacctttcccccttatccaactagccctagcctataccctctgctgcccaagaaaatgagcccaaccagtacaccaggagtggggctccatatcagcccctaaggtcaagcctgtgtccactgtggaaagtagttgatggaaatgagggaacactcaaagagtacatatgccactttccatgtctaattagaccttataaaaggaaagaattggccagttttcagataaaccagaaaagcttatacaagagtttgttacgttgactatgttcttcaaattgccacgatttacaaatattgtcatccgcttgctgtgctgtggggaaaaaaaagtagaggaaaaagtgtgtggttaagccagtcaattatgacaaggttaaagaagtaactcggggaaaagatgaaaatcccgctctgtttcagggtcttttagttgaagcactcaggaaatatactaatgcaggcccagacaccccagaagggcaagctctcctgggtatacattttctcattcaatcttctcctgacattaggaggaatctacaaaaagcagcaatgggaccttcaagtcctatgaaacgacgcttaaacatagcctttaaagtttacaacaacagggacagggcaaaagaggggagtaaaaagaaatagccaaaaagtacaattgttaacagtgactttaagcctccttgcccctcaggattactcatcttgagaaaatgttacaaaattagcatctgggatgcctagacaagacttgatgcctgacttgctgacccctgggccagaatcactgcgcctactatacgcaaaagggcccctggcaatgcaaatgtcctaactgctctggtgagagagaacaataacaacaaaaagcttccatcaatactagagctaaccttctcctactagccccagtgagctgcttagctcaagtaagtttactgtcccagaggacagctttccacagtggcagataagcagccgcctgaacatttttctttggtatttccaccactgagtgtgctctccagtggcgtggggactccagaatctccttttgagcaatgcagtttgcttcctcccctttttagttgatgctatgggattccctgtcctgccttttcctgttttccatacctatcggggcaaacaaaatttggccaggtagatgggtcccagttctgtaaataacttgaatccagttgtcttgtataggtcattttatttaatatgtttttgggtatatgtacatgtattgtgatgtgtgttacatctagcgtgctgtcaaactggcttatagataaaagaacactcatacattcaacaaataagactactgaaagcttattagtttgaagagaatcttgtatcttctaaaatttaactttaggatttttacctaggtaagtcactgatgttcataggctttaaaatggttaaaatggctttaaatggtgaccagctttgcatggtaccttggttctcggtgatctagataaagttaaaagtgaaataattaaatacacgtaaatgggatatgcttaatgtgtggtttaaaatcataaaatggtagaatggttctcagctatagaatgacaatgtctagtgtgaagttcatgacttcttccttcctaggtttccataaaatgtgctaaagaaatgtattctttattgagaaaaaattttttgtctaatccggaagttactaaatgggaggttcaaaacatgagtgaaccagtgagtagaaaagagagatgtaaagaatattatgaatagaaaatgtattttttgtttgttttgcaaggaaggatataaagaaagagtaattttatatgtggaggaatcctgtatagtaaattccctatcctagagtaaaataactttaagaaagaggtagtatagaacatgtcaggaaattcagctatgttgtagatggtctgtgtaagtcatctgcacagtgcatgagtgtggaggtgggcgggcactcattggcccttgaactccttttgagcagtatggaagccaagaactagaagccaggaaatggggttgtaaaactgatttgtctatggattttatgtgttgagctgctgtggtcttggcttgtagtaattacctatatgaaccttcccccctcccctttagaatttaggacaggttcaaaaggccctccaatataaaaataaaatactgtccttccccacaaaggaaaaaatagctccccggttcaaccaggagacttagtcttgctaaaaccttaaagacagggtaaagacagggataccccaagaatcaattacaatgaaatggaaggggccttatcaggtattgttaagtacccccactgctgttaaacttcagggaacacctacttgggcacacagatccaggactaaacctgtttcttatgagtcacaggcacaaaggaagggcactacaaccacaaccaatatcagtaaagctttggaagacctctgctacctatttaaaataatcaacactcagccagaagaggtaatgtaatgctgtagatgggaataggagcattgatcttgctcttcttcctgactgtagtacttcctttctatggctttaaccagccacctcctcctgggaaacatctcctgtgggcttgttgggtatagaagctactctaagacccaaccagataccatgatgccactgttaattctgtttgctcttctaattaacctaagctagtgtgtatgtggacagggagggtggacaaaattctacagtaaatatttcaaaaattatagcatcatagaatcatctttatggctgccagatttgtcatcaacacccccaggatagacagtttcatcttccgacctatctggaaaatctcaggaccatgtccccagacctcctaactaaccatagcaccccaaaatacccaaacccctattgtgaagtggaactcttccccacttagtggatcccccctggaccctgctgtccccctgccctgaccactattatcggaatctgggaagttgggcatctatatctccagtgcactcataactctaacatttgcatccactcttgcattaatgacacaaaagtggaagcttccctgcgatgctctggtccaactctagttgccaagtttccaagaccacggggaggtaaatgagattccatttgtgagtgaaaagaccatatatggtaccttctcccggatgggaacatacaaaggaaaaacaactgcctgatctgggaaggtgacagtactaccttcttctagaaaacaaagattgttcaaccaccaccatgagaacaggtggaaaatatctctatagacccaacctggcaatgaagtataaacatcgcaccccgcagggcttctcttggtgccctagttgggttcatttttgtttgtgactatgaatgggaagaagtcacaccctgtaaccactccaactccctaaggagtcacctcttctttaaggaatagctttcccttgtatctaaaaaacttggaactgacatgaatgaacgttggccactcttacccctccaggggtcacaatctataacgcctaggacccaagaatatcagaaataagtaagcaataaaactaattctggcaggaatcagggtggcaataggactagcagcaccctggggtggctttgcctaccatgagttaacgctaaagaacttggctcaaatcctagaatccttagccaccaacggagatcaggcattaaagagaattcaagagttccccagactctggaaaatgtagttgttgataacagactagcattggattatttactagctgaacaaggtggggtcttgtgcagttattaataaaacctgctgcacatatattaactctggacaggttgaggttaacattcaaaagatctatgagcaagctacctagttacatagatataaccagggcactgcccccaactatatctggtcaaccatcaaaagtgccttcccaagtctcacctgtttttcacctcttctaggacctttgacaactgtcttgttacaaatgtttggtccttgcttctttaacctcttagtaaagtttgtgtattctagattaccacagttccagagacaatgctggcacaaggcttccagcccatcctgtccactgacacggagaatgaaatcgtcctgcctctgggctccttagatcaggtatccagagatttttactcctccagtgccaggcagggcctacgtccataaactcagcaggaagtagttacggaaaacagatctccgcccttctgcagcccccttaagattaaggaggagtatctaatctctgaagggggaatgaggtaggaggtgggactcaactctggaagtggggctcaggcactcagaccaaactgagcactagctaaaataggtccagggcagatgctagtttccataggacacaccgacctgtgtcaagtcagttcaccatggctctggcagcacccagaagttaccaccctcaccctggaaatgtctgcataaactgccccttcatttgcatataattaaaagtggatacaaataccactgcagaactgcctctgagctgctactgtgggcgcacagcctgtagggcagccctgctttgcaaggagcagcgcctctgctgctgctgtgcacagccggccgcttcaataaaagttgctaacaccactggcttgcccttgagttccttcctgggcaaagctaagaaccctcccgggctatgcttcaatcttagggctcgcctgtcctgcatcactgggatcatctcccagtaaactagccacacttacatccatgtgtcagggacatttctggagaaagcagcccaggacactgttgaataaaacacacaatagtctctgtggtcttctccaccccaccccacaccaggcaccctcagcttgattctcctttttaattgcctgtaagcagggaagcacaatgttttcacattctttgtaaggcctttgttctactaaaatctaacctcagagcacaattttaaactagatgaaagagttgctgcgcctgaagcactgcaaacacctcctcaccacacatgtgcactcaccctggacaccctcactcaccctgacaccctcactcctcaccctggacaccctcactcaccccagacaccgtcactcctcaccctggacacctcactctgcaccctggacaccctcactcaccctggacacgttcactcaccctgacaccctcactcaccctggacaccctcactcaccctggataccctcactcctcaccctggacaccctcactcaccctggataccctcactcctcaccctggacactctcactcaccctgacaccctcaatcctcaccctggactccctcactcctcaccctggactccctcactcctcaccctggacaccctcactcctcatcctggacaccctcactcaaccctggacaccctcactcctcaccctgacaccctcactcctcaccctggcaccctcagtcaccctgacaccctcactcctcaccctgacaccctcaagtcttcacctccctggctgcagcctgggacacgctttccctaacttctgaaggctcagtcctcctcaagccaatctcatctcaaattgcacctcctcagagaggtcttccataaccgcccttataaagcaggattctttcaccaataccccttcccacatggcactgtctcacagcactcctctaaaagtctgtttacttccttgacaatctgtcttccttataaggggaggttctgtaaaagccaagactctctctgtctagttgactgttgcataccagggcttagaccaaggccctgacatgcagtaggtgcttaatatgttttgaggcaaggtcttgctctgttgcacatgctggagtgcagtggcacaatcgtaattcattgcagccttgaactcctgagctcaagtgatcctcctgcctcagcctcctgagtagctgggactacaggcatgcaccaccaagcttggctaattttgtatttttagtagagacggggtttctccatgttggtcaggctagtctcgaactcccgacctcaggtgatctgcctgccttggccccaaagtgctgcgattacaggtgtgagccaccaaaactggaccgaattccatttttgcaa

SEQ ID NO: 321667 - DNA, 5903 bp, Homo sapiens
tgctactcagggcacacagcctatggagcagccctgatctgcaaggagcggcatctctggcgctgctgtgcacagctgcttccatgaaagctgctgcctaacaccaccagctcacccttgaatctttgggcaaatccaagaactctcccaggctaagccccagtcttggggcttgcctgtcctgcatcatctggcaaccagcaaagggacaaggacagcggagatggtggcaattggcagagaggcaagacagcagagacagagaggcagcaattggtgagagacaagagacagcagttggcaagacagcaagagacggtgaagcagtctgtgattgaggatgtggtgaaactgagtggacagccaagtgtccatagtacagctgcctcgtgtgggacccactgctctaacgagccagcccccgacacagaagctgagcacccccaagctggggaacctagagagacctgcacccgggtcccacgtggaagactggctggtgccattttgtcttctgtggatgggtgagagtcccctttgcaccctcccccagtaatatcaggcacaaaggaagggcactacaaccacaaccaatatcagtaaagctttggaagacctctgctacctatttaaaataatcaacactcagccagaagaggtaatgtaatgctgtagatgggaataggagcattgatcttgctcttcttcctgactgtagtacttcctttctatggctttaaccagccacctcctcctgggaaacatctcctgtgggcttgttgggtatagaagctactctaagacccaaccagataccatgatgccactgttaattctgtttgctcttctaattaacctaagctagtgtgtatgtggacagggagggtggacaaaattctacagtaaatatttcaaaaattatagcatcatagaatcatctttatggctgccagatttgtcatcaacacccccaggatagacagtttcatcttccgacctatctggaaaatctcaggaccatgtccccagacctcctaactaaccatagcaccccaaaatacccaaacccctattgtgaagtggaactcttccccacttagtggatcccccctggaccctgctgtccccctgccctgaccactattatcggaatctgggaagttgggcatctatatctccagtgcactcataactctaacatttgcatccactcttgcattaatgacacaaaagtggaagcttccctgcgatgctctggtccaactctagttgccaagtttccaagaccacggggaggtaaatgagattccatttgtgagtgaaaagaccatatatggtaccttctcccggatgggaacatacaaaggaaaaacaactgcctgatctgggaaggtgacagtactaccttcttctagaaaacaaagattgttcaaccaccaccatgagaacaggtggaaaatatctctatagacccaacctggcaatgaagtataaacatcgcaccccgcagggcttctcttggtgccctagttgggttcatttttgtttgtgactatgaatgggaagaagtcacaccctgtaaccactccaactccctaaggagtcacctcttctttaaggaatagctttcccttgtatctaaaaaacttggaactgacatgaatgaacgttggccactcttacccctccaggggtcacaatctataacgcctaggacccaagaatatcagaaataagtaagcaataaaactaattctggcaggaatcagggtggcaataggactagcagcaccctggggtggctttgcctaccatgagttaacgctaaagaacttggctcaaatcctagaatccttagccaccaacggagatcaggcattaaagagaattcaagagttccccagactctggaaaatgtagttgttgataacagactagcattggattatttactagctgaacaaggtggggtcttgtgcagttattaataaaacctgctgcacatatattaactctggacaggttgaggttaacattcaaaagatctatgagcaagctacctagttacatagatataaccagggcactgcccccaactatatctggtcaaccatcaaaagtgccttcccaagtctcacctgtttttcacctcttctaggacctttgacaactgtcttgttacaaatgtttggtccttgcttctttaacctcttagtaaagtttgtgtattctagattaccacagttccagagacaatgctggcacaaggcttccagcccatcctgtccactgacacggagaatgaaatcgtcctgcctctgggctccttagatcaggtatccagagatttttactcctccagtgccaggcagggcctacgtccataaactcagcaggaagtagttacggaaaacagatctccgcccttctgcagcccccttaagattaaggaggagtatctaatctctgaagggggaatgaggtaggaggtgggactcaactctggaagtggggctcaggcactcagaccaaactgagcactagctaaaataggtccagggcagatgctagtttccataggacacaccgacctgtgtcaagtcagttcaccatggctctggcagcacccagaagttaccaccctcaccctggaaatgtctgcataaactgccccttcatttgcatataattaaaagtggatacaaataccactgcagaactgcctctgagctgctactgtgggcgcacagcctgtagggcagccctgctttgcaaggagcagcgcctctgctgctgctgtgcacagccggccgcttcaataaaagttgctaacaccactggcttgcccttgagttccttcctgggcaaagctaagaaccctcccgggctatgcttcaatcttagggctcgcctgtcctgcatcactgggatcatctcccagtaaactagccacacttacatccatgtgtcagggacatttctggagaaagcagcccaggacactgttgaataaaacacacaatagtctctgtggtcttctccaccccaccccacaccaggcaccctcagcttgattctcctttttaattgcctgtaagcagggaagcacaatgttttcacattctttgtaaggcctttgttctactaaaatctaacctcagagcacaattttaaactagatgaaagagttgctgcgcctgaagcactgcaaacacctcctcaccacacatgtgcactcaccctggacaccctcactcaccctgacaccctcactcctcaccctggacaccctcactcaccccagacaccgtcactcctcaccctggacacctcactctgcaccctggacaccctcactcaccctggacacgttcactcaccctgacaccctcactcaccctggacaccctcactcaccctggataccctcactcctcaccctggacaccctcactcaccctggataccctcactcctcaccctggacactctcactcaccctgacaccctcaatcctcaccctggactccctcactcctcaccctggactccctcactcctcaccctggacaccctcactcctcatcctggacaccctcactcaaccctggacaccctcactcctcaccctgacaccctcactcctcaccctggcaccctcagtcaccctgacaccctcactcctcaccctgacaccctcaagtcttcacctccctggctgcagcctgggacacgctttccctaacttctgaaggctcagtcctcctcaagccaatctcatctcaaattgcacctcctcagagaggtcttccataaccgcccttataaagcaggattctttcaccaataccccttcccacatggcactgtctcacagcactcctctaaaagtctgtttacttccttgacaatctgtcttccttataaggggaggttctgtaaaagccaagactctctctgtctagttgactgttgcataccagggcttagaccaaggccctgacatgcagtaggtgcttaatatgttttgaggcaaggtcttgctctgttgcacatgctggagtgcagtggcacaatcgtaattcattgcagccttgaactcctgagctcaagtgatcctcctgcctcagcctcctgagtagctgggactacaggcatgcaccaccaagcttggctaatttaaaaaaaaaattatatagatagggacttgctatgttgcctaggctgatcttgaactcctaacctcaagcaatcctcccacctcggccttccaaagtgctgggattatagccatggagccgccacacccagccaatgtgccgaagaaagaaagaaaaacatgctcatcctttgagtcaggttcaaattttttctcctctttaacccccagtcactccagttataagtgatttttaactcttctcacactttaatgcatctggcaagaagatccacgtggtgttaggaacaatacaggaccttaaggatgggggaatcagcaggtgtcagcgtgccctgtatgctcagggcagctgtttccactggacattctccctttgcctctctgggcagcaactcctaggccagccgacctgctgtgtcgagtaaccaggatttctcaatcttggcatggttgccattttggaccagatcgttctttgttgtgggggctgccctgtacggcaaagaatgccgagcagcacttccagtctccacccacaggacgccagtagcaccctctaagttgtgagaactcaaaatgtccccagaggatgccagatgtcccctggggtggggacacaatcaccccaggttgagatccatggagccaggtctgtttgccaccaaggggtaaagctccattcccaccttaggagggctaggaggcagcatcgtggggccacagaaggcctgggtttgcagtcagaggacaggatgcacattccttcaagatacagacccagattgttgggcatctagttcttgggttttctgttgttgctgttccgttttgtctgtcttccctcctttgtttactagcagcctggaatttgccactttttctaaacgaagatttatggaacacttaccacacggctgacgctgcgcgaggctaaggttctaatacaccgcagctcacttaactctcgcaataccataaacgcacactgtttcatcttgaccctttcttgggaaggtgacagagaggtaggagggcaaacatcttgtgtgccccgtcccaagggtattactggtggaataatatccgccccccaccccagtttctaatttgctgtaggctgtgacgctgtggggcaagactaggagtcctgttgaaattaggaataagtgtgctgtgagggaagggctgccttattttagagcacagattttctgaatatctattttgacaggttcgatcctctccccttcctgccttccttctgtcgattttcaatgtcttgatggtgtcccacctgagtggcctttagagatgtgagttgtgaggcactggggaggcaggcacacgtcctccagcccaagactgcctaatttaacagggatttctgcattctggaacaagcctccattttccccaagcaggattactccagagggcaaaacacagcccaatagtatcacatttcctttctgctttagcaaaaataaccactgtctcattcatgggaaaaggccgccaaacaaatttgttactggaaccatttgtaacaacttctagtttgcactgccttggagcaagcacactttgtagaggagggatttgcagttacttgggcaacaaggtaaccactgatcattacaggaagcttcagaaaccgtgggaccagtgtagaagaatggagtatctgtccaaactaagaataaaaagaatgacacttgta

SEQ ID NO: 321668 - DNA, 4725 bp, Homo sapiens
ggccatgagccgcagggaagcttccacttttgtggtcattaatgcaagagtggatgcaaatgttagagttatgagtgcactggagatctagttgccaagtttccaagaccacggggaggtaaatgagattccatttgtgagtgaaaagaccatatatggtaccttctcccggatgggaacatacaaaggaaaaacaactgcctgatctgggaaggtgacagtactaccttcttctagaaaacaaagattgttcaaccaccaccatgagaacaggtggaaaatatctctatagacccaacctggcaatgaagtataaacatcgcaccccgcagggcttctcttggtgccctagttgggttcatttttgtttgtgactatgaatgggaagaagtcacaccctgtaaccactccaactccctaaggagtcacctcttctttaaggaatagctttcccttgtatctaaaaaacttggaactgacatgaatgaacgttggccactcttacccctccaggggtcacaatctataacgcctaggacccaagaatatcagaaataagtaagcaataaaactaattctggcaggaatcagggtggcaataggactagcagcaccctggggtggctttgcctaccatgagttaacgctaaagaacttggctcaaatcctagaatccttagccaccaacggagatcaggcattaaagagaattcaagagttccccagactctggaaaatgtagttgttgataacagactagcattggattatttactagctgaacaaggtggggtcttgtgcagttattaataaaacctgctgcacatatattaactctggacaggttgaggttaacattcaaaagatctatgagcaagctacctagttacatagatataaccagggcactgcccccaactatatctggtcaaccatcaaaagtgccttcccaagtctcacctgtttttcacctcttctaggacctttgacaactgtcttgttacaaatgtttggtccttgcttctttaacctcttagtaaagtttgtgtattctagattaccacagttccagagacaatgctggcacaaggcttccagcccatcctgtccactgacacggagaatgaaatcgtcctgcctctgggctccttagatcaggtatccagagatttttactcctccagtgccaggcagggcctacgtccataaactcagcaggaagtagttacggaaaacagatctccgcccttctgcagcccccttaagattaaggaggagtatctaatctctgaagggggaatgaggtaggaggtgggactcaactctggaagtggggctcaggcactcagaccaaactgagcactagctaaaataggtccagggcagatgctagtttccataggacacaccgacctgtgtcaagtcagttcaccatggctctggcagcacccagaagttaccaccctcaccctggaaatgtctgcataaactgccccttcatttgcatataattaaaagtggatacaaataccactgcagaactgcctctgagctgctactgtgggcgcacagcctgtagggcagccctgctttgcaaggagcagcgcctctgctgctgctgtgcacagccggccgcttcaataaaagttgctaacaccactggcttgcccttgagttccttcctgggcaaagctaagaaccctcccgggctatgcttcaatcttagggctcgcctgtcctgcatcactgggatcatctcccagtaaactagccacacttacatccatgtgtcagggacatttctggagaaagcagcccaggacactgttgaataaaacacacaatagtctctgtggtcttctccaccccaccccacaccaggcaccctcagcttgattctcctttttaattgcctgtaagcagggaagcacaatgttttcacattctttgtaaggcctttgttctactaaaatctaacctcagagcacaattttaaactagatgaaagagttgctgcgcctgaagcactgcaaacacctcctcaccacacatgtgcactcaccctggacaccctcactcaccctgacaccctcactcctcaccctggacaccctcactcaccccagacaccgtcactcctcaccctggacacctcactctgcaccctggacaccctcactcaccctggacacgttcactcaccctgacaccctcactcaccctggacaccctcactcaccctggataccctcactcctcaccctggacaccctcactcaccctggataccctcactcctcaccctggacactctcactcaccctgacaccctcaatcctcaccctggactccctcactcctcaccctggactccctcactcctcaccctggacaccctcactcctcatcctggacaccctcactcaaccctggacaccctcactcctcaccctgacaccctcactcctcaccctggcaccctcagtcaccctgacaccctcactcctcaccctgacaccctcaagtcttcacctccctggctgcagcctgggacacgctttccctaacttctgaaggctcagtcctcctcaagccaatctcatctcaaattgcacctcctcagagaggtcttccataaccgcccttataaagcaggattctttcaccaataccccttcccacatggcactgtctcacagcactcctctaaaagtctgtttacttccttgacaatctgtcttccttataaggggaggttctgtaaaagccaagactctctctgtctagttgactgttgcataccagggcttagaccaaggccctgacatgcagtaggtgcttaatatgttttgaggcaaggtcttgctctgttgcacatgctggagtgcagtggcacaatcgtaattcattgcagccttgaactcctgagctcaagtgatcctcctgcctcagcctcctgagtagctgggactacaggcatgcaccaccaagcttggctaatttaaaaaaaaaattatatagatagggacttgctatgttgcctaggctgatcttgaactcctaacctcaagcaatcctcccacctcggccttccaaagtgctgggattatagccatggagccgccacacccagccaatgtgccgaagaaagaaagaaaaacatgctcatcctttgagtcaggttcaaattttttctcctctttaacccccagtcactccagttataagtgatttttaactcttctcacactttaatgcatctggcaagaagatccacgtggtgttaggaacaatacaggaccttaaggatgggggaatcagcaggtgtcagcgtgccctgtatgctcagggcagctgtttccactggacattctccctttgcctctctgggcagcaactcctaggccagccgacctgctgtgtcgagtaaccaggatttctcaatcttggcatggttgccattttggaccagatcgttctttgttgtgggggctgccctgtacggcaaagaatgccgagcagcacttccagtctccacccacaggacgccagtagcaccctctaagttgtgagaactcaaaatgtccccagaggatgccagatgtcccctggggtggggacacaatcaccccaggttgagatccatggagccaggtctgtttgccaccaaggggtaaagctccattcccaccttaggagggctaggaggcagcatcgtggggccacagaaggcctgggtttgcagtcagaggacaggatgcacattccttcaagatacagacccagattgttgggcatctagttcttgggttttctgttgttgctgttccgttttgtctgtcttccctcctttgtttactagcagcctggaatttgccactttttctaaacgaagatttatggaacacttaccacacggctgacgctgcgcgaggctaaggttctaatacaccgcagctcacttaactctcgcaataccataaacgcacactgtttcatcttgaccctttcttgggaaggtgacagagaggtaggagggcaaacatcttgtgtgccccgtcccaagggtattactggtggaataatatccgccccccaccccagtttctaatttgctgtaggctgtgacgctgtggggcaagactaggagtcctgttgaaattaggaataagtgtgctgtgagggaagggctgccttattttagagcacagattttctgaatatctattttgacaggttcgatcctctccccttcctgccttccttctgtcgattttcaatgtcttgatggtgtcccacctgagtggcctttagagatgtgagttgtgaggcactggggaggcaggcacacgtcctccagcccaagactgcctaatttaacagggatttctgcattctggaacaagcctccattttccccaagcaggattactccagagggcaaaacacagcccaatagtatcacatttcctttctgctttagcaaaaataaccactgtctcattcatgggaaaaggccgccaaacaaatttgttactggaaccatttgtaacaacttctagtttgcactgccttggagcaagcacactttgtagaggagggatttgcagttacttgggcaacaaggtaaccactgatcattacaggaagcttcagaaaccgtgggaccagtgtagaagaatggagtatctgtccaaactaagaataaaaagaatgacacttgta

SEQ ID NO: 321669 - DNA, 4369 bp, Homo sapiens
tgctactcagggcacacagcctatggagcagccctgatctgcaaggagcggcatctctggcgctgctgtgcacagctgcttccatgaaagctgctgcctaacaccaccagctcacccttgaatctttgggcaaatccaagaactctcccaggctaagccccagtcttggggcttgcctgtcctgcatcatctggcaaccagcaaagggacaaggacagcggagatggtggcaattggcagagaggcaagacagcagagacagagaggcagcaattggtgagagacaagagacagcagttggcaagacagcaagagacggtgaagcagtctgtgattgaggatgtggtgaaactgagtggacagccaagtgtccatagtacagctgcctcgtgtgggacccactgctctaacgagccagcccccgacacagaagctgagcacccccaagctggggaacctagagagacctgcacccgggtcccacgtggaagactggctggtgccattttgtcttctgtggatgggtgagagtcccctttgcaccctcccccagtaatatcaggcacaaaggaagggcactacaaccacaaccaatatcagtaaagctttggaagacctctgctacctatttaaaataatcaacactcagccagaagagattaccacagttccagagacaatgctggcacaaggcttccagcccatcctgtccactgacacggagaatgaaatcgtcctgcctctgggctccttagatcaggtatccagagatttttactcctccagtgccaggcagggcctacgtccataaactcagcaggaagtagttacggaaaacagatctccgcccttctgcagcccccttaagattaaggaggagtatctaatctctgaagggggaatgaggtaggaggtgggactcaactctggaagtggggctcaggcactcagaccaaactgagcactagctaaaataggtccagggcagatgctagtttccataggacacaccgacctgtgtcaagtcagttcaccatggctctggcagcacccagaagttaccaccctcaccctggaaatgtctgcataaactgccccttcatttgcatataattaaaagtggatacaaataccactgcagaactgcctctgagctgctactgtgggcgcacagcctgtagggcagccctgctttgcaaggagcagcgcctctgctgctgctgtgcacagccggccgcttcaataaaagttgctaacaccactggcttgcccttgagttccttcctgggcaaagctaagaaccctcccgggctatgcttcaatcttagggctcgcctgtcctgcatcactgggatcatctcccagtaaactagccacacttacatccatgtgtcagggacatttctggagaaagcagcccaggacactgttgaataaaacacacaatagtctctgtggtcttctccaccccaccccacaccaggcaccctcagcttgattctcctttttaattgcctgtaagcagggaagcacaatgttttcacattctttgtaaggcctttgttctactaaaatctaacctcagagcacaattttaaactagatgaaagagttgctgcgcctgaagcactgcaaacacctcctcaccacacatgtgcactcaccctggacaccctcactcaccctgacaccctcactcctcaccctggacaccctcactcaccccagacaccgtcactcctcaccctggacacctcactctgcaccctggacaccctcactcaccctggacacgttcactcaccctgacaccctcactcaccctggacaccctcactcaccctggataccctcactcctcaccctggacaccctcactcaccctggataccctcactcctcaccctggacactctcactcaccctgacaccctcaatcctcaccctggactccctcactcctcaccctggactccctcactcctcaccctggacaccctcactcctcatcctggacaccctcactcaacctggacaccctcactcctcaccctgacaccctcactcctcaccctggacaccctcactcctcaccctgacaccctcactcctcaccctggcaccctcagtcaccctgacaccctcactcctcaccctgacaccctcaagtcttcacctccctggctgcagcctgggacacgctttccctaacttctgaaggctcagtcctcctcaagccaatctcatctcaaattgcacctcctcagagaggtcttccataaccgcccttataaagcaggattctttcaccaataccccttcccacatggcactgtctcacagcactcctctaaaagtctgtttacttccttgacaatctgtcttccttataaggggaggttctgtaaaagccaagactctctctgtctagttgactgttgcataccagggcttagaccaaggccctgacatgcagtaggtgcttaatatgttttgaggcaaggtcttgctctgttgcacatgctggagtgcagtggcacaatcgtaattcattgcagccttgaactcctgagctcaagtgatcctcctgcctcagcctcctgagtagctgggactacaggcatgcaccaccaagcttggctaatttaaaaaaaaaattatatagatagggacttgctatgttgcctaggctgatcttgaactcctaacctcaagcaatcctcccacctcggccttccaaagtgctgggattatagccatggagccgccacacccagccaatgtgccgaagaaagaaagaaaaacatgctcatcctttgagtcaggttcaaattttttctcctctttaacccccagtcactccagttataagtgatttttaactcttctcacactttaatgcatctggcaagaagatccacgtggtgttaggaacaatacaggaccttaaggatgggggaatcagcaggtgtcagcgtgccctgtatgctcagggcagctgtttccactggacattctccctttgcctctctgggcagcaactcctaggccagccgacctgctgtgtcgagtaaccaggatttctcaatcttggcatggttgccattttggaccagatcgttctttgttgtgggggctgccctgtacggcaaagaatgccgagcagcacttccagtctccacccacaggacgccagtagcaccctctaagttgtgagaactcaaaatgtccccagaggatgccagatgtcccctggggtggggacacaatcaccccaggttgagatccatggagccaggtctgtttgccaccaaggggtaaagctccattcccaccttaggagggctaggaggcagcatcgtggggccacagaaggcctgggtttgcagtcagaggacaggatgcacattccttcaagatacagacccagattgttgggcatctagttcttgggttttctgttgttgctgttccgttttgtctgtcttccctcctttgtttactagcagcctggaatttgccactttttctaaacgaagatttatggaacacttaccacacggctgacgctgcgcgaggctaaggttctaatacaccgcagctcacttaactctcgcaataccataaacgcacactgtttcatcttgaccctttcttgggaaggtgacagagaggtaggagggcaaacatcttgtgtgccccgtcccaagggtattactggtggaataatatccgccccccaccccagtttctaatttgctgtaggctgtgacgctgtggggcaagactaggagtcctgttgaaattaggaataagtgtgctgtgagggaagggctgccttattttagagcacagattttctgaatatctattttgacaggttcgatcctctccccttcctgccttccttctgtcgattttcaatgtcttgatggtgtcccacctgagtggcctttagagatgtgagttgtgaggcactggggaggcaggcacacgtcctccagcccaagactgcctaatttaacagggatttctgcattctggaacaagcctccattttccccaagcaggattactccagagggcaaaacacagcccaatagtatcacatttcctttctgctttagcaaaaataaccactgtctcattcatgggaaaaggccgccaaacaaatttgttactggaaccatttgtaacaacttctagtttgcactgccttggagcaagcacactttgtagaggagggatttgcagttacttgggcaacaaggtaaccactgatcattacaggaagcttcagaaaccgtgggaccagtgtagaagaatggagtatctgtccaaactaagaataaaaagaatgacacttgta

SEQ ID NO: 321670 - DNA, 6711 bp, Homo sapiens
tgctactcagggcacacagcctatggagcagccctgatctgcaaggagcggcatctctggcgctgctgtgcacagctgcttccatgaaagctgctgcctaacaccaccagctcacccttgaatctttgggcaaatccaagaactctcccaggctaagccccagtcttggggcttgcctgtcctgcatcatctggcaaccagcaaagggacaaggacagcggagatggtggcaattggcagagaggcaagacagcagagacagagaggcagcaattggtgagagacaagagacagcagttggcaagacagcaagagacggtgaagcagtctgtgattgaggatgtggtgaaactgagtggacagccaagtgtccatagtacagctgcctcgtgtgggacccactgctctaacgagccagcccccgacacagaagctgagcacccccaagctggggaacctagagagacctgcacccgggtcccacgtggaagactggctggtgccattttgtcttctgtggatgggtgagagtcccctttgcaccctcccccagtaatatcaggtaagctaggaaataaaagcctttggctaagcggtcagttccccacggtttaggtgccttgaagcacattcttgccaccccttcacctggttctttctcctctgactccattttattgctccactttggtttcattttcagtcctaacatgtatgtcttgtttggagtcttatgtttgctttcgactttctgttaattgtatttgggcaattgtttaaggcaggacacttggttgtgagaggtcccctgttgtgttgactctgggataccagagtcacgttgtcacgttgttctatgttctgtaacctggtcttgggttcacggggttggccgcccactgggtaccccagggtttttggcactgctgtgcacagctgctttggcgagggcatccttgttggctgaaacgcaggcattttgggttctcagcatcggtattataggccaccctccagatgctctggggtttttagcactgacatttcctctaggattgtgggttatacccctttcgctaggcgaatattggtcttgtctttttccaccctgaagttaggagtattattttcctaatagccaattgcaagctccttcctgtgtactgtcttataactcccttgcctaagctgctcttggtcaaaggaattgggagctcccaggctcctggcctggcagtcagccacctacagtggtagacaagtggccagcccaatatttttttcagtatctccactactgggtaggttcttcagcaagtcagagcctctgaggtctccccttgggcaacgctgtttacccctttcccttcctccatttgtttagccccctctccacccaactctagatctctatggaatttaggctccacattcgactgcccattcgtagctcataatccatttttataacaccttgctatctatatttacacctttaaagaacacgggaatttaagagggaagagtaactaggcttttgctaaacttgggctaataaaaccctctgtagagagatccttaatataggcatggggacaacaaggagtatcccaagggactcgccgctagggtgtcttttaagctattggagcaaattcaaatttggcttaaagaaaaagaaactcattttgtattgcaacaccatttgggttaaatacaagttagacgacgaatatatctggcctaaacatggttctatatactatagtgatattttacgattaggcttattttgtaaaagagaaggaaaatgggaagagatcccttatgtacaggcttttatggctctatactggatcacgttacttccaggcattagaatgccatgcataagggatccccacctagctgctccccatagaaagttcataagcctccccagagtctcttcagtcccccagtcctgagtgggggttctcgccaattccctaatgagattccaccccaatatcatcaggcacctttcccccttatccaactagccctagcctataccctctgctgcccaagaaaatgagcccaaccagtacaccaggagtggggctccatatcagcccctaaggtcaagcctgtgtccactgtggaaagtagttgatggaaatgagggaacactcaaagagtacatatgccactttccatgtctaattagaccttataaaaggaaagaattggccagttttcagataaaccagaaaagcttatacaagagtttgttacgttgactatgttcttcaaattgccacgatttacaaatattgtcatccgcttgctgtgctgtggggaaaaaaaagtagaggaaaaagtgtgtggttaagccagtcaattatgacaaggttaaagaagtaactcggggaaaagatgaaaatcccgctctgtttcagggtcttttagttgaagcactcaggaaatatactaatgcaggcccagacaccccagaagggcaagctctcctgggtatacattttctcattcaatcttctcctgacattaggaggaatctacaaaaagcagcaatgggaccttcaagtcctatgaaacgacgcttaaacatagcctttaaagtttacaacaacagggacagggcaaaagaggggagtaaaaagaaatagccaaaaagtacaattgttaacagtgactttaagcctccttgcccctcaggattactcatcttgagaaaatgttacaaaattagcatctgggatgcctagacaagacttgatgcctgacttgctgacccctgggccagaatcactgcgcctactatacgcaaaagggcccctggcaatgcaaatgtcctaactgctctggtgagagagaacaataacaacaaaaagcttccatcaatactagagctaaccttctcctactagccccagtgagctgcttagctcaagtaagtttactgtcccagaggacagctttccacagtggcagataagcagccgcctgaacatttttctttggtatttccaccactgagtgtgctctccagtggcgtggggactccagaatctccttttgagcaatgcagtttgcttcctcccctttttagttgatgctatgggattccctgtcctgccttttcctgttttccatacctatcggggcaaacaaaatttggccaggtagatgggtcccagttctgtaaataacttgaatccagttgtcttgtataggtcattttatttaatatgtttttgggtatatgtacatgtattgtgatgtgtgttacatctagcgtgctgtcaaactggcttatagataaaagaacactcatacattcaacaaataagactactgaaagcttattagtttgaagagaatcttgtatcttctaaaatttaactttaggatttttacctaggtaagtcactgatgttcataggctttaaaatggttaaaatggctttaaatggtgaccagctttgcatggtaccttggttctcggtgatctagataaagttaaaagtgaaataattaaatacacgtaaatgggatatgcttaatgtgtggtttaaaatcataaaatggtagaatggttctcagctatagaatgacaatgtctagtgtgaagttcatgacttcttccttcctaggtttccataaaatgtgctaaagaaatgtattctttattgagaaaaaattttttgtctaatccggaagttactaaatgggaggttcaaaacatgagtgaaccagtgagtagaaaagagagatgtaaagaatattatgaatagaaaatgtattttttgtttgttttgcaaggaaggatataaagaaagagtaattttatatgtggaggaatcctgtatagtaaattccctatcctagagtaaaataactttaagaaagaggtagtatagaacatgtcaggaaattcagctatgttgtagatggtctgtgtaagtcatctgcacagtgcatgagtgtggaggtgggcgggcactcattggcccttgaactccttttgagcagtatggaagccaagaactagaagccaggaaatggggttgtaaaactgatttgtctatggattttatgtgttgagctgctgtggtcttggcttgtagtaattacctatatgaaccttcccccctcccctttagaatttaggacaggttcaaaaggccctccaatataaaaataaaatactgtccttccccacaaaggaaaaaatagctccccggttcaaccaggagacttagtcttgctaaaaccttaaagacagggtaaagacagggataccccaagaatcaattacaatgaaatggaaggggccttatcaggtattgttaagtacccccactgctgttaaacttcagggaacacctacttgggcacacagatccaggactaaacctgtttcttatgagtcacaggcacaaaggaagggcactacaaccacaaccaatatcagtaaagctttggaagacctctgctacctatttaaaataatcaacactcagccagaagaggtaatgtaatgctgtagatgggaataggagcattgatcttgctcttcttcctgactgtagtacttcctttctatggctttaaccagccacctcctcctgggaaacatctcctgtgggcttgttgggtatagaagctactctaagacccaaccagataccatgatgccactgttaattctgtttgctcttctaattaacctaagctagtgtgtatgtggacagggagggtggacaaaattctacagtaaatatttcaaaaattatagcatcatagaatcatctttatggctgccagatttgtcatcaacacccccaggatagacagtttcatcttccgacctatctggaaaatctcaggaccatgtccccagacctcctaactaaccatagcaccccaaaatacccaaacccctattgtgaagtggaactcttccccacttagtggatcccccctggaccctgctgtccccctgccctgaccactattatcggaatctgggaagttgggcatctatatctccagtgcactcataactctaacatttgcatccactcttgcattaatgacacaaaagtggaagcttccctgcgatgctctggtccaactctagttgccaagtttccaagaccacggggaggtaaatgagattccatttgtgagtgaaaagaccatatatggtaccttctcccggatgggaacatacaaaggaaaaacaactgcctgatctgggaaggtgacagtactaccttcttctagaaaacaaagattgttcaaccaccaccatgagaacaggtggaaaatatctctatagacccaacctggcaatgaagtataaacatcgcaccccgcagggcttctcttggtgccctagttgggttcatttttgtttgtgactatgaatgggaagaagtcacaccctgtaaccactccaactccctaaggagtcacctcttctttaaggaatagctttcccttgtatctaaaaaacttggaactgacatgaatgaacgttggccactcttacccctccaggggtcacaatctataacgcctaggacccaagaatatcagaaataagtaagcaataaaactaattctggcaggaatcagggtggcaataggactagcagcaccctggggtggctttgcctaccatgagttaacgctaaagaacttggctcaaatcctagaatccttagccaccaacggagatcaggcattaaagagaattcaagagttccccagactctggaaaatgtagttgttgataacagactagcattggattatttactagctgaacaaggtggggtcttgtgcagttattaataaaacctgctgcacatatattaactctggacaggttgaggttaacattcaaaagatctatgagcaagctacctagttacatagatataaccagggcactgcccccaactatatctggtcaaccatcaaaagtgccttcccaagtctcacctgtttttcacctcttctaggacctttgacaactgtcttgttacaaatgtttggtccttgcttctttaacctcttagtaaagtttgtgtattctagattaccacagttccagagacaatgctggcacaaggcttccagcccatcctgtccactgacacggagaatgaaatcgtcctgcctctgggctccttagatcagactggaaatctcaaaaacacacgttcagcaccaagattttcagcagcaccgcctcagaatgagacccctagaaaaaactgcgtgttttccacttgcccaacacgaggagtttttggaacacgacctgcttgaggtggagattttctagatgggcaaagagaaggaaacacttaacctaggaagagtatttaggaagaagaaagaacacagcctttctgcacaggaaaccgccgagcagaggggcatctggcctctgcagtggcctccaaatagagtccaatggctggggccagcgtggctgcttaaaggggactcaagggatataataaaatgcagattctcaggtcctagtgcagacaggctcacccaataagtctggactgcatatgggaatctctatttctaggcccttctgcaaggtattcctgctctttccaggaaccatcggcagctggtttggggaaagaagcaacgactccaagtgtgacctgtgagctg

SEQ ID NO: 321671 - DNA, 2886 bp, Homo sapiens
tgctactcagggcacacagcctatggagcagccctgatctgcaaggagcggcatctctggcgctgctgtgcacagctgcttccatgaaagctgctgcctaacaccaccagctcacccttgaatctttgggcaaatccaagaactctcccaggctaagccccagtcttggggcttgcctgtcctgcatcatctggcaaccagcaaagggacaaggacagcggagatggtggcaattggcagagaggcaagacagcagagacagagaggcagcaattggtgagagacaagagacagcagttggcaagacagcaagagacggtgaagcagtctgtgattgaggatgtggtgaaactgagtggacagccaagtgtccatagtacagctgcctcgtgtgggacccactgctctaacgagccagcccccgacacagaagctgagcacccccaagctggggaacctagagagacctgcacccgggtcccacgtggaagactggctggtgccattttgtcttctgtggatgggtgagagtcccctttgcaccctcccccagtaatatcaggtaagctaggaaataaaagcctttggctaagcggtcagttccccacggtttaggtgccttgaagcacattcttgccaccccttcacctggttctttctcctctgactccattttattgctccactttggtttcattttcagtcctaacatgtatgtcttgtttggagtcttatgtttgctttcgactttctgttaattgtatttgggcaattgtttaaggcaggacacttggttgtgagaggtcccctgttgtgttgactctgggataccagagtcacgttgtcacgttgttctatgttctgtaacctggtcttgggttcacggggttggccgcccactgggtaccccagggtttttggcactgctgtgcacagctgctttggcgagggcatccttgttggctgaaacgcaggcattttgggttctcagcatcggtattataggccaccctccagatgctctggggtttttagcactgacatttcctctaggattgtgggttatacccctttcgctaggcgaatattggtcttgtctttttccaccctgaagttaggagtattattttcctaatagccaattgcaagctccttcctgtgtactgtcttataactcccttgcctaagctgctcttggtcaaaggaattgggagctcccaggctcctggcctggcagtcagccacctacagtggtagacaagtggccagcccaatatttttttcagtatctccactactgggtaggttcttcagcaagtcagagcctctgaggtctccccttgggcaacgctgtttacccctttcccttcctccatttgtttagccccctctccacccaactctagatctctatggaatttaggctccacattcgactgcccattcgtagctcataatccatttttataacaccttgctatctatatttacacctttaaagaacacgggaatttaagagggaagagtaactaggcttttgctaaacttgggctaataaaaccctctgtagagagatccttaatataggcatggggacaacaaggagtatcccaagggactcgccgctagggtgtcttttaagctattggagcaaattcaaatttggcttaaagaaaaagaaactcattttgtattgcaacaccatttgggttaaatacaagttagacgacgaatatatctggcctaaacatggttctatatactatagtgatattttacgattaggcttattttgtaaaagagaaggaaaatgggaagagatcccttatgtacaggcttttatggctctatactggatcacgttacttccaggcattagaatgccatgcataagggatccccacctagctgctccccatagaaagttcataagcctccccagagtctcttcagtcccccagtcctgagtgggggttctcgccaattccctaatgagattccaccccaatatcatcaggcacctttcccccttatccaactagccctagcctataccctctgctgcccaagaaaatgagcccaaccagtacaccaggagtggggctccatatcagcccctaaggtcaagcctgtgtccactgtggaaagtagttgatggaaatgagggaacactcaaagagtacatatgccactttccatgtctaattagaccttataaaaggaaagaattggccagttttcagataaaccagaaaagcttatacaagagtttgttacgttgactatgttcttcaaattgccacgatttacaaatattgtcatccgcttgctgtgctgtggggaaaaaaaagtagaggaaaaagtgtgtggttaagccagtcaattatgacaaggttaaagaagtaactcggggaaaagatgaaaatcccgctctgtttcagggtcttttagttgaagcactcaggaaatatactaatgcaggcccagacaccccagaagggcaagctctcctgggtatacattttctcattcaatcttctcctgacattaggaggaatctacaaaaagcagcaatgggaccttcaagtcctatgaaacgacgcttaaacatagcctttaaagtttacaacaacagggacagggcaaaagaggggagtaaaaagaaatagccaaaaagtacaattgttaacagtgactttaagcctccttgcccctcaggattactcatcttgagaaaatgttacaaaattagcatctgggatgcctagacaagacttgatgcctgacttgctgccgaccgaggactgaccactcgacccggttctgggttgacaatatccagacggaggagatctctgaagtgaagaggatgcaagaatgacgtct

SEQ ID NO: 321672 - DNA, 483 bp, Homo sapiens
gtctcattcatgggaaaaggccgccaaacaaatttgttactggaaccatttgtaacaacttctagtttgcactgccttggagcaagcacactttgtagaggagggatttgcagttacttgggcaacaaggtaaccactgatcattacaggaagcttcagaaaccgtgggaccagtgtagaagaatggagtatctgtccaaactaagaataaaaagaatgacacttgtatattttgtatgtctttttcactttgcctttctagtaattcatttttcttgatatttacaccttgtggccctgtgatagactggaaatctcaaaaacacacgttcagcaccaagattttcagcagcaccgcctcagaatgagacccctagaaaaaactgcgtgttttccacttgcccaacacgaggagtttttggaacacgacctgcttgaggtggagattttctagatgggcaaagagaaggaaacacttaacct

SEQ ID NO: 321673 - DNA, 3338 bp, Homo sapiens
  misc_feature (18)..(18): n is a, c, g, or t
tgctatgttgctaggctngatcttgaactcctaacctcaagcaatcctcccacctcggccttccaaagtgctgggattataggcatggagctgccacacccagccaatgtgccgaagaaagaaagaaaaacatgctcatcctttgagtcaggttcgaattttttctcctctttaacccccagtcactccagttataagtgatttttaactcttctcacactttaatgcaactggcttgcccttgagttccttcctgggcaaagctaagaaccctcccgggctatgcttcaatcttagggctcgcctgtcctgcatcactgggatcatctcccagtaaactagccacacttacatccatgtgtcagggacatttctggagaaagcagcccaggacactgttgaataaaacacacaatagtctctgtggtcttctccaccccaccccacaccaggcaccctcagcttgattctcctttttaattgcctgtaagcagggaagcacaatgttttcacattctttgtaaggcctttgttctactaaaatctaacctcagagcacaattttaaactagatgaaagagttgctgcgcctgaagcactgcaaacacctcctcaccacacatgtgcactcaccctggacaccctcactcaccctgacaccctcactcctcaccctggacaccctcactcaccccagacaccgtcactcctcaccctggacacctcactctgcaccctggacaccctcactcaccctggacacgttcactcaccctgacaccctcactcaccctggacaccctcactcaccctggataccctcactcctcaccctggacaccctcactcaccctggataccctcactcctcaccctggacactctcactcaccctgacaccctcaatcctcaccctggactccctcactcctcaccctggactccctcactcctcaccctggacaccctcactcctcatcctggacaccctcactcaacctggacaccctcactcctcaccctgacaccctcactcctcaccctggacaccctcactcctcaccctgacaccctcactcctcaccctggcaccctcagtcaccctgacaccctcactcctcaccctgacaccctcaagtcttcacctccctggctgcagcctgggacacgctttccctaacttctgaaggctcagtcctcctcaagccaatctcatctcaaattgcacctcctcagagaggtcttccataaccgcccttataaagcaggattctttcaccaataccccttcccacatggcactgtctcacagcactcctctaaaagtctgtttacttccttgacaatctgtcttccttataaggggaggttctgtaaaagccaagactctctctgtctagttgactgttgcataccagggcttagaccaaggccctgacatgcagtaggtgcttaatatgttttgaggcaaggtcttgctctgttgcacatgctggagtgcagtggcacaatcgtaattcattgcagccttgaactcctgagctcaagtgatcctcctgcctcagcctcctgagtagctgggactacaggcatgcaccaccaagcttggctaatttaaaaaaaaaattatatagatagggacttgctatgttgcctaggctgatcttgaactcctaacctcaagcaatcctcccacctcggccttccaaagtgctgggattatagccatggagccgccacacccagccaatgtgccgaagaaagaaagaaaaacatgctcatcctttgagtcaggttcaaattttttctcctctttaacccccagtcactccagttataagtgatttttaactcttctcacactttaatgcatctggcaagaagatccacgtggtgttaggaacaatacaggaccttaaggatgggggaatcagcaggtgtcagcgtgccctgtatgctcagggcagctgtttccactggacattctccctttgcctctctgggcagcaactcctaggccagccgacctgctgtgtcgagtaaccaggatttctcaatcttggcatggttgccattttggaccagatcgttctttgttgtgggggctgccctgtacggcaaagaatgccgagcagcacttccagtctccacccacaggacgccagtagcaccctctaagttgtgagaactcaaaatgtccccagaggatgccagatgtcccctggggtggggacacaatcaccccaggttgagatccatggagccaggtctgtttgccaccaaggggtaaagctccattcccaccttaggagggctaggaggcagcatcgtggggccacagaaggcctgggtttgcagtcagaggacaggatgcacattccttcaagatacagacccagattgttgggcatctagttcttgggttttctgttgttgctgttccgttttgtctgtcttccctcctttgtttactagcagcctggaatttgccactttttctaaacgaagatttatggaacacttaccacacggctgacgctgcgcgaggctaaggttctaatacaccgcagctcacttaactctcgcaataccataaacgcacactgtttcatcttgaccctttcttgggaaggtgacagagaggtaggagggcaaacatcttgtgtgccccgtcccaagggtattactggtggaataatatccgccccccaccccagtttctaatttgctgtaggctgtgacgctgtggggcaagactaggagtcctgttgaaattaggaataagtgtgctgtgagggaagggctgccttattttagagcacagattttctgaatatctattttgacaggttcgatcctctccccttcctgccttccttctgtcgattttcaatgtcttgatggtgtcccacctgagtggcctttagagatgtgagttgtgaggcactggggaggcaggcacacgtcctccagcccaagactgcctaatttaacagggatttctgcattctggaacaagcctccattttccccaagcaggattactccagagggcaaaacacagcccaatagtatcacatttcctttctgctttagcaaaaataaccactgtctcattcatgggaaaaggccgccaaacaaatttgttactggaaccatttgtaacaacttctagtttgcactgccttggagcaagcacactttgtagaggagggatttgcagttacttgggcaacaaggtaaccactgatcattacaggaagcttcagaaaccgtgggaccagtgtagaagaatggagtatctgtccaaactaagaataaaaagaatgacacttgta

SEQ ID NO: 321674 - DNA, 5135 bp, Homo sapiens
tgctactcagggcacacagcctatggagcagccctgatctgcaaggagcggcatctctggcgctgctgtgcacagctgcttccatgaaagctgctgcctaacaccaccagctcacccttgaatctttgggcaaatccaagaactctcccaggctaagccccagtcttggggcttgcctgtcctgcatcatctggcaaccagcaaagggacaaggacagcggagatggtggcaattggcagagaggcaagacagcagagacagagaggcagcaattggtgagagacaagagacagcagttggcaagacagcaagagacggtgaagcagtctgtgattgaggatgtggtgaaactgagtggacagccaagtgtccatagtacagctgcctcgtgtgggacccactgctctaacgagccagcccccgacacagaagctgagcacccccaagctggggaacctagagagacctgcacccgggtcccacgtggaagactggctggtgccattttgtcttctgtggatgggtgagagtcccctttgcaccctcccccagtaatatcaggtaagctaggaaataaaagcctttggctaagcggtcagttccccacggtttaggtgccttgaagcacattcttgccaccccttcacctggttctttctcctctgactccattttattgctccactttggtttcattttcagtcctaacatgtatgtcttgtttggagtcttatgtttgctttcgactttctgttaattgtatttgggcaattgtttaaggcaggacacttggttgtgagaggtcccctgttgtgttgactctgggataccagagtcacgttgtcacgttgttctatgttctgtaacctggtcttgggttcacggggttggccgcccactgggtaccccagggtttttggcactgctgtgcacagctgctttggcgagggcatccttgttggctgaaacgcaggcattttgggttctcagcatcggtattataggccaccctccagatgctctggggtttttagcactgacatttcctctaggattgtgggttatacccctttcgctaggcgaatattggtcttgtctttttccaccctgaagttaggagtattattttcctaatagccaattgcaagctccttcctgtgtactgtcttataactcccttgcctaagctgctcttggtcaaaggaattgggagctcccaggctcctggcctggcagtcagccacctacagtggtagacaagtggccagcccaatatttttttcagtatctccactactgggtaggttcttcagcaagtcagagcctctgaggtctccccttgggcaacgctgtttacccctttcccttcctccatttgtttagccccctctccacccaactctagatctctatggaatttaggctccacattcgactgcccattcgtagctcataatccatttttataacaccttgctatctatatttacacctttaaagaacacgggaatttaagagggaagagtaactaggcttttgctaaacttgggctaataaaaccctctgtagagagatccttaatataggcatggggacaacaaggagtatcccaagggactcgccgctagggtgtcttttaagctattggagcaaattcaaatttggcttaaagaaaaagaaactcattttgtattgcaacaccatttgggttaaatacaagttagacgacgaatatatctggcctaaacatggttctatatactatagtgatattttacgattaggcttattttgtaaaagagaaggaaaatgggaagagatcccttatgtacaggcttttatggctctatactggatcacgttacttccaggcattagaatgccatgcataagggatccccacctagctgctccccatagaaagttcataagcctccccagagtctcttcagtcccccagtcctgagtgggggttctcgccaattccctaatgagattccaccccaatatcatcaggcacctttcccccttatccaactagccctagcctataccctctgctgcccaagaaaatgagcccaaccagtacaccaggagtggggctccatatcagcccctaaggtcaagcctgtgtccactgtggaaagtagttgatggaaatgagggaacactcaaagagtacatatgccactttccatgtctaattagaccttataaaaggaaagaattggccagttttcagataaaccagaaaagcttatacaagagtttgttacgttgactatgttcttcaaattgccacgatttacaaatattgtcatccgcttgctgtgctgtggggaaaaaaaagtagaggaaaaagtgtgtggttaagccagtcaattatgacaaggttaaagaagtaactcggggaaaagatgaaaatcccgctctgtttcagggtcttttagttgaagcactcaggaaatatactaatgcaggcccagacaccccagaagggcaagctctcctgggtatacattttctcattcaatcttctcctgacattaggaggaatctacaaaaagcagcaatgggaccttcaagtcctatgaaacgacgcttaaacatagcctttaaagtttacaacaacagggacagggcaaaagaggggagtaaaaagaaatagccaaaaagtacaattgttaacagtgactttaagcctccttgcccctcaggattactcatcttgagaaaatgttacaaaattagcatctgggatgcctagacaagacttgatgcctgacttgctgacccctgggccagaatcactgcgcctactatacgcaaaagggcccctggcaatgcaaatgtcctaactgctctggtgagagagaacaataacaacaaaaagcttccatcaatactagagctaaccttctcctactagccccagtgagctgcttagctcaagtaagtttactgtcccagaggacagctttccacagtggcagataagcagccgcctgaacatttttctttggtatttccaccactgagtgtgctctccagtggcgtggggactccagaatctccttttgagcaatgcagtttgcttcctcccctttttagttgatgctatgggattccctgtcctgccttttcctgttttccatacctatcggggcaaacaaaatttggccaggtagatgggtcccagttctgtaaataacttgaatccagttgtcttgtataggtcattttatttaatatgtttttgggtatatgtacatgtattgtgatgtgtgttacatctagcgtgctgtcaaactggcttatagataaaagaacactcatacattcaacaaataagactactgaaagcttattagtttgaagagaatcttgtatcttctaaaatttaactttaggatttttacctaggtaagtcactgatgttcataggctttaaaatggttaaaatggctttaaatggtgaccagctttgcatggtaccttggttctcggtgatctagataaagttaaaagtgaaataattaaatacacgtaaatgggatatgcttaatgtgtggtttaaaatcataaaatggtagaatggttctcagctatagaatgacaatgtctagtgtgaagttcatgacttcttccttcctaggtttccataaaatgtgctaaagaaatgtattctttattgagaaaaaattttttgtctaatccggaagttactaaatgggaggttcaaaacatgagtgaaccagtgagtagaaaagagagatgtaaagaatattatgaatagaaaatgtattttttgtttgttttgcaaggaaggatataaagaaagagtaattttatatgtggaggaatcctgtatagtaaattccctatcctagagtaaaataactttaagaaagaggtagtatagaacatgtcaggaaattcagctatgttgtagatggtctgtgtaagtcatctgcacagtgcatgagtgtggaggtgggcgggcactcattggcccttgaactccttttgagcagtatggaagccaagaactagaagccaggaaatggggttgtaaaactgatttgtctatggattttatgtgttgagctgctgtggtcttggcttgtagtaattacctatatgaaccttcccccctcccctttagaatttaggacaggttcaaaaggccctccaatataaaaataaaatactgtccttccccacaaaggaaaaaatagctccccggttcaaccaggagacttagtcttgctaaaaccttaaagacagggtaaagacagggataccccaagaatcaattacaatgaaatggaaggggccttatcaggtattgttaagtacccccactgctgttaaacttcagggaacacctacttgggcacacagatccaggactaaacctgtttcttatgagtcacaggcacaaaggaagggcactacaaccacaaccaatatcagtaaagctttggaagacctctgctacctatttaaaataatcaacactcagccagaagagattaccacagttccagagacaatgctggcacaaggcttccagcccatcctgtccactgacacggagaatgaaatcgtcctgcctctgggctccttagatcagactggaaatctcaaaaacacacgttcagcaccaagattttcagcagcaccgcctcagaatgagacccctagaaaaaactgcgtgttttccacttgcccaacacgaggagtttttggaacacgacctgcttgaggtggagattttctagatgggcaaagagaaggaaacacttaacctaggaagagtatttaggaagaagaaagaacacagcctttctgcacaggaaaccgccgagcagaggggcatctggcctctgcagtggcctccaaatagagtccaatggctggggccagcgtggctgcttaaaggggactcaagggatataataaaatgcagattctcaggtcctagtgcagacaggctcacccaataagtctggactgcatatgggaatctctatttctaggcccttctgcaaggtattcctgctctttccaggaaccatcggcagctggtttggggaaagaagcaacgactccaagtgtgacctgtgagctg

SEQ ID NO: 321675 - DNA, 901 bp, Homo sapiens
ttttttttaccacttcgctaatacttttattttctgtccatattcaagcgtgttgagattatctagtttcctaaagtaacaaatataatatatccactccaccacacatttcagcatttaatactcttgtttttccttatgtactagtgacatccttaatacagaaatcatcaatagaaaaatgcagtgtggacattcaacagagcaggaataaaacaacaggtaattgtgtggcttcaatttcctaagaataactgttaatatttggtagatttcatgtgttaccttaggcacaattcataacaatccatatgttaagatattcttatcattctgcttttctggattagaaaattgagacataaaaagattcaacaacttggctgagggtcacataagcaccaagtgatgaggctgggaattatatgtaagtggtctgacttatgagcctaaggttttaaccagcaaggcatgctgcctcatgaggagcctctgctaggatactccactgttgataggaaatatgtgaaatatctgattattttagtgagctgttaagtttggtctgaagttaattgatagaacttaaacatagaatgaattctttactatttattatatttcctcaccatgcagccacattagtcttgttccagtgtgtgttaataaaaaaaggtgactactgttgagtgactatagtggaatatgatctgtgtgcacattctcacagaatggaagttttaagaaaacctgaaagtccttctggaaaattctatccaatagatcacattaagtaggtaaatacatcgtttagcaattggaaattttcttataattttttctccatggtatttcttattaatttagtgaaaataattatttgctatgcattttgtgcatc

SEQ ID NO: 321676 - DNA, 722 bp, Homo sapiens
agtttgttcttacacacaagtttaatgccaccttcctctgtctgccatggaccaacaagcaatatatgctgagttaaacttacccacagactcaggcccagaaagttcttcaccttcatctcttcctcgggatgtctgtcagggttcaccttggcatcaatttgccctgaaacttagctgtgctgggattattctccttgtcttggttgttactgggttgagtgtttcagtgacatccttaatacagaaatcatcaatagaaaaatgcagtgtggacattcaacagagcaggaataaaacaacagagagaccgggtctcttaaactgcccaatatattggcagcaactccgagagaaatgcttgttattttctcacactgtcaacccttggaataacagtctagctgattgttccaccaaagaatccagcctgctgcttattcgagataaggatgaattgatacacacacagaacctgatacgtgacaaagcaattctgttttggattggattaaatttttcattatcagaaaagaactggaagtggataaacggctcttttttaaattctaatgacttagaaattagaggtgatgctaaagaaaacagctgtatttccatctcacagacatctgtgtattctgagtactgtagtacagaaatcagatggatctgccaaaaagaactaacacctgtgagaaataaagtgtatcctgactctt

SEQ ID NO: 321677 - DNA, 815 bp, Homo sapiens
agtttgttcttacacacaagtttaatgccaccttcctctgtctgccatggaccaacaagcaatatatgctgagttaaacttacccacagactcaggcccagaaagttcttcaccttcatctcttcctcgggatgtctgtcagggttcaccttggcatcaatttgccctgaaacttagctgtgctgggattattctccttgtcttggttgttactgggttgagtgtttcagtgacatccttaatacagaaatcatcaatagaaaaatgcagtgtggacattcaacagagcaggaataaaacaacagagagaccgggtctcttaaactgcccaatatattggcagcaactccgagagaaatgcttgttattttctcacactgtcaacccttggaataacagtctagctgattgttccaccaaagaatccagcctgctgcttattcgagataaggatgaattgatacacacacagaacctgatacgtgacaaagcaattctgttttggattggattaaatttttcattatcagaaaagaactggaagtggataaacggctcttttttaaattctaatgacttagaaattagaggtgatgctaaagaaaacagctgtatttccatctcacagacatctgtgtattctgagtactgtagtacagaaatcagatggatctgccaaaaagaactaacacctgtgagaaataaagtgtatcctgactcttgactatgaatcccatctcaatttatttgcttcccattactgatctctgtacttgtagctgcacatactattggtactacctaatagtgccaca

SEQ ID NO: 321678 - DNA, 2302 bp, Homo sapiens
ggcaaggttgtcagagaatttattttgtttcttgcccacacagataatatccacatacacattcactggctcttgtgagcaaatgaatttaaaaatagacagcagttgttctaattagtgggagccatgtactcaccagttaaaatgggccacaacaaacaagactgagagcatgtacttatcttgctttttcaccaacagtggtttggttacctagttttattcacttaattgtgcatgcttacataaactttaaactacatttaaaactagcaaatctgcataccaaattatgtataacgtagattgaatttttatgaacttaaagtgagttaattgtataatgtaatattgtttaaaatatgtaaaaaccaagcatttccgcttggtccataattctatttgatattttaaaattctcatttaaaaattatattgctatcattcagcatgtgaaaatttattgataaaatgtgattttaatattttttagatataaactttcaacgtacttccatatgaggattataatagccctgctttattaaagaccataaaatattaactttccccaagatgttatgggttccagttcttctgatcatttgattcctttaattactgtccctcaatttcttcatctttacaatagatatattaacatttacagatcgactatttcctttaacctcctagaagaaagtttttgtggggaaagatgattctgtattattcagtagcatagacattttgcatatcaaagatgttcatttggcactaatgttgattgaaatcaaatccatctgagatgcctagctcgtatttgcattctggaagcctccatcgcaggggagctcggcagggtatgtgagctttgttggaggtgcggtgtttcattctgcagctgttgtgaggacagagaggcatggcccacaggcaaaaaaagtcaccacccagaagatgctctgggatagaggaactgctccttttcatcagctcttccaatgccgtgggagaggtgatcccagtcttctctgtacatcttgtgcttttccattaagacttgttccagtgggaaggagctttggaaaaattgcaaaggtctgaatcttcagggcattttcatgacaggacttgccaataataataataataataataataataataataataataaagctccagaggcctaactggtttctcaagtcatttcagtgatatcattgaaacgtttttgtggtacttccctttgtctttcactgtttcatttttatattgcttcatttacttctttgcttttggctttgttattagaaaaaataattatgaggtctgttgtgcatgttgactgtgatattaagttatggcatgccattaagttttccagacgatgttggatgtatctgattagttcatgtcatctgtaaatacaattcttttttgtagtactttggaatggagcctttttctggtgtactgtatgccatttaagtttcacatacaagctgctttcggcaaaggcttgaatatttataaatttcagatggttatcctcactttatagtacacttaagtggctaccatatattttttatatgacaattggctgaatagctgatgtgtatgacacttttacacagatttgcactttggaactattttatagttgtaatgcatcaatcaaatacatttcaagcacatttcttgatcaatttaccagcaaccctctgaaggaatgaaggagagttgtgattgctatgtcaatgagtgaaatatacttaaaaatggcagagttatatagtacattattgtagcaaccttatatctgatttgagatactgtgttgccaaatgtccatgttatgtttatttctctattggttgtatttattaatttttagaagcctttaaactgtgttagaatctttttgaaaaatgttgattttgcatcataaagtttcaatttatcaaggatatcttttcagttacacttttagaaagagtgaataaaaagggcagtgagttatgctcttggacttggtgaaagctatcatctctccatattgtatttgttcagctggtttaattcactcaggtggatgattgcacatacattggaattggctggagagactacacagagaagtttaatgatcgtgtacaatttgagggttgatggtagggctttctaaaaaaagtaatatcaagtgtgttgttagtattcatttagtcatttttattactaatctataaatatatttattaaatttgaagattaaatggaattataaaggaaaata

SEQ ID NO: 321679 - DNA, 379 bp, Homo sapiens
atcacttgaggtcaggagttccagaccagcctgtccaatgtgatgaaaccctgtctttactaaaaatacaaaaattagccgggtgtggtggcgggcacctgtaatcccagctattcgggaggctgaggcaggagaatcgcttgaacccaggaggcggaggttgcagtgggctgagattgtgccactgcactctagcctgagcaacagagcgagactccgtttcaaaaaataaagaaatatcccatattgtcattacttgattatagctttatgcattttttagcaaaatacttctcatttctcatgtgcatacctcataactgtttagagttgctgtcataagagtatattgtatttctgcctctaaaaatttacttgg

SEQ ID NO: 321680 - DNA, 5736 bp, Homo sapiens
agatcataacctccactctgaaagcagtcttcacagaaacttttcacagaagtcaaatagttaaagcaaattctagatacatggtagagaccaggagaaaatatgaataactttcttctaaacaaggagctcagtggataaaccatacctctagattccttgcttccattttcccagaaacaagatgaggaagagaaagatcagtgtgtgtcaacaaacttgggccttattatgcaagaactttcttaaaaaatggagaatgaaaagagagtccttaatggaatggctgaattcattgctcctactactttgtttgtatatatatcctcatagtcatcaagtaaatgatttttcttcactgcttaccatggacctgggacgggtagatacatttaatgaatccagattttctgttgtatacacacctgtcaccaacacgacccaacagataatgaataaagtagcctctactcccttcctggcaggtaaagaggtcttgggactgccagatgaggaaagtattaaagaattcacagcaaattatcctgaagaaatagtaagagtcacctttactaatacatactcatatcatttgaagttcttgctaggacatggaatgccagcaaagaaggagcacaaggaccatacagctcattgttatgaaacaaatgaagatgtttactgtgaagtttcagtattttggaaggaaggttttgtggctcttcaagctgccattaatgctgctattatagaaatcacaacaaatcactcagtgatggaggagctgatgtcagttactggaaaaaatatgaagatgcattccttcattggtcaatcaggagttataactgatttgtaccttttttcctgcattatttcattttcctcattcatttactatgcatctgttaatgtcacaagagagaggaaaaggatgaaggccttgatgacaatgatgggtcttcgggattcagcgttctggctctcctggggtttgctctatgctggtttcatcttcattatggcccttttcttggcacttgttataagatctacccagtttatcattttgtctggcttcatggtagtcttcagcctctttctcctgtatggattatctttggtagctttggctttcttaatgagcatcttggtaaagaaatctttcctcaccggcctggtcgtgttcctcctcactgtcttttgggggtgtctggggttcacatcactgtacagacaccttcctgcatccttggagtggattttaagcttgcttagtccctttgccttcatgcttggaatggcccagcttttacacttggactatgatttgaattctaatgcatttcctcatccatcggacggctcaaatctcattgtagcaacaaatttcatgttggcatttgacacttgcctctatctggcattggcgatttactttgaaaaaattttgccaaatgaatatggacatcgacgtccacctttgtttttcctgaagtcctcattttggtctcaaacacaaaagactgatcacgtggcccttgaagatgaaatggatgccgatccttcatttcatgactcttttgaacaagcgcctccagaattccaagggaaagaagccatcagaatcagaaatgttacaaaagaatataaaggaaagcctgataaaatagaagccttgaaagatctggtatttgacatttacgaaggccaaatcactgcaatacttggtcacagtggagctggaaagtcaacactgctaaacattcttagtgggttgtctgttcccaccaaaggttcagtcaccatctataacaataagctttcagaaatggctgacctagaaaatctcagcaagctgaccggagtttgtccacaatccaatgtgcaatttgacttcctcactgtaagagaaaacctcagactctttgctaaaataaaagggattctgccacaagaagtggataaagagattttcctgttggatgaaccaactgctggattggatcccttttcaagacaccaagtatggaaccttctgaaagaacgcaaaacagaccgcgtgatcctcttcagtacccagttcatggatgaggccgacatcctggcggacaggaaagtatttctctcccaagggaagctaaagtgcgcgggctcttctttgtttctaaagaagaaatgggggattggatatcacttaagcttgcagttaaatgaaatatgtgttgaggaaaacataacatcacttgttaaacagcacatccctgatgccaaattatcagccaaaagcgaaggaaaacttatttatacattacccttagaaagaacaaataaatttccagaactttacaaggatcttgatagctatcctgacctaggaattgagaattatggtgtttccatgacaactttgaatgaagtattcctgaagctagaaggaaaatctacaattaatgaatcggacattgctattttgggagaagtacaagcggaaaaagctgacgacactgaaaggcttgttgagatggaacaagtcctctcttcacttaacaagatgagaaagacaataggtggtgtggctctctggcgacagcaaatctgcgcaattgcaagggttcgcttgttaaagttaaagcatgaaagaaaagctcttttagcactgctattaattctaatggctggattttgccctcttcttgtggagtataccatggtgaaaatatatcaaaacagttacacctgggaactttctcctcatttgtatttccttgctcctggacaacaaccacatgaccctctcactcaactactgatcatcaataaaacaggggcaagcattgatgactttatacagtctgtggagcaccagaacatagctttagaagtggatgcatttggaactagaaatggcacagatgacccatcttataatggagccatcacagtgtgttgtaatgaaaagaattacagcttttcgttagcatgcaatgccaaaagattgaattgcttcccagttcttatggacattgttagtaatgggctacttggaatggttaaaccatcagtacatatccgaactgaaagaagtacatttttggagaatggacaggacaatccaatcggattcctggcatatatcatgttctggctggttttaacatcgagttgcccaccttacattgccatgagcagcatcgatgattataagaacagagctcggtcccagctacggatttccggactctccccttctgcttactggtttgggcaggcgctggtggatgtttccctgtacttcttggtcttcgtttttatatatttaatgagctacatttcaaacttcgaagacatgctacttacaataattcatattattcaaatcccatgtgctgttggttattccttttccctcatcttcatgacatacgtgatttccttcatctttcgcaaggggagaaaaaatagtggcatttggtcattttgtttctatgttgtcactgtattctctgtggctggatttgcgttcagtatcttcgaaagtgatattccatttatcttcacttttttaataccacctgccacaatgattggctgtttgttcttatcttctcatcttctcttttcttctctcttttctgaagaacgaatggatgtacagccatttctggtattcctaattcctttccttcattttatcatttttctttttactcttcgatgtctggaatggaagtttggaaagaaatcaatgagaaaggatcctttctttagaatttctccaagaagtagtgatgtgtgtcaaaatccagaagaaccagaaggagaggatgaagatgttcagatggaaagagtgagaacagcaaatgccttgaattctactaattttgatgagaagccagtcatcattgccagctgtctacgcaaggagtatgcagggaagaggaaaggctgtttttccaagaggaagaataagatagccacgagaaatgtctccttctgtgttagaaaaggtgaagttttaggattattaggacacaatggagctggtaaaagcacatccattaaggtgataactggagacacaaaaccaactgctggacaagtgctactgaaagggagcggtggaggggatgccctggagttcctggggtactgccctcaggagaacgcgctgtggcccaacctgacagtgaggcagcacctggaggtgtacgccgccgtgaaagggctgaggaaaggggatgctgaggttgccatcacacggttagtggatgcgctcaagctgcaggaccagctgaagtctccggtgaagaccttgtcagagggaataaagagaaagctgtgctttgtcctgagcatactggggaacccgtcagtggtgcttctggatgagccgtcgaccgggatggaccccgaggggcagcagcaaatgtggcaggccatccgggccacctttagaaacacggaaaggggtgccctcctaaccacccactacatggcagaggctgaggccgtgtgtgaccgagtggccatcatggtatctgggaggttgagatgtatcggttccatccaacacctgaaaagcaaatttggcaaagattacctgctggagatgaaggtgaagaacctggcacaagtggagcccctccatgcagagatcctgaggcttttcccccaggctgctcggcaggaaaggtactcctctctgatggtttataagttgccagtggaagatgtgcaacctttagcccaagctttcttcaaattagagaaggttaaacagagctttgacctagaggagtacagcctctcacagtctaccctggagcaggttttcctggagctctccaaggagcaggagctgggtgattttgaggaggattttgatccctcagtgaagtggaagctcctcccccaggaagagccttaaaaccccaaattctgtgttcctgtttaaacccgtggttttttttaaatacatttatttttatagcagcaatgttctatttttagaaactatattataagtacagaaatggttctccgtgtggtgggaggaggaggttcgggtgctgggtaagtgccatgtcagtgtggacagaggcatttgactaagccaacctcctctcacagcctctgtatctctgcaggccatactggttccattgttctgtataatactgaataaataaatttacttttacatgatcgtataagtttctagataagataaacaaattttgtttaaatttttttaataaaaatcttaaaacactttttttctaacctagactgagaaattcatgtttacttttctaggtgtatgatactttgtaaagttgatactttcctaagaatttaacatgtcatatttttgaaatagatttaagtgtgcttcttattgctaaaaatactaaatgtcatgggtcatagtatctgatatcaatatcgttgataacatatccacaggtaacaccatgatgtaggcataaatggaaaacaaaaaccctactatttcaaatatattgtacttttttatttctgtaagccaactgtgtgccattttcactggacttttaaatctagactttagtgatgtctacattgtaaatgatcttttgtggatatttgtcacttggtttcagaaagttcacaaatgtagcaacagctcacatgactgagtaggtagaaaatgtgaaataaatctcatatatatagttttgaaataaatttcta

SEQ ID NO: 321681 - DNA, 985 bp, Homo sapiens
gcacgagcaaaaaaaaaaaataataataataataatatctaattaaatagctttatatgaatagagactgaatattttatgaatagtagatgataaaataagaaacataaatttgatttggcctatggattatatacttacctggtagaataaaaccatgcagatttatcgcctagaattccagacctataatagtactaagcataagttaatttcattcctttctgtagccatcatcaccatgtaaccaatatcatcttatatgcactgtacatgcgagatgaaatattttacttgccttccaacacagccctaaagccctgcaaaaattttcaggttgtgaaacctgaagctgatctggaataagtacgttggttaaggtaacagagcactaagtggttgtaatgggataagcttagatgggcagtactgtgaaccccatgctcttgctattatgatacattgattgtctttcttactgtagttcttaatgaaccttgggagaccttgaatcaggatggccaaagatctttccaacctgtgccagtggttcacaggagcctttgggtatcgaatgtccatgtcatctcttggccttgctttcttagctttgcagttcagaggtgatcccgttctcaatactaatattagcttataccccaatctatggaacctttgcttatgggtcccaatcacagtgaaattcttataactcctcacatgtaactcctcacatgacgccaatgtgcagacagggttggcaagcggtattctagctgattctgtcacacagctatgactgtgtgagagtgaagacccagatcttcatgtatcctgaagttaagatttatccaatcctgtctaccaaactggaaattacaaactgaagaaaattgtcactttgaagtatcttttctttttttcagaatcagaaatgttacaaaagaatataaaggaaagcctgataaaatagaagccttgaaag

SEQ ID NO: 321682 - DNA, 252 bp, Homo sapiens
agcggccgctcgcgatctagaactagactatttcaaatatattgtacttttttatttctgtaagccaactgtgtgccattttcactggacttttaaatctagactttagtgatgtctacattgtaaatgatcttttgtggatatttgtcacttggtttcagaaagttcacaaatgtagcaacagctcacatgactgagtaggtagaaaatgtgaaataaatctcatatatatagttttgaaataaatttcta

SEQ ID NO: 321683 - DNA, 5036 bp, Homo sapiens
gcacgagcaaaaaaaaaaaataataataataataatatctaattaaatagctttatatgaatagagactgaatattttatgaatagtagatgataaaataagaaacataaatttgatttggcctatggattatatacttacctggtagaataaaaccatgcagatttatcgcctagaattccagacctataatagtactaagcataagttaatttcattcctttctgtagccatcatcaccatgtaaccaatatcatcttatatgcactgtacatgcgagatgaaatattttacttgccttccaacacagccctaaagccctgcaaaaattttcaggttgtgaaacctgaagctgatctggaataagtacgttggttaaggtaacagagcactaagtggttgtaatgggataagcttagatgggcagtactgtgaaccccatgctcttgctattatgatacattgattgtctttcttactgtagttcttaatgaaccttgggagaccttgaatcaggatggccaaagatctttccaacctgtgccagtggttcacaggagcctttgggtatcgaatgtccatgtcatctcttggccttgctttcttagctttgcagttcagaggtgatcccgttctcaatactaatattagcttataccccaatctatggaacctttgcttatgggtcccaatcacagtgaaattcttataactcctcacatgtaactcctcacatgacgccaatgtgcagacagggttggcaagcggtattctagctgattctgtcacacagctatgactgtgtgagagtgaagacccagatcttcatgtatcctgaagttaagatttatccaatcctgtctaccaaactggaaattacaaactgaagaaaattgtcactttgaagtatcttttctttttttcagaatcagaaatgttacaaaagaatataaaggaaagcctgataaaatagaagccttgaaagatctggtatttgacatttacgaaggccaaatcactgcaatacttggtcacagtggagctggaaagtcaacactgctaaacattcttagtgggttgtctgttcccaccaaaggttcagtcaccatctataacaataagctttcagaaatggctgacctagaaaatctcagcaagctgaccggagtttgtccacaatccaatgtgcaatttgacttcctcactgtaagagaaaacctcagactctttgctaaaataaaagggattctgccacaagaagtggataaagagattttcctgttggatgaaccaactgctggattggatcccttttcaagacaccaagtatggaaccttctgaaagaacgcaaaacagaccgcgtgatcctcttcagtacccagttcatggatgaggccgacatcctggcggacaggaaagtatttctctcccaagggaagctaaagtgcgcgggctcttctttgtttctaaagaagaaatgggggattggatatcacttaagcttgcagttaaatgaaatatgtgttgaggaaaacataacatcacttgttaaacagcacatccctgatgccaaattatcagccaaaagcgaaggaaaacttatttatacattacccttagaaagaacaaataaatttccagaactttacaaggatcttgatagctatcctgacctaggaattgagaattatggtgtttccatgacaactttgaatgaagtattcctgaagctagaaggaaaatctacaattaatgaatcggacattgctattttgggagaagtacaagcggaaaaagctgacgacactgaaaggcttgttgagatggaacaagtcctctcttcacttaacaagatgagaaagacaataggtggtgtggctctctggcgacagcaaatctgcgcaattgcaagggttcgcttgttaaagttaaagcatgaaagaaaagctcttttagcactgctattaattctaatggctggattttgccctcttcttgtggagtataccatggtgaaaatatatcaaaacagttacacctgggaactttctcctcatttgtatttccttgctcctggacaacaaccacatgaccctctcactcaactactgatcatcaataaaacaggggcaagcattgatgactttatacagtctgtggagcaccagaacatagctttagaagtggatgcatttggaactagaaatggcacagatgacccatcttataatggagccatcacagtgtgttgtaatgaaaagaattacagcttttcgttagcatgcaatgccaaaagattgaattgcttcccagttcttatggacattgttagtaatgggctacttggaatggttaaaccatcagtacatatccgaactgaaagaagtacatttttggagaatggacaggacaatccaatcggattcctggcatatatcatgttctggctggttttaacatcgagttgcccaccttacattgccatgagcagcatcgatgattataagaacagagctcggtcccagctacggatttccggactctccccttctgcttactggtttgggcaggcgctggtggatgtttccctgtacttcttggtcttcgtttttatatatttaatgagctacatttcaaacttcgaagacatgctacttacaataattcatattattcaaatcccatgtgctgttggttattccttttccctcatcttcatgacatacgtgatttccttcatctttcgcaaggggagaaaaaatagtggcatttggtcattttgtttctatgttgtcactgtattctctgtggctggatttgcgttcagtatcttcgaaagtgatattccatttatcttcacttttttaataccacctgccacaatgattggctgtttgttcttatcttctcatcttctcttttcttctctcttttctgaagaacgaatggatgtacagccatttctggtattcctaattcctttccttcattttatcatttttctttttactcttcgatgtctggaatggaagtttggaaagaaatcaatgagaaaggatcctttctttagaatttctccaagaagtagtgatgtgtgtcaaaatccagaagaaccagaaggagaggatgaagatgttcagatggaaagagtgagaacagcaaatgccttgaattctactaattttgatgagaagccagtcatcattgccagctgtctacgcaaggagtatgcagggaagaggaaaggctgtttttccaagaggaagaataagatagccacgagaaatgtctccttctgtgttagaaaaggtgaagttttaggattattaggacacaatggagctggtaaaagcacatccattaaggtgataactggagacacaaaaccaactgctggacaagtgctactgaaagggagcggtggaggggatgccctggagttcctggggtactgccctcaggagaacgcgctgtggcccaacctgacagtgaggcagcacctggaggtgtacgccgccgtgaaagggctgaggaaaggggatgctgaggttgccatcacacggttagtggatgcgctcaagctgcaggaccagctgaagtctccggtgaagaccttgtcagagggaataaagagaaagctgtgctttgtcctgagcatactggggaacccgtcagtggtgcttctggatgagccgtcgaccgggatggaccccgaggggcagcagcaaatgtggcaggccatccgggccacctttagaaacacggaaaggggtgccctcctaaccacccactacatggcagaggctgaggccgtgtgtgaccgagtggccatcatggtatctgggaggttgagatgtatcggttccatccaacacctgaaaagcaaatttggcaaagattacctgctggagatgaaggtgaagaacctggcacaagtggagcccctccatgcagagatcctgaggcttttcccccaggctgctcggcaggaaaggtactcctctctgatggtttataagttgccagtggaagatgtgcaacctttagcccaagctttcttcaaattagagaaggttaaacagagctttgacctagaggagtacagcctctcacagtctaccctggagcaggttttcctggagctctccaaggagcaggagctgggtgattttgaggaggattttgatccctcagtgaagtggaagctcctcccccaggaagagccttaaaaccccaaattctgtgttcctgtttaaacccgtggttttttttaaatacatttatttttatagcagcaatgttctatttttagaaactatattataagtacagaaatggttctccgtgtggtgggaggaggaggttcgggtgctgggtaagtgccatgtcagtgtggacagaggcatttgactaagccaacctcctctcacagcctctgtatctctgcaggccatactggttccattgttctgtataatactgaataaataaatttacttttacatgatcgtataagtttctagataagataaacaaattttgtttaaatttttttaataaaaatcttaaaacactttttttctaacctagactgagaaattcatgtttacttttctaggtgtatgatactttgtaaagttgatactttcctaagaatttaacatgtcatatttttgaaatagatttaagtgtgcttcttattgctaaaaatactaaatgtcatgggtcatagtatctgatatcaatatcgttgataacatatccacaggtaacaccatgatgtaggcataaatggaaaacaaaaaccctactatttcaaatatattgtacttttttatttctgtaagccaactgtgtgccattttcactggacttttaaatctagactttagtgatgtctacattgtaaatgatcttttgtggatatttgtcacttggtttcagaaagttcacaaatgtagcaacagctcacatgactgagtaggtagaaaatgtgaaataaatctcatatatatagttttgaaataaatttcta

SEQ ID NO: 321684 - DNA, 2657 bp, Homo sapiens
acagcgcgaatacccagggtagatggacaggacaatccaatcggattcctggcatatatcatgttctggctggttttaacatcgagttgcccaccttacattgccatgagcagcatcgatgattataagaacagagctcggtcccagctacggatttccggactctccccttctgcttactggtttgggcaggcgctggtggatgtttccctgtacttcttggtcttcgtttttatatatttaatgagctacatttcaaacttcgaagacatgctacttacaataattcatattattcaaatcccatgtgctgttggttattccttttccctcatcttcatgacatacgtgatttccttcatctttcgcaaggggagaaaaaatagtggcatttggtcattttgtttctatgttgtcactgtattctctgtggctggatttgcgttcagtatcttcgaaagtgatattccatttatcttcacttttttaataccacctgccacaatgattggctgtttgttcttatcttctcatcttctcttttcttctctcttttctgaagaacgaatggatgtacagccatttctggtattcctaattcctttccttcattttatcatttttctttttactcttcgatgtctggaatggaagtttggaaagaaatcaatgagaaaggatcctttctttagaatttctccaagaagtagtgatgtgtgtcaaaatccagaagaaccagaaggagaggatgaagatgttcagatggaaagagtgagaacagcaaatgccttgaattctactaattttgatgagaagccagtcatcattgccagctgtctacgcaaggagtatgcagggaagaggaaaggctgtttttccaagaggaagaataagatagccacgagaaatgtctccttctgtgttagaaaaggtgaagttttaggattattaggacacaatggagctggtaaaagcacatccattaaggtgataactggagacacaaaaccaactgctggacaagtgctactgaaagggagcggtggaggggatgccctggagttcctggggtactgccctcaggagaacgcgctgtggcccaacctgacagtgaggcagcacctggaggtgtacgccgccgtgaaagggctgaggaaaggggatgctgaggttgccatcacacggttagtggatgcgctcaagctgcaggaccagctgaagtctccggtgaagaccttgtcagagggaataaagagaaagctgtgctttgtcctgagcatactggggaacccgtcagtggtgcttctggatgagccgtcgaccgggatggaccccgaggggcagcagcaaatgtggcaggccatccgggccacctttagaaacacggaaaggggtgccctcctaaccacccactacatggcagaggctgaggccgtgtgtgaccgagtggccatcatggtatctgggaggttgagatgtatcggttccatccaacacctgaaaagcaaatttggcaaagattacctgctggagatgaaggtgaagaacctggcacaagtggagcccctccatgcagagatcctgaggcttttcccccaggctgctcggcaggaaaggtactcctctctgatggtttataagttgccagtggaagatgtgcaacctttagcccaagctttcttcaaattagagaaggttaaacagagctttgacctagaggagtacagcctctcacagtctaccctggagcaggttttcctggagctctccaaggagcaggagctgggtgattttgaggaggattttgatccctcagtgaagtggaagctcctcccccaggaagagccttaaaaccccaaattctgtgttcctgtttaaacccgtggttttttttaaatacatttatttttatagcagcaatgttctatttttagaaactatattataagtacagaaatggttctccgtgtggtgggaggaggaggttcgggtgctgggtaagtgccatgtcagtgtggacagaggcatttgactaagccaacctcctctcacagcctctgtatctctgcaggccatactggttccattgttctgtataatactgaataaataaatttacttttacatgatcgtataagtttctagataagataaacaaattttgtttaaatttttttaataaaaatcttaaaacactttttttctaacctagactgagaaattcatgtttacttttctaggtgtatgatactttgtaaagttgatactttcctaagaatttaacatgtcatatttttgaaatagatttaagtgtgcttcttattgctaaaaatactaaatgtcatgggtcatagtatctgatatcaatatcgttgataacatatccacaggtaacaccatgatgtaggcataaatggaaaacaaaaaccctactatttcaaatatattgtacttttttatttctgtaagccaactgtgtgccattttcactggacttttaaatctagactttagtgatgtctacattgtaaatgatcttttgtggatatttgtcacttggtttcagaaagttcacaaatgtagcaacagctcacatgactgagtaggtagaaaatgtgaaataaatctcatatatatagttttgaaataaatttcta

SEQ ID NO: 321685 - DNA, 1422 bp, Homo sapiens
agatcataacctccactctgaaagcagtcttcacagaaacttttcacagaagtcaaatagttaaagcaaattctagatacatggtagagaccaggagaaaatatgaataactttcttctaaacaaggagctcagtggataaaccatacctctagattccttgcttccattttcccagaaacaagatgaggaagagaaagatcagtgtgtgtcaacaaacttgggccttattatgcaagaactttcttaaaaaatggagaatgaaaagagagtccttaatggaatggctgaattcattgctcctactactttgtttgtatatatatcctcatagtcatcaagtaaatgatttttcttcactgcttaccatggacctgggacgggtagatacatttaatgaatccagattttctgttgtatacacacctgtcaccaacacgacccaacagataatgaataaagtagcctctactcccttcctggcaggtaaagaggtcttgggactgccagatgaggaaagtattaaagaattcacagcaaattatcctgaagaaatagtaagagtcacctttactaatacatactcatatcatttgaagttcttgctaggacatggaatgccagcaaagaaggagcacaaggaccatacagctcattgttatgaaacaaatgaagatgtttactgtgaagtttcagtattttggaaggaaggttttgtggctcttcaagctgccattaatgctgctattatagaaatcacaacaaatcactcagtgatggaggagctgatgtcagttactggaaaaaatatgaagatgcattccttcattggtcaatcaggagttataactgatttgtaccttttttcctgcattatttcattttcctcattcatttactatgcatctgttaatgtcacaagagagaggaaaaggatgaaggccttgatgacaatgatgggtcttcgggattcagcgttctggctctcctggggtttgctctatgctggtttcatcttcattatggcccttttcttggcacttgttataagatctacccagtttatcattttgtctggcttcatggtagtcttcagcctctttctcctgtatggattatctttggtagctttggctttcttaatgagcatcttggtaaagaaatctttcctcaccggcctggtcgtgttcctcctcactgtcttttgggggtgtctggggttcacatcactgtacagacaccttcctgcatccttggagtggattttaagcttgcttagtccctttgccttcatgcttggaatggcccagctctgctggtcactccagtggggtcaacatttcaagaatgttacaagcagctgggcttggtggctcatgcctataatcccagcactttaaaaggctgaagtagaaggagcaca

SEQ ID NO: 321686 - DNA, 428 bp, Homo sapiens
aagtcaaatagttaaagcaaattctagatacatggtagagaccaggagaaaatatgaataactttcttctaaacaaggagctcagtggataaaccatacctctagattccttgcttccattttcccagaagtaagttcactgtattttttctgttttgttttgtattttgcttttgtgtgtgagtttgtttcagaggttttgtcttttcttattcctatcacaaaattataaataaacctttataaactgaatgacaatcatctatgcagaaattattttgaaaaatattgggctactttaaagattttatatctggtaattaatattagataaataaaaacattgagttagaatgttttttaaaaaattatgcaaacattatgttgttttaaacataactgagtgtagaaataagtttaaattggct

SEQ ID NO: 321687 - DNA, 1482 bp, Homo sapiens
  misc_feature (1481)..(1481): n is a, c, g, or t
agatcataacctccactctgaaagcagtcttcacagaaacttttcacagaagtcaaatagttaaagcaaattctagatacatggtagagaccaggagaaaatatgaataactttcttctaaacaaggagctcagtggataaaccatacctctagattccttgcttccattttcccagaaacaagatgaggaagagaaagatcagtgtgtgtcaacaaacttgggccttattatgcaagaactttcttaaaaaatggagaatgaaaagagagtccttaatggaatggctgaattcattgctcctactactttgtttgtatatatatcctcatagtcatcaagtaaatgatttttcttcactgcttaccatggacctgggacgggtagatacatttaatgaatccagattttctgttgtatacacacctgtcaccaacacgacccaacagataatgaataaagtagcctctactcccttcctggcaggtaaagaggtcttgggactgccagatgaggaaagtattaaagaattcacagcaaattatcctgaagaaatagtaagagtcacctttactaatacatactcatatcatttgaagttcttgctaggacatggaatgccagcaaagaaggagcacaaggaccatacagctcattgttatgaaacaaatgaagatgtttactgtgaagtttcagtattttggaaggaaggttttgtggctcttcaagctgccattaatgctgctattatagaaatcacaacaaatcactcagtgatggaggagctgatgtcagttactggaaaaaatatgaagatgcattccttcattggtcaatcaggagttataactgatttgtaccttttttcctgcattatttcattttcctcattcatttactatgcatctgttaatgtcacaagagagaggaaaaggatgaaggccttgatgacaatgatgggtcttcgggattcagcgttctggtgagtcaaacgcagcacaaataaataaacggaggaactcaggaaaactgggaatcttcaatgcatctttttttttttgaaatggagtctcgctctgtcgcccaggctggagtgcagtggcgtgatctcagctcactgcaagctccgcctcacaggttcacgccattctcctgcctcggcctcccaagtagctgggactacaggtgccggccaccatgcctggataattttttgtattttctgtagagacggggtttcaccgtgttagccaggatggtctcgatctcctgacctcgtgatccacccacctcggcctcccaaagtgctgggattacaggcgcgagccaccacgcccggcctcttcaatgcgtctttattaaaacctgtttctccacaaccaaggggtacaaatgagagatacctacacagaataatttcagatcatgaacaaatttccacttagttaatttcagtggggagaaatgctctgcagtgatggnc

SEQ ID NO: 321688 - DNA, 4580 bp, Homo sapiens
agatcataacctccactctgaaagcagtcttcacagaaacttttcacagaagtcaaatagttaaagcaaattctagatacatggtagagaccaggagaaaatatgaataactttcttctaaacaaggagctcagtggataaaccatacctctagattccttgcttccattttcccagaaacaagatgaggaagagaaagatcagtgtgtgtcaacaaacttgggccttattatgcaagaactttcttaaaaaatggagaatgaaaagagagtccttaatggaatggctgaattcattgctcctactactttgtttgtatatatatcctcatagtcatcaagtaaatgatttttcttcactgcttaccatggacctgggacgggtagatacatttaatgaatccagattttctgttgtatacacacctgtcaccaacacgacccaacagataatgaataaagtagcctctactcccttcctggcaggtaaagaggtcttgggactgccagatgaggaaagtattaaagaattcacagcaaattatcctgaagaaatagtaagagtcacctttactaatacatactcatatcatttgaagttcttgctaggacatggaatgccagcaaagaaggagcacaaggaccatacagctcattgttatgaaacaaatgaagatgtttactgtgaagtttcagtattttggaaggaaggttttgtggctcttcaagctgccattaatgctgctattatagaaatcacaacaaatcactcagtgatggaggagctgatgtcagttactggaaaaaatatgaagatgcattccttcattggtcaatcaggagttataactgatttgtaccttttttcctgcattatttcattttcctcattcatttactatgcatctgttaatgtcacaagagagaggaaaaggatgaaggccttgatgacaatgatgggtcttcgggattcagcgttctggctctcctggggtttgctctatgctggtttcatcttcattatggcccttttcttggcacttgttataagatctacccagtttatcattttgtctggcttcatggtagtcttcagcctctttctcctgtatggattatctttggtagctttggctttcttaatgagcatcttggtaaagaaatctttcctcaccggcctggtcgtgttcctcctcactgtcttttgggggtgtctggggttcacatcactgtacagacaccttcctgcatccttggagtggattttaagcttgcttagtccctttgccttcatgcttggaatggcccagcttttacacttggactatgatttgaattctaatgcatttcctcatccatcggacggctcaaatctcattgtagcaacaaatttcatgttggcatttgacacttgcctctatctggcattggcgatttactttgaaaaaattttgccaaatgaatatggacatcgacgtccacctttgtttttcctgaagtcctcattttggtctcaaacacaaaagactgatcacgtggcccttgaagatgaaatggatgccgatccttcatttcatgactcttttgaacaagcgcctccagaattccaagggaaagaagccatcagaatcagaaatgttacaaaagaatataaaggaaagcctgataaaatagaagccttgaaagatctggtatttgacatttacgaaggccaaatcactgcaatacttggtcacagtggagctggaaagtcaacactgctaaacattcttagtgggttgtctgttcccaccaaaggttcagtcaccatctataacaataagctttcagaaatggctgacctagaaaatctcagcaagctgaccggagtttgtccacaatccaatgtgcaatttgacttcctcactgtaagagaaaacctcagactctttgctaaaataaaagggattctgccacaagaagtggataaagagattttcctgttggatgaaccaactgctggattggatcccttttcaagacaccaagtatggaaccttctgaaagaacgcaaaacagaccgcgtgatcctcttcagtacccagttcatggatgaggccgacatcctggcggacaggaaagtatttctctcccaagggaagctaaagtgcgcgggctcttctttgtttctaaagaagaaatgggggattggatatcacttaagcttgcagttaaatgaaatatgtgttgaggaaaacataacatcacttgttaaacagcacatccctgatgccaaattatcagccaaaagcgaaggaaaacttatttatacattacccttagaaagaacaaataaatttccagaactttacaaggatcttgatagctatcctgacctaggaattgagaattatggtgtttccatgacaactttgaatgaagtattcctgaagctagaaggaaaatctacaattaatgaatcggacattgctattttgggagaagtacaagcggaaaaagctgacgacactgaaaggcttgttgagatggaacaagtcctctcttcacttaacaagatgagaaagacaataggtggtgtggctctctggcgacagcaaatctgcgcaattgcaagggttcgcttgttaaagttaaagcatgaaagaaaagctcttttagcactgctattaattctaatggctggattttgccctcttcttgtggagtataccatggtgaaaatatatcaaaacagttacacctgggaactttctcctcatttgtatttccttgctcctggacaacaaccacatgaccctctcactcaactactgatcatcaataaaacaggggcaagcattgatgactttatacagtctgtggagcaccagaacatagctttagaagtggatgcatttggaactagaaatggcacagatgacccatcttataatggagccatcacagtgtgttgtaatgaaaagaattacagcttttcgttagcatgcaatgccaaaagattgaattgcttcccagttcttatggacattgttagtaatgggctacttggaatggttaaaccatcagtacatatccgaactgaaagaagtacatttttggagaatggacaggacaatccaatcggattcctggcatatatcatgttctggctggttttaacatcgagttgcccaccttacattgccatgagcagcatcgatgattataagaacagagctcggtcccagctacggatttccggactctccccttctgcttactggtttgggcaggcgctggtggatgtttccctgtacttcttggtcttcgtttttatatatttaatgagctacatttcaaacttcgaagacatgctacttacaataattcatattattcaaatcccatgtgctgttggttattccttttccctcatcttcatgacatacgtgatttccttcatctttcgcaaggggagaaaaaatagtggcatttggtcattttgtttctatgttgtcactgtattctctgtggctggatttgcgttcagtatcttcgaaagtgatattccatttatcttcacttttttaataccacctgccacaatgattggctgtttgttcttatcttctcatcttctcttttcttctctcttttctgaagaacgaatggatgtacagccatttctggtattcctaattcctttccttcattttatcatttttctttttactcttcgatgtctggaatggaagtttggaaagaaatcaatgagaaaggatcctttctttagaatttctccaagaagtagtgatgtgtgtcaaaatccagaagaaccagaaggagaggatgaagatgttcagatggaaagagtgagaacagcaaatgccttgaattctactaattttgatgagaagccagtcatcattgccagctgtctacgcaaggagtatgcagggaagaggaaaggctgtttttccaagaggaagaataagatagccacgagaaatgtctccttctgtgttagaaaaggtgaagttttaggattattaggacacaatggagctggtaaaagcacatccattaaggtgataactggagacacaaaaccaactgctggacaagtgctactgaaagggagcggtggaggggatgccctggagttcctggggtactgccctcaggagaacgcgctgtggcccaacctgacagtgaggcagcacctggaggtgtacgccgccgtgaaagggctgaggaaaggggatgctgaggttgccatcacacggttagtggatgcgctcaagctgcaggaccagctgaagtctccggtgaagaccttgtcagagggaataaagagaaagctgtgctttgtcctgagcatactggggaacccgtcagtggtgcttctggatgagccgtcgaccgggatggaccccgaggggcagcagcaaatgtggtgaggaacattaccacggtcagggacagcacggatgacttgcatggagcctgtgaaccatttttcttctgtaaaaattgtcccttaaactcttttgtggagaacaaaaaaactatcaatgtcacttgtaaaaccaatactttgca

SEQ ID NO: 321689 - DNA, 2784 bp, Homo sapiens
ggcgacgctggcgtccccggagcctgcggcgggcggctgtgacggccccggcgctgacggcggcggccgggggggcggtgtcgacgcccgcggcgccggctggggcatcaccgcgggcctcgaccccgaaatggcgctgctggccgaacacttgctgaagccgctgcccgcggacaagcagatcgagaccgggcccttcctcgaggcggtgtcccacctgccgcccttcttcgattgccttgggtccccagtgtttactcccatcaaggcagacataagcggcaacatcacgaaaatcaaagctgtgtacgacaccaacccagccaagttccggaccctgcagaacatcctggaggtggagaaagaaatgtatggagcagagtggcccaaagtaggggccacactggcgctgatgtggctgaaaagaggcctccgcttcatccaggtcttcctccagagcatctgcgacggggagcgggacgagaaccaccccaacctcatccgtgtcaacgccaccaaggcctacgagatggccctcaagaagtaccatggctggatcgtgcagaagatcttccaggcagcactgtacgcagcaccctataagtctgacttcctgaaagcgctctccaaggggcagaatgttacggaggaggagtgcctggagaagatccgcctcttcctagtcaactacacggcgaccatcgatgtcatctacgagatgtacacccagatgaacgctgagcttaactacaaggtgtaggcatgcccactgctggacacgtccccgactcgtggccacatggagaaacaggcaaaccagaatcactgtgaatcaagtcggtgaactgcccctggcctgtgtcccccagagcagcccagggtcctgccagagtctgcaggggacagccctcgttttttaagtcttttttttttttttttttggtctattctaaaggaccagtaaataatgatcttacttccaaatctccttggaatttcacgacagcacagactgactttataccttcatttcagcgtggtaaaaaccgattaacacttctaatgagtcaagtcctagggttttttggttttgttttgttgccaacgaggaacacagctctgggggaatggtgtcatccacctcgctttaaaaataagcacatgatggctgggcaccgtggctcacgcctgtaatcccagcactttgggaggctgaggcgggtggatcacctgaggtcgggagtttgagaccagcctggccaacatggtgaaaccccatcgctactaaaaatataaaaaattagctgggcatggtggcgcacgcctgtagttccagctactcaggaggctgaggcaggagaatcgcttgaacccgggaggtggaggttgcagtgagctgagatcgcaccattgcactccagcctgggcaacaagagcgaaactctgtctcaaaaaaaaaaaaaaagaggtggggggattacttgaggtcagggtttgagatcagcctgaccaacattggtgaaaccctatctctacttaaaaatatagaattagccaggcatggtagcgcacgcctgtaatcccatcttcttgggaggctgaggcaggagaatcgctagaaactgggaggtggaggttacagtagccgagatcgcgccactgcattccagcctgggcaacaaaagcgaaactctgtctcaaaaaagaaaaaaaagaaaaaaaagcacgtgaccttatgaggctctcgctgtattgttattttaaggactataaagagtttgatttaaaattatgcagggcccctatgtgggattttttaaaaagcaaactggtgtgtattctcatgtggtttgcacagcccagcctcacagcactattgtaaaccctgctctttctgtctcgctagacagatttttttgtttgttttcttttttctggttgttttttgttgttgttgttgttgttttacagctgaaaccaaccagcaagcccttgatgaccaagaggcgtttctttcaaagctatagggcacaaacaattgaccatagatgactccgtttgcattcttctgcagaattatttccttcagggacagattttccaacctaagaaactacctaccgtgtgtattctcttgacggggagagatgaacccttcagctgctaagatccaagaaaacgcctcactgccttaaccttaactgttcttcctggcgctaaaaagagctgtattttttaaagtgctggggcaaacaaagcaaccccaaaagagttgatgtgtgttttaaaagaaaaaacccaatgaggaacaattggagatttttatgcagaaactaaataatccttaataaataaatctctattttggaatcacaaaaaaaaaaaaaaaaaaaagaaaaaaaaaaaaaaaaaaaaaaaaaaaaaaaaaaaaaaaaaaaaaaaaaaaaaaagggggggggggcaaaaaactctcggggggcacgacacagcctaggcacgcacccgccgttcgtcgacaacaaaaggcggcgccaaaagcagggaccgaaaaataaaacgcaagcgacggcgggggcgccgaacaaccacacgccgcggaggaggcaaacagcgagacgggcgctgccctagcagaagacgcccacccggtggggggaaactactgcggggacaaccacacaaaggaagacagcgcgcccgaggaacaccaacactcgcagggcagcctgaaccacgccgaactcgaccgcagcggaagagcgccagcggacgagtcacgaaaac

SEQ ID NO: 321690 - DNA, 2318 bp, Homo sapiens
ggcgacgctggcgtccccggagcctgcggcgggcggctgtgacggccccggcgctgacggcggcggccgggggggcggtgtcgacgcccgcggcgccggctggggcatcaccgcgggcctcgaccccgaaatggcgctgctggccgaacacttgctgaagccgctgcccgcggacaagcagatcgagaccgggcccttcctcgaggcggtgtcccacctgccgcccttcttcgattgccttgggtccccagtgtttactcccatcaaggcagacataagcggcaacatcacgaaaatcaaagctgtgtacgacaccaacccagccaagttccggaccctgcagaacatcctggaggtggagaaagaaataggcctccgcttcatccaggtcttcctccagagcatctgcgacggggagcgggacgagaaccaccccaacctcatccgtgtcaacgccaccaaggcctacgagatggccctcaagaagtaccatggctggatcgtgcagaagatcttccaggcagcactgtacgcagcaccctataagtctgacttcctgaaagcgctctccaaggggcagaatgttacggaggaggagtgcctggagaagatccgcctcttcctagtcaactacacggcgaccatcgatgtcatctacgagatgtacacccagatgaacgctgagcttaactacaaggtgtaggcatgcccactgctggacacgtccccgactcgtggccacatggagaaacaggcaaaccagaatcactgtgaatcaagtcggtgaactgcccctggcctgtgtcccccagagcagcccagggtcctgccagagtctgcaggggacagccctcgttttttaagtcttttttttttttttttttggtctattctaaaggaccagtaaataatgatcttacttccaaatctccttggaatttcacgacagcacagactgactttataccttcatttcagcgtggtaaaaaccgattaacacttctaatgagtcaagtcctagggttttttggttttgttttgttgccaacgaggaacacagctctgggggaatggtgtcatccacctcgctttaaaaataagcacatgatggctgggcaccgtggctcacgcctgtaatcccagcactttgggaggctgaggcgggtggatcacctgaggtcgggagtttgagaccagcctggccaacatggtgaaaccccatcgctactaaaaatataaaaaattagctgggcatggtggcgcacgcctgtagttccagctactcaggaggctgaggcaggagaatcgcttgaacccgggaggtggaggttgcagtgagctgagatcgcaccattgcactccagcctgggcaacaagagcgaaactctgtctcaaaaaaaaaaaaaaagaggtggggggattacttgaggtcagggtttgagatcagcctgaccaacattggtgaaaccctatctctacttaaaaatatagaattagccaggcatggtagcgcacgcctgtaatcccatcttcttgggaggctgaggcaggagaatcgctagaaactgggaggtggaggttacagtagccgagatcgcgccactgcattccagcctgggcaacaaaagcgaaactctgtctcaaaaaagaaaaaaaagaaaaaaaagcacgtgaccttatgaggctctcgctgtattgttattttaaggactataaagagtttgatttaaaattatgcagggcccctatgtgggattttttaaaaagcaaactggtgtgtattctcatgtggtttgcacagcccagcctcacagcactattgtaaaccctgctctttctgtctcgctagacagatttttttgtttgttttcttttttctggttgttttttgttgttgttgttgttgttttacagctgaaaccaaccagcaagcccttgatgaccaagaggcgtttctttcaaagctatagggcacaaacaattgaccatagatgactccgtttgcattcttctgcagaattatttccttcagggacagattttccaacctaagaaactacctaccgtgtgtattctcttgacggggagagatgaacccttcagctgctaagatccaagaaaacgcctcactgccttaaccttaactgttcttcctggcgctaaaaagagctgtattttttaaagtgctggggcaaacaaagcaaccccaaaagagttgatgtgtgttttaaaagaaaaaacccaatgaggaacaattggagatttttatgcagaaactaaataatccttaataaataaatctctattttggaatcaca

SEQ ID NO: 321691 - DNA, 2691 bp, Homo sapiens
ggcgacgctggcgtccccggagcctgcggcgggcggctgtgacggccccggcgctgacggcggcggccgggggggcggtgtcgacgcccgcggcgccggctggggcatcaccgcgggcctcgaccccgaaatggcgctgctggccgaacacttgctgaagccgctgcccgcggacaagcagatcgagaccgggcccttcctcgaggcggtgtcccacctgccgcccttcttcgattgccttgggtccccagtgtttactcccatcaaggcagacataagcggcaacatcacgatgaggaagctgagactcagaggggttgaaggactcgcttaaggtcacaagcaagtacgtggcaaagctgggattcagacccaggcctacctggctccatctcagaggccttcgttcctggacttcttggaatcctcggaacctatttccacttgtccaccaaagcaaaacttcagatacttggtgtctgaggcagtgtcagtagtggctggagaacatgaactctgtatcaactgtgtgaccttgggcaagtccgtgctcctctgtgagcctcagtgtctctgcctgtaaaatgggataatgacagcaacatcagaaaatcaaagctgtgtacgacaccaacccagccaagttccggaccctgcagaacatcctggaggtggagaaagaaatgtatggagcagagtggcccaaagtaggggccacactggcgctgatgtggctgaaaagaggcctccgcttcatccaggtcttcctccagagcatctgcgacggggagcgggacgagaaccaccccaacctcatccgtgtcaacgccaccaaggcctacgagatggccctcaagaagtaccatggctggatcgtgcagaagatcttccaggcagcactgtacgcagcaccctataagtctgacttcctgaaagcgctctccaaggggcagaatgttacggaggaggagtgcctggagaagatccgcctcttcctagtcaactacacggcgaccatcgatgtcatctacgagatgtacacccagatgaacgctgagcttaactacaaggtgtaggcatgcccactgctggacacgtccccgactcgtggccacatggagaaacaggcaaaccagaatcactgtgaatcaagtcggtgaactgcccctggcctgtgtcccccagagcagcccagggtcctgccagagtctgcaggggacagccctcgttttttaagtcttttttttttttttttttggtctattctaaaggaccagtaaataatgatcttacttccaaatctccttggaatttcacgacagcacagactgactttataccttcatttcagcgtggtaaaaaccgattaacacttctaatgagtcaagtcctagggttttttggttttgttttgttgccaacgaggaacacagctctgggggaatggtgtcatccacctcgctttaaaaataagcacatgatggctgggcaccgtggctcacgcctgtaatcccagcactttgggaggctgaggcgggtggatcacctgaggtcgggagtttgagaccagcctggccaacatggtgaaaccccatcgctactaaaaatataaaaaattagctgggcatggtggcgcacgcctgtagttccagctactcaggaggctgaggcaggagaatcgcttgaacccgggaggtggaggttgcagtgagctgagatcgcaccattgcactccagcctgggcaacaagagcgaaactctgtctcaaaaaaaaaaaaaaagaggtggggggattacttgaggtcagggtttgagatcagcctgaccaacattggtgaaaccctatctctacttaaaaatatagaattagccaggcatggtagcgcacgcctgtaatcccatcttcttgggaggctgaggcaggagaatcgctagaaactgggaggtggaggttacagtagccgagatcgcgccactgcattccagcctgggcaacaaaagcgaaactctgtctcaaaaaagaaaaaaaagaaaaaaaagcacgtgaccttatgaggctctcgctgtattgttattttaaggactataaagagtttgatttaaaattatgcagggcccctatgtgggattttttaaaaagcaaactggtgtgtattctcatgtggtttgcacagcccagcctcacagcactattgtaaaccctgctctttctgtctcgctagacagatttttttgtttgttttcttttttctggttgttttttgttgttgttgttgttgttttacagctgaaaccaaccagcaagcccttgatgaccaagaggcgtttctttcaaagctatagggcacaaacaattgaccatagatgactccgtttgcattcttctgcagaattatttccttcagggacagattttccaacctaagaaactacctaccgtgtgtattctcttgacggggagagatgaacccttcagctgctaagatccaagaaaacgcctcactgccttaaccttaactgttcttcctggcgctaaaaagagctgtattttttaaagtgctggggcaaacaaagcaaccccaaaagagttgatgtgtgttttaaaagaaaaaacccaatgaggaacaattggagatttttatgcagaaactaaataatccttaataaataaatctctattttggaatcaca

SEQ ID NO: 321692 - DNA, 2375 bp, Homo sapiens
ggcgacgctggcgtccccggagcctgcggcgggcggctgtgacggccccggcgctgacggcggcggccgggggggcggtgtcgacgcccgcggcgccggctggggcatcaccgcgggcctcgaccccgaaatggcgctgctggccgaacacttgctgaagccgctgcccgcggacaagcagatcgagaccgggcccttcctcgaggcggtgtcccacctgccgcccttcttcgattgccttgggtccccagtgtttactcccatcaaggcagacataagcggcaacatcacgaaaatcaaagctgtgtacgacaccaacccagccaagttccggaccctgcagaacatcctggaggtggagaaagaaatgtatggagcagagtggcccaaagtaggggccacactggcgctgatgtggctgaaaagaggcctccgcttcatccaggtcttcctccagagcatctgcgacggggagcgggacgagaaccaccccaacctcatccgtgtcaacgccaccaaggcctacgagatggccctcaagaagtaccatggctggatcgtgcagaagatcttccaggcagcactgtacgcagcaccctataagtctgacttcctgaaagcgctctccaaggggcagaatgttacggaggaggagtgcctggagaagatccgcctcttcctagtcaactacacggcgaccatcgatgtcatctacgagatgtacacccagatgaacgctgagcttaactacaaggtgtaggcatgcccactgctggacacgtccccgactcgtggccacatggagaaacaggcaaaccagaatcactgtgaatcaagtcggtgaactgcccctggcctgtgtcccccagagcagcccagggtcctgccagagtctgcaggggacagccctcgttttttaagtcttttttttttttttttttggtctattctaaaggaccagtaaataatgatcttacttccaaatctccttggaatttcacgacagcacagactgactttataccttcatttcagcgtggtaaaaaccgattaacacttctaatgagtcaagtcctagggttttttggttttgttttgttgccaacgaggaacacagctctgggggaatggtgtcatccacctcgctttaaaaataagcacatgatggctgggcaccgtggctcacgcctgtaatcccagcactttgggaggctgaggcgggtggatcacctgaggtcgggagtttgagaccagcctggccaacatggtgaaaccccatcgctactaaaaatataaaaaattagctgggcatggtggcgcacgcctgtagttccagctactcaggaggctgaggcaggagaatcgcttgaacccgggaggtggaggttgcagtgagctgagatcgcaccattgcactccagcctgggcaacaagagcgaaactctgtctcaaaaaaaaaaaaaaagaggtggggggattacttgaggtcagggtttgagatcagcctgaccaacattggtgaaaccctatctctacttaaaaatatagaattagccaggcatggtagcgcacgcctgtaatcccatcttcttgggaggctgaggcaggagaatcgctagaaactgggaggtggaggttacagtagccgagatcgcgccactgcattccagcctgggcaacaaaagcgaaactctgtctcaaaaaagaaaaaaaagaaaaaaaagcacgtgaccttatgaggctctcgctgtattgttattttaaggactataaagagtttgatttaaaattatgcagggcccctatgtgggattttttaaaaagcaaactggtgtgtattctcatgtggtttgcacagcccagcctcacagcactattgtaaaccctgctctttctgtctcgctagacagatttttttgtttgttttcttttttctggttgttttttgttgttgttgttgttgttttacagctgaaaccaaccagcaagcccttgatgaccaagaggcgtttctttcaaagctatagggcacaaacaattgaccatagatgactccgtttgcattcttctgcagaattatttccttcagggacagattttccaacctaagaaactacctaccgtgtgtattctcttgacggggagagatgaacccttcagctgctaagatccaagaaaacgcctcactgccttaaccttaactgttcttcctggcgctaaaaagagctgtattttttaaagtgctggggcaaacaaagcaaccccaaaagagttgatgtgtgttttaaaagaaaaaacccaatgaggaacaattggagatttttatgcagaaactaaataatccttaataaataaatctctattttggaatcaca

SEQ ID NO: 321693 - DNA, 2714 bp, Homo sapiens
ggcgacgctggcgtccccggagcctgcggcgggcggctgtgacggccccggcgctgacggcggcggccgggggggcggtgtcgacgcccgcggcgccggctggggcatcaccgcgggcctcgaccccgaaatggcgctgctggccgaacacttgctgaagccgctgcccgcggacaagcagatcgagaccgggcccttcctcgaggcggtgtcccacctgccgcccttcttcgattgccttgggtccccagtgtttactcccatcaaggcagacataagcggcaacatcacgatgaggaagctgagactcagaggggttgaaggactcgcttaaggtcacaagcaagtacgtggcaaagctgggattcagacccaggcctacctggctccatctcagaggccttcgttcctggacttcttggaatcctcggaacctatttccacttgtccaccaaagcaaaacttcagatacttggtgtctgaggcagtgtcagtagtggctggagaacatgaactctgtatcaactgtgtgaccttgggcaagtccgtgctcctctgtgagcctcagtgtctctgcctgtaaaatgggataatgacagcaacatcaggtttgccaccaggatcatataagaaaatcaaagctgtgtacgacaccaacccagccaagttccggaccctgcagaacatcctggaggtggagaaagaaatgtatggagcagagtggcccaaagtaggggccacactggcgctgatgtggctgaaaagaggcctccgcttcatccaggtcttcctccagagcatctgcgacggggagcgggacgagaaccaccccaacctcatccgtgtcaacgccaccaaggcctacgagatggccctcaagaagtaccatggctggatcgtgcagaagatcttccaggcagcactgtacgcagcaccctataagtctgacttcctgaaagcgctctccaaggggcagaatgttacggaggaggagtgcctggagaagatccgcctcttcctagtcaactacacggcgaccatcgatgtcatctacgagatgtacacccagatgaacgctgagcttaactacaaggtgtaggcatgcccactgctggacacgtccccgactcgtggccacatggagaaacaggcaaaccagaatcactgtgaatcaagtcggtgaactgcccctggcctgtgtcccccagagcagcccagggtcctgccagagtctgcaggggacagccctcgttttttaagtcttttttttttttttttttggtctattctaaaggaccagtaaataatgatcttacttccaaatctccttggaatttcacgacagcacagactgactttataccttcatttcagcgtggtaaaaaccgattaacacttctaatgagtcaagtcctagggttttttggttttgttttgttgccaacgaggaacacagctctgggggaatggtgtcatccacctcgctttaaaaataagcacatgatggctgggcaccgtggctcacgcctgtaatcccagcactttgggaggctgaggcgggtggatcacctgaggtcgggagtttgagaccagcctggccaacatggtgaaaccccatcgctactaaaaatataaaaaattagctgggcatggtggcgcacgcctgtagttccagctactcaggaggctgaggcaggagaatcgcttgaacccgggaggtggaggttgcagtgagctgagatcgcaccattgcactccagcctgggcaacaagagcgaaactctgtctcaaaaaaaaaaaaaaagaggtggggggattacttgaggtcagggtttgagatcagcctgaccaacattggtgaaaccctatctctacttaaaaatatagaattagccaggcatggtagcgcacgcctgtaatcccatcttcttgggaggctgaggcaggagaatcgctagaaactgggaggtggaggttacagtagccgagatcgcgccactgcattccagcctgggcaacaaaagcgaaactctgtctcaaaaaagaaaaaaaagaaaaaaaagcacgtgaccttatgaggctctcgctgtattgttattttaaggactataaagagtttgatttaaaattatgcagggcccctatgtgggattttttaaaaagcaaactggtgtgtattctcatgtggtttgcacagcccagcctcacagcactattgtaaaccctgctctttctgtctcgctagacagatttttttgtttgttttcttttttctggttgttttttgttgttgttgttgttgttttacagctgaaaccaaccagcaagcccttgatgaccaagaggcgtttctttcaaagctatagggcacaaacaattgaccatagatgactccgtttgcattcttctgcagaattatttccttcagggacagattttccaacctaagaaactacctaccgtgtgtattctcttgacggggagagatgaacccttcagctgctaagatccaagaaaacgcctcactgccttaaccttaactgttcttcctggcgctaaaaagagctgtattttttaaagtgctggggcaaacaaagcaaccccaaaagagttgatgtgtgttttaaaagaaaaaacccaatgaggaacaattggagatttttatgcagaaactaaataatccttaataaataaatctctattttggaatcaca

SEQ ID NO: 321694 - DNA, 1000 bp, Homo sapiens
ggcgacgctggcgtccccggagcctgcggcgggcggctgtgacggccccggcgctgacggcggcggccgggggggcggtgtcgacgcccgcggcgccggctggggcatcaccgcgggcctcgaccccgaaatggcgctgctggccgaacacttgctgaagccgctgcccgcggacaagcagatcgagaccgggcccttcctcgaggcggtgtcccacctgccgcccttcttcgattgccttgggtccccagtgtttactcccatcaaggcagacataagcggcaacatcacgaaaatcaaagctgtgtacgacaccaacccagccaagttccggaccctgcagaacatcctggaggtggagaaagaaatgtatggagcagagtggcccaaagtaggggccacactggcgctgatgtggctgaaaagaggcctccgcttcatccaggtcttcctccagagcatctgcgacggggagcgggacgagaaccaccccaacctcatccgtgtcaacgccaccaaggcctacgagatggccctcaagaagtaccatggctggatcgtgcagaagatcttccagttgttggagatggattctcgctctgtctcccaggctggagtgcagtggcacgatcttggcttactacaacctccgcctcctgagttccagtgattctcctgcctcagcctcctgagtagctgggactacaggcatgcgccaccaagcccaggacctccatggactcccagttgcccacccagggaccccagcttggaagtcctgaatcagcctgccttccttgggaccgaggcctagacactcccatccctgcctgtgccatcaccttcatatggaggctatctttgaagtgcccgtggccagctgtgactggccctacccacaggccaccacgcccagctgcccagaggaatggaatcacagccagtggctgggcagctgagagtagctgtgcccatggcaacggtcatctgagatgagctt

SEQ ID NO: 321695 - DNA, 629 bp, Homo sapiens
gcgcatcactaggatgttacacaaattcttttttgtttgaaaaatgttccagagataaaagtgcaaaagaagataatgaagtgttctaatatgaaatattcaaaactgaagcatgattgtctgcttaagacacttcccaagtatacaggattaatatttcttttctcacagctggcgcggagatctccaccgtgaacccagaacagtattcaaagcgctttttggactttattggccacatcttgacgtaacctcctgcgcagcctcggacagacatgaacattggatggacagaggtggcttcggtgtaggaaaaatgaaaaccaaactcagtgaagtactcatcttgcaggaagcaaacctccttgtttacatcttcaggccaagatgactgatttgggggctactcgctttacagctacctgattttcccagcatcgttctagctatttctgactttgtgtatatgtgtgtgtgtgtgttgggggggggtgagtgtgtgcgcgcgtgtgcattttaaaagtcataaattaattaaaacagatccacttcggtcagtatgtgtcccaacaaagaccctttgattccagctatggccgaatgaatgagtgagtgagtgagtgagtgaa

SEQ ID NO: 321696 - DNA, 700 bp, Homo sapiens
agccgcgggctgagcgcggatccgcggcgggcgcaggatacgggccggggcgcgagccgagcgcagtctgccgggccgagcgggcggagcgagccgagtggggctgagcgcgccggcggcggcgggcggagcggagcgcggcgcgccggggccgccgccggggggatgcggctgcctccccgggccggggtgtagagagggcgggtccccggcctcgggagcacggcggtggaggggacataggaggcggccatggcgacccccggcaacctagggtcctctgtcctggcgagcaagaccaagaccaagaagaagcacttcgtagcgcagaaagtgaagctgtttcgggccagcgacccgctgctcagcgtcctcatgtggggggtaaaccactcgatcaatgaactgagccatgttcaaatccctgttatgttgatgccagatgacttcaaagcctattcaaaaataaaggtggacaatcacctttttaacaaagaaaacatgccgagccatttcaagtttaaggaatactgcccgatggtcttccgtaacctgcgggagaggtttggaattgatgatcaagatttccaggtgagttgcgtttgtaacatttgcttccagtaggaaatgggttttgccatgacttttgctgtgtcaattgggatctatatttttgtcaataaaagtattatataatagt

SEQ ID NO: 321697 - DNA, 376 bp, Homo sapiens
tggatctttctgcgggttgtacctggttctaggaagcacacctgtgcttttggtaggcagtgaactctgaacccttctttggctacctgtggaactcagtggtggcagatgcaagtctgattgactctctctgagctttattccacgctgtgactgtttcagagaaaacatgccgagccatttcaagtttaaggaatactgcccgatggtcttccgtaacctgcgggagaggtttggaattgatgatcaagatttccaggtgagttgcgtttgtaacatttgcttccagtaggaaatgggttttgccatgacttttgctgtgtcaattgggatctatatttttgtcaataaaagtattatataatagtaattttca

SEQ ID NO: 321698 - DNA, 272 bp, Homo sapiens
ggggtgggggcggtgaaaggggcaaacttcagtgtccagggttggaaggtgtatgtggtttttttaggttttcttcaagcgcctttgtcattgtttttctcatttgttttaggccaaagaactgccaactctgaaagataatgatttcattaatgagggccaaaagatttatattgatgacaacaacaagaaggtcttcctggaaaaactaaaaaaggatgttgaggtaagaacagtcagtggagaggccagactcattgtataaatatcag

SEQ ID NO: 321699 - DNA, 1851 bp, Homo sapiens
agccgcgggctgagcgcggatccgcggcgggcgcaggatacgggccggggcgcgagccgagcgcagtctgccgggccgagcgggcggagcgagccgagtggggctgagcgcgccggcggcggcgggcggagcggagcgcggcgcgccggggccgccgccggggggatgcggctgcctccccgggccggggtgtagagagggcgggtccccggcctcgggagcacggcggtggaggggacataggaggcggccatggcgacccccggcaacctagggtcctctgtcctggcgagcaagaccaagaccaagaagaagcacttcgtagcgcagaaagtgaagctgtttcgggccagcgacccgctgctcagcgtcctcatgtggggggtaaaccactcgatcaatgaactgagccatgttcaaatccctgttatgttgatgccagatgacttcaaagcctattcaaaaataaaggtggacaatcacctttttaacaaagaaaacatgccgagccatttcaagtttaaggaatactgcccgatggtcttccgtaacctgcgggagaggtttggaattgatgatcaagatttccagaattccctgaccaggagcgcacccctccccaacgactcccaggcccgcagtggagctcgttttcacacttcctacgacaaaagatacatcatcaagactattaccagtgaagacgtggccgaaatgcacaacatcctgaagaaataccaccagtacatagtggaatgtcatgggatcacccttcttccccagttcttgggcatgtaccggcttaatgttgatggagttgaaatatatgtgatagttacaagaaatgtattcagccaccgtttgtctgtgtataggaaatacgacttaaagggctctacagtggctagagaagctagtgacaaagaaaaggccaaagaactgccaactctgaaagataatgatttcattaatgagggccaaaagatttatattgatgacaacaacaagaaggtcttcctggaaaaactaaaaaaggatgttgagtttctggcccagctgaagctcatggactacagtctgctggtgggaattcatgatgtggagagagccgaacaggaggaagtggagtgtgaggagaacgatggggaggaggagggcgagagcgatggcacccacccggtgggaacccccccagatagccccgggaatacactgaacagctcaccacccctggctcccggggagttcgatccgaacatcgacgtctatggaattaagtgccatgaaaactcgcctaggaaggaggtgtacttcatggcaattattgacatccttactcattatgatgcaaaaaagaaagctgcccatgctgcaaaaactgttaaacatggcgctggcgcggagatctccaccgtgaacccagaacagtattcaaagcgctttttggactttattggccacatcttgacgtaacctcctgcgcagcctcggacagacatgaacattggatggacagaggtggcttcggtgtaggaaaaatgaaaaccaaactcagtgaagtactcatcttgcaggaagcaaacctccttgtttacatcttcaggccaagatgactgatttgggggctactcgctttacagctacctgattttcccagcatcgttctagctatttctgactttgtgtatatgtgtgtgtgtgtgttgggggggggtgagtgtgtgcgcgcgtgtgcattttaaaagtcataaattaattaaaacagatccacttcggtcagtatgtgtcccaacaaagaccctttgattccagctatggccgaatgaatgagtgagtgagtgagtgagtgaa

SEQ ID NO: 321700 - DNA, 2498 bp, Homo sapiens
  misc_feature (984)..(984): n is a, c, g, or t
  misc_feature (1254)..(1254): n is a, c, g, or t
  misc_feature (1720)..(1720): n is a, c, g, or t
acatgacccggcggcagtagccgtggcagcagccgcggcggctccgcgagctcgccgggtgggctcagttcagcgcacgccggagccgagcgcagggggcggggaagggacctgctgcagctgcagccgcctgggcgctcctggagcgcgcggtgactcccccggtcggcccgctccatgcagctccgttgcggaagtgtagcggggggaggcggcggccaccgcggcactaagcacgagaggccggggctcggccccctgcagcactaggctctgggagccgcgcgcggcgcgtcccagtggcccgactcgccgtgcgcccggcgcccaccgcagcctgcatgccccgcgctgcgccttgcccggcccccgccgcctcctgctcgcaccgctgcagccgggcgccggagtaatatgctcactcgagtgaaatctgccgtggccaatttcatgggcggcatcatggctggcagctcaggctccgagcacggcggcggcagctgcggaggctcggacctgcccctgcgtttcccctacgggcggccagagttcctggggctgtctcaggacgaggtggagtgcagcgccgaccacatcgcccgccccatcctcatcctcaaggagactcggcggctgccctgggccactggctacgcagagtgagtgcagcgacaccggcggcgcccctgctctcctcgcggcccttccccgcacggttccagccctcttctctccctgcttctcggcctcagggctctcactagctgccggcgtccaggcctcggcggggagctctttacttacactggccatttccctcttctccccactccctcttcccccagcccaaggacgcggcgtctccagccccggtatgggtggtggaggggtgggtggcagcgctggagcgtgggaaagctaaggtgagacaggtctgtgaatccggggtctctgtcacttggggaaaaaaaacgggcagaaaanctctgaagtttgaaacacataaggaaaatctgctatctgtacccccaccctcccaaaatatagttgacgccccgcgtgatgaagagtttatgggggtggaggcttggaggagatgtcactgcgcctgggagcttgtgtccgattccgggaggtggccgtgtccgagtgcgtggttgtacatttccgaaggtctcagtttctctcactttcagcccgcgagttcctccgcttctcctttagcaggtagtaaaatgctgcgctttcggtaantgccagtactatttccctcagcccttggggagggggaaacttattccaactgtctaatataacattttggtaatccgctttggtgattaagcttgcgtttgactgatcagctatttcaggaaccgactgagttaggttgacgacccagagtggaatcgggaaaggagaggtggaggattttattgcccttcccccagctccatggccacttttccactgactattaataaccatcttatgaatggtaagataagtaacgttttcccttctatctactacctcagctgtacgaaacgggaaaactaggagacatttagaatagaattcaaggttattaatgaaccagggagtgcaaaagtgcacgcaaaacctggtggctggcacacctgcgccttttcctttaaccccatcccctcggtagttttggccctcccctatccgtgcacggcctcgctggttgattggntcgtccgggaaccaatcagctcttccaatgcctgggcgccttgatgctgaccctgttctggtggcccggataccccggggcaggcttggttcccgaccctaagggttccggtgggagagactgcttggaatctgctctgcttattatctctaattctcctttccttctcccatcatcctataaagcgtttctccatgggctgaaatggaaaacgtgtataaatggggctagacgattggagtgtgaaagtgaggaggcagaaatgcgctttgatgggagctcagacagtaaaaattaacacatcataaaagatgagcacggaagagaacgttgtgggtggcgaaggtacaaaatagcattgtaacttccaagagaaagccaaagcaaaaataaacacctgtgtaaggaaagacctaaaggagaaaaaagagcctgccaaacataccaaacactatttcttgactgaaataaaaacgttatttaaaagcccatttaggccgggcgcggtggttcacgcctgtaatcgcagcactttgggaggccgaggcgggcggatcacgtgaggtcaggagttcgagaccagcctgaataacatggagaaaccctgtctctactaaaaatacaaaaattagccgggcgtggtggcgcatgcctgtaatcccagctactcgggaggctgaggcgggagaatcgcttgaacccgggaggcagagatggcagtgagccaagatcgcgccattgcactccagcctgggcaacaagagcgaaactccttctc

SEQ ID NO: 321701 - DNA, 6471 bp, Homo sapiens
acatgacccggcggcagtagccgtggcagcagccgcggcggctccgcgagctcgccgggtgggctcagttcagcgcacgccggagccgagcgcagggggcggggaagggacctgctgcagctgcagccgcctgggcgctcctggagcgcgcggtgactcccccggtcggcccgctccatgcagctccgttgcggaagtgtagcggggggaggcggcggccaccgcggcactaagcacgagaggccggggctcggccccctgcagcactaggctctgggagccgcgcgcggcgcgtcccagtggcccgactcgccgtgcgcccggcgcccaccgcagcctgcatgccccgcgctgcgccttgcccggcccccgccgcctcctgctcgcaccgctgcagccgggcgccggagtaatatgctcactcgagtgaaatctgccgtggccaatttcatgggcggcatcatggctggcagctcaggctccgagcacggcggcggcagctgcggaggctcggacctgcccctgcgtttcccctacgggcggccagagttcctggggctgtctcaggacgaggtggagtgcagcgccgaccacatcgcccgccccatcctcatcctcaaggagactcggcggctgccctgggccactggctacgcagaggttatcaatgccgggaagagcacacacaatgaagaccaagccagctgtgaggtgctcactgtgaagaagaaggcaggggccgtgacctcaaccccaaacaggaactcatccaagagacggtcctcccttcccaatggggaagggctgcagctgaaggagaactcggaatccgagggtgtttcctgccactattggtcgctgtttgacgggcacgcggggtccggggccgcggtggtggcgtcacgcctgctgcagcaccacatcacggagcagctgcaggacatcgtggacatcctgaagaactccgccgtcctgccccctacctgcctgggggaggagcctgagaacacgcccgccaacagccggactctgacccgggcagcctccctgcgcggaggggtgggggccccgggctcccccagcacgccccccacacgcttctttaccgagaagaagattccccatgagtgcctggtcatcggagcgcttgaaagtgcattcaaggaaatggacctacagatagaacgagagaggagttcatataatatatctggtggctgcacggccctcattgtgatttgccttttggggaagctgtatgttgcaaatgctggggatagcagggccataatcatcagaaatggagaaattatccccatgtcttcagaatttacccccgagacggagcgccagcgacttcagtacctggcattcatgcagcctcacttgctgggaaatgagttcacacatttggagtttccaaggagagtacagagaaaggagcttggaaagaagatgctctacagggactttaatatgacaggctgggcatacaaaaccattgaggatgaggacttgaagttcccccttatatatggagaaggcaagaaggcccgggtaatggcaactattggagtgaccaggggacttggggaccatgacctgaaggtgcatgactccaacatctacattaaaccattcctgtcttcagctccagaggtaagaatctacgatctttcaaaatatgatcatggatcagatgatgtgctgatcttggccactgatggactctgggacgttttatcaaatgaagaagtagcagaagcaatcactcagtttcttcctaactgtgatccagatgatcctcacaggtacacactggcagctcaggacctggtgatgcgtgcccggggtgtgctgaaggacagaggatggcggatatctaatgaccgactgggctcaggagacgacatttctgtatatgtcattcctttaatacatggaaacaagctgtcatgaaaatggcccaggggattgggaggacagaggggaagaaagctgggatgcctcttggcaggacggaactgggaagtgccccagctgagttccaagtgatgcagtctcttcccagcccaagcggggagttcatggccaaaagactatgcttcaagatgaccctttggtttccatttcttctttagtaacaggtcaactcaacaagagcaaaacacaaaggctgctaccaagtgttgttgtatttcagttcctttcataggcctccgaggtggccattgactatttggggtatatatgtcatatttattttatctagagtagctggggcagccattttcaggtgtaaatggcagaggactcttcagcctgtcaagctgccagcttatctacgggttaaaaagtgctgcattggaaagtagggggtcatgcctcaaaatgtaagtaagtgcccaccttctaggaagcctgaggtttatttcagggattgccgtctgccccccgccccccttctctttttttcttctctgtttctattcttttatggcagtggtggagtgaggcagggatttttttttttttttttcgtgtttttgacattccttgaatctgttttttattccccttccacagaacaggcctgggactttccaacaccctgctaaggaagttctgtgtccaagtcccacccaggctgggttgtccccacctcctccagcccacacagcccaggcagcatccgggccagtgccctgcatgacagagggtctttgttgtgtaatgtttgttcccaagttgcattttctaaccgaatcagtgtgttttcatgaaactgagtgtttctgtggaccagtagttcctctgttgtcttcagtggtcttcctgtgtggctcaagggttctctgtgagagtctggattttcatttctggaatggctggccccatcccacttttctgtatcatggggacacatataaagcagtgtttaatagagcagtttaagaagttgcttgcatctgttggttcaccatggctcatctggggaccattttggattcatgtttcatggcttgtgactgtccccaagcccactccaaacaaagtgtaaggatcagagttctgtcaaggagcagcagttctgctctccccatcatctttgtgcaaggcccctcggggggcactttaataaaagaatttgaaatgggttgactggccattctcatgctgtgctccctgtctcttctcttctctaaagaatcatgtcccagctcctcaaggtccctctatggttccacatctgagtgttcgccacaagagcagcagcagcaggcacagtgcatgccatatctacctgctgcttctctgctgggaggaatggccaagtagattataaaactcacttctgtctcttaggcagacttgtacggccacaaaattacctagtcttcttcctgctgagctactgaggtattgccaccattttgacaactttgagtaattaaaacactcttctgacccaaaaaggaaaaaaggtcactgacgtgacccccccagcatgctagagagctaattccagttctcatatttgtttgaatttcttcccagaggagaggataggaacctctcctccagggcagtaaatcacctgcatttctggagttgtcggtattgtattcgaaaaggcctggagcccctcctgctcaggaaagaactcattccagggtgtggagacagtgccgtctggcaggtgaaatactgtgggaattcacgccaccaggtgtttgtgcaagtgttggcctgggaagaatgggacttcggccttgtcaggagttgtcttcatctgcagcacgtttcttcctcctgcagtagatcttagctaccccagatatctctatggagagaagtttgtggaaaatgctttgcttcgtggcagagtctgatgctgtaggaaaaccttcgggcatgtgacagcagtgtggtccactccctgttctgccctggcgctcagagtcatgtgtaagtaggaaacctgagcaagtcttccgtggaggaccctgagctgccgtctttgggatccttcctgtgtccccaccgtctttcatttatttgctttcctgggcctctatctgggccctaccttgagcttctccagttttattcaagccaccagagtaagaatttgggtgtagatgtcacaactaccttctactcaattcaccaattcatttactgctatggcacgtctcaggaataactctagaaacctctaaatcgaaatattataaaatcttgagcacttagtcctgctggttttagttagaaaggcatccaggaattgttttcctacgcccccttgagtggaaagatcttagttagaagataaagtcaagtttgtgttcaggggatgggaggaagactataaataagatgaagaaatcaaaagtaggaaacatgatgtaaacgaagcatggcagatctgtccagcactgatattgctctataaattgagcttactcagttttggccttatttttttacccaggccccatgtcacccagtcctaaaacagtaaccgtgtctacataacgggttggcccctggtgcatccctggaaaagtcaaaggacgcacacttcgaaattctgcagaacgtatttatacatggttcagaaatcttgcgtatctgacttatagccaaatctgcttgctcgaatagcctcagaggaagtcttgtttaataaaaaccttttgatttcctagtcaagtctttatggttgtctcgaggggtgtgtggctactttaatgaaaggctttcctgctctaaatctctttgctgggctgggcctcttcagactatctggtgaaactcctttccttagaacaaactcagtccgtccatgctctgtggcattttgctagatgataaccaaagccttattcctgtagccagtgtcagcagtcagagaggtggagggtgtgttctgctgtggttatgcatacctatctgctgttcttgaggtgtaaaaggaaaggtgaaaatcgggccaggccaagtactcagctgtcttaataggatgaagccttaagcagtggaaatttcagttattttccacagtattccattttggaggatttggggtgtttactttttaaattcttgaacaacttaacctccatgaggctttgtgaagtcagctgtgaccaccctcctcttactgtgttctcagtattcattcacttccagggaagaatgacagccacagggagatggtggtgggcaagaatgagagtcccaggatccagatttagcctcagatcttccccattcaggaagggttttccatttaacaagagcactagtatgaaaacattagggacaaatctcccatgtctttgaaattcggattctcctcttgagatccccttcctcacctgccaatcaactttataaggccacaagtggtcactggttttccttccacaggtttgaggttctcagctttccttaagcgacccagcagctccgctgttttcagagtgaatatgttaagctttgatgagattctattttcagtaagttagtgcttctgggacacttggagaaagctgtgagagtcattgtctacgcaaagaacaacgaagctgatcctaaaagtgatccaatctaagaaaatggtaaaacgagctctggccacagcacagaattttatgtgaggaactcagatttttgaagacttaacaattgcagagaaaggttgcagcctgcacaccatagcccacctctctgagcagactttggttttgtgtggtgacgtggcacatgtttgtacactgggatttttcaaaggacgctacgcgagcagactgacttgcctcttctgtgagcactgtggcttttgtcagatggagtgccggtctgcagaggactgctctttcgaatccacagtgttatctgtgtaaatagctttaatttttcttctgtgtcttaggtgaagttttgttcatgtagcaaccaggtagacagtgaccaaataaggctgtaaatgtgctgtagttttctactgtgatgtacttgaaggagaacctgtgtcctctacttttctgatctcccacaagtattttgtgtttgtttcctgagtcctgaggttattattttactcctgttttgcccccagttttctttgttttttttctggagacccagggaggcccatggtggagatcatttgtaaggaatggatcatggtctgggtttccaaaactaccctagtacagtgaatgagagaaatctgcctggaaattgtttcagaaccatgtacctttatgctttgtgattgtgaaacattgacttttttgtaaccccaaaatgaaaactgtttagtaaaggggatctattttgtgtgttttgaaacttaggtgcaatgtcccctggaaaaagctaaagaaatgtatatgttcaatgacattttaaaataaaatattatatatatgtatatacgacatattcagcaaaaaaaat

SEQ ID NO: 321702 - DNA, 1055 bp, Homo sapiens
  misc_feature (25)..(25): n is a, c, g, or t
atcagctcgcccagatttaccgganactctcacagctttccttaagcgacccagcagctccgctgttttcagagtgaatatgttaagctttgatgagattctattttcagtaagttagtgcttctgggacacttggagaaagctgtgagagtcattgtctacgcaaagaacaacgaagctgatcctaaaagtgatccaatctaagaaaatggtaaaacgagctctggccacagcacagaattttatgtgaggaactcagatttttgaagacttaacaattgcagagaaaggttgcagcctgcacaccatagcccacctctctgagcagactttggttttgtgtggtgacgtggcacatgtttgtacactgggatttttcaaaggacgctacgcgagcagactgacttgcctcttctgtgagcactgtggcttttgtcagatggagtgccggtctgcagaggactgctctttcgaatccacagtgttatctgtgtaaatagctttaatttttcttctgtgtcttaggtgaagttttgttcatgtagcaaccaggtagacagtgaccaaataaggctgtaaatgtgctgtagttttctactgtgatgtacttgaaggagaacctgtgtcctctacttttctgatctcccacaagtattttgtgtttgtttcctgagtcctgaggttattattttactcctgttttgcccccagttttctttgttttttttctggagacccagggaggcccatggtggagatcatttgtaaggaatggatcatggtctgggtttccaaaactaccctagtacagtgaatgagagaaatctgcctggaaattgtttcagaaccatgtacctttatgctttgtgattgtgaaacattgacttttttgtaaccccaaaatgaaaactgtttagtaaaggggatctattttgtgtgttttgaaacttaggtgcaatgtcccctggaaaaagctaaagaaatgtatatgttcaatgacattttaaaataaaatattatatatatgtatatacgacatattcagcaaaaaaaat

SEQ ID NO: 321703 - DNA, 1934 bp, Homo sapiens
acatgacccggcggcagtagccgtggcagcagccgcggcggctccgcgagctcgccgggtgggctcagttcagcgcacgccggagccgagcgcagggggcggggaagggacctgctgcagctgcagccgcctgggcgctcctggagcgcgcggtgactcccccggtcggcccgctccatgcagctccgttgcggaagtgtagcggggggaggcggcggccaccgcggcactaagcacgagaggccggggctcggccccctgcagcactaggctctgggagccgcgcgcggcgcgtcccagtggcccgactcgccgtgcgcccggcgcccaccgcagcctgcatgccccgcgctgcgccttgcccggcccccgccgcctcctgctcgcaccgctgcagccgggcgccggagtaatatgctcactcgagtgaaatctgccgtggccaatttcatgggcggcatcatggctggcagctcaggctccgagcacggcggcggcagctgcggaggctcggacctgcccctgcgtttcccctacgggcggccagagttcctggggctgtctcaggacgaggtggagtgcagcgccgaccacatcgcccgccccatcctcatcctcaaggagactcggcggctgccctgggccactggctacgcagaggttatcaatgccgggaagagcacacacaatgaagaccaagccagctgtgaggtgctcactgtgaagaagaaggcaggggccgtgacctcaaccccaaacaggaactcatccaagagacggtcctcccttcccaatggggaagggctgcagctgaaggagaactcggaatccgagggtgtttcctgccactattggtcgctgtttgacgggcacgcggggtccggggccgcggtggtggcgtcacgcctgctgcagcaccacatcacggagcagctgcaggacatcgtggacatcctgaagaactccgccgtcctgccccctacctgcctgggggaggagcctgagaacacgcccgccaacagccggactctgacccgggcagcctccctgcgcggaggggtgggggccccgggctcccccagcacgccccccacacgcttctttaccgagaagaagattccccatgagtgcctggtcatcggagcgcttgaaagtgcattcaaggaaatggacctacagatagaacgagagaggagttcatataatatatctggtggctgcacggccctcattgtgatttgccttttggggaagctgtatgttgcaaatgctggggatagcagggccataatcatcagaaatggagaaattatccccatgtcttcagaatttacccccgagacggagcgccagcgacttcagtacctggcattcatgcagcctcacttgctgggaaatgagttcacacatttggagtttccaaggagagtacagagaaaggagcttggaaagaagatgctctacagggactttaatatgacaggctgggcatacaaaaccattgaggatgaggacttgaagttcccccttatatatggagaaggcaagaaggcccgggtaatggcaactattggagtgaccaggggacttggggaccatgacctgaaggtgcatgactccaacatctacattaaaccattcctgtcttcagctccagaggtaagaatctacgatctttcaaaatatgatcatggatcagatgatgtgctgatcttggccactgatggactctgggacgttttatcaaatgaagaagtagcagaagcaatcactcagtttcttcctaactgtgatccagatgatcctcacaggtttgtgcatttctacaattgtagggttgttcctcaagcattcttcccaggacaagctggaatggcaacaccgcacgggacccctagggagttgcggccgccgggcccggaagggtgtgggga

SEQ ID NO: 321704 - DNA, 780 bp, Homo sapiens
caggtaatgcaagaaaggtttcaagtgagtgcattaaatagaatgtctcgttactcctagacaaatacatgtagagcagctactaagaatcctgaattggttttatctcccccacagactgagacctcctctgaagcagaaaaatcagatatttaactttgcatttatagcacttggcacagggtaggcccttaataaatgtttgctgaatgaatacgcaaaggaagacagcaaacaagctcactgctgatcttctggctagcataaaatccacttataaatcatcattctgactatacctcagacattacattttcaattaatttcttctatgtcaattactaagcccaccgcttaggctcattcacaaatgtgtattaggccccatgtgtctatatagcaagtctccaagggagactatccctggccacacagctcgctgtataatcaagtaccctacaatgcatatctgaaaaccactaggctgggcaggaaaagggaaggggaatcagaagtcagtttgttagggagaataatatgcttccaatttcttaagtggtagtattcttgttttttttcaggtaagaatctacgatctttcaaaatatgatcatggatcagatgatgtgctgatcttggccactgatggactctgggacgttttatcaaatgaagaagtagcagaagcaatcactcagtttcttcctaactgtgatccagatgatcctcacaggtttgtgcatttctacaattgtagggttgttcctcaagcattcttcc

SEQ ID NO: 321705 - DNA, 1903 bp, Homo sapiens
acatgacccggcggcagtagccgtggcagcagccgcggcggctccgcgagctcgccgggtgggctcagttcagcgcacgccggagccgagcgcagggggcggggaagggacctgctgcagctgcagccgcctgggcgctcctggagcgcgcggtgactcccccggtcggcccgctccatgcagctccgttgcggaagtgtagcggggggaggcggcggccaccgcggcactaagcacgagaggccggggctcggccccctgcagcactaggctctgggagccgcgcgcggcgcgtcccagtggcccgactcgccgtgcgcccggcgcccaccgcagcctgcatgccccgcgctgcgccttgcccggcccccgccgcctcctgctcgcaccgctgcagccgggcgccggagtaatatgctcactcgagtgaaatctgccgtggccaatttcatgggcggcatcatggctggcagctcaggctccgagcacggcggcggcagctgcggaggctcggacctgcccctgcgtttcccctacgggcggccagagttcctggggctgtctcaggacgaggtggagtgcagcgccgaccacatcgcccgccccatcctcatcctcaaggagactcggcggctgccctgggccactggctacgcagaggttatcaatgccgggaagagcacacacaatgaagaccaagccagctgtgaggtgctcactgtgaagaagaaggcaggggccgtgacctcaaccccaaacaggaactcatccaagagacggtcctcccttcccaatggggaagggctgcagctgaaggagaactcggaatccgagggtgtttcctgccactattggtcgctgtttgacgggctcccccagcacgccccccacacgcttctttaccgagaagaagattccccatgagtgcctggtcatcggagcgcttgaaagtgcattcaaggaaatggacctacagatagaacgagagaggagttcatataatatatctggtggctgcacggccctcattgtgatttgccttttggggaagctgtatgttgcaaatgctggggatagcagggccataatcatcagaaatggagaaattatccccatgtcttcagaatttacccccgagacggagcgccagcgacttcagtacctggcattcatgcagcctcacttgctgggaaatgagttcacacatttggagtttccaaggagagtacagagaaaggagcttggaaagaagatgctctacagggactttaatatgacaggctgggcatacaaaaccattgaggatgaggacttgaagttcccccttatatatggagaaggcaagaaggcccgggtaatggcaactattggagtgaccaggggacttggggaccatgacctgaaggtgcatgactccaacatctacattaaaccattcctgtcttcagctccagaggtaagaatctacgatctttcaaaatatgatcatggatcagatgatgtgctgatcttggccactgatggactctgggacgttttatcaaatgaagaagtagcagaagcaatcactcagtttcttcctaactgtgatccagatgatcctcacaggtacacactggcagctcaggacctggtgatgcgtgcccggggtgtgctgaaggacagaggatggcggatatctaatgaccgactgggctcaggagacgacatttctgtatatgtcattcctttaatacatggaaacaagctgtcatgaaaatggcccaggggattgggaggacagaggggaagaaagctgggatgcctcttggacacagaacttccttagcagggtgttggaaagtcccaggcctgttctgtggaaggggaataaaaaacagattcaaggaatgtcaaaaacacg

SEQ ID NO: 321706 - DNA, 2388 bp, Homo sapiens
acatgacccggcggcagtagccgtggcagcagccgcggcggctccgcgagctcgccgggtgggctcagttcagcgcacgccggagccgagcgcagggggcggggaagggacctgctgcagctgcagccgcctgggcgctcctggagcgcgcggtgactcccccggtcggcccgctccatgcagctccgttgcggaagtgtagcggggggaggcggcggccaccgcggcactaagcacgagaggccggggctcggccccctgcagcactaggctctgggagccgcgcgcggcgcgtcccagtggcccgactcgccgtgcgcccggcgcccaccgcagcctgcatgccccgcgctgcgccttgcccggcccccgccgcctcctgctcgcaccgctgcagccgggcgccggagtaatatgctcactcgagtgaaatctgccgtggccaatttcatgggcggcatcatggctggcagctcaggctccgagcacggcggcggcagctgcggaggctcggacctgcccctgcgtttcccctacgggcggccagagttcctggggctgtctcaggacgaggtggagtgcagcgccgaccacatcgcccgccccatcctcatcctcaaggagactcggcggctgccctgggccactggctacgcagaggttatcaatgccgggaagagcacacacaatgaagaccaagccagctgtgaggtgctcactgtgaagaagaaggcaggggccgtgacctcaaccccaaacaggaactcatccaagagacggtcctcccttcccaatggggaagggctgcagctgaaggagaactcggaatccgagggtgtttcctgccactattggtcgctgtttgacgggcacgcggggtccggggccgcggtggtggcgtcacgcctgctgcagcaccacatcacggagcagctgcaggacatcgtggacatcctgaagaactccgccgtcctgccccctacctgcctgggggaggagcctgagaacacgcccgccaacagccggactctgacccgggcagcctccctgcgcggaggggtgggggccccgggctcccccagcacgccccccacacgcttctttaccgagaagaagattccccatgagtgcctggtcatcggagcgcttgaaagtgcattcaaggaaatggacctacagatagaacgagagaggagttcatataatatatctggtggctgcacggccctcattgtgatttgccttttggggaagctgtatgttgcaaatgctggggatagcagggccataatcatcagaaatggagaaattatccccatgtcttcagaatttacccccgagacggagcgccagcgacttcagtacctggcattcatgcagcctcacttgctgggaaatgagttcacacatttggagtttccaaggagagtacagagaaaggagcttggaaagaagatgctctacagggactttaatatgacaggctgggcatacaaaaccattgaggatgaggacttgaagttcccccttatatatggagaaggcaagaaggcccgggtaatggcaactattggagtgaccaggggacttggggaccatgacctgaaggtgcatgactccaacatctacattaaaccattcctgtcttcagctccagaggtaagaatctacgatctttcaaaatatgatcatggatcagatgatgtgctgatcttggccactgatggactctgggacgttttatcaaatgaagaagtagcagaagcaatcactcagtttcttcctaactgtgatccagatgatcctcacaggtacacactggcagctcaggacctggtgatgcgtgcccggggtgtgctgaaggacagaggatggcggatatctaatgaccgactgggctcaggagacgacatttctgtatatgtcattcctttaatacatggaaacaagctgtcatgaaaatggcccaggggattgggaggacagaggggaagaaagctgggatgcctcttggcaggacggaactgggaagtgccccagctgagttccaagtgatgcagtctcttcccagcccaagcggggagttcatggccaaaagactatgcttcaagatgaccctttggtttccatttcttctttagtaacaggtcaactcaacaagagcaaaacacaaaggctgctaccaagtgttgttgtatttcagttcctttcataggcctccgaggtggccattgactatttggggtatatatgtcatatttattttatctagagtagctggggcagccattttcaggtgtaaatggcagaggactcttcagcctgtcaagctgccagcttatctacgggttaaaaagtgctgcattccccaggccggaccgagctgat

SEQ ID NO: 321707 - DNA, 4566 bp, Homo sapiens
gcactgagggcaacggccgcgcgccggctccgagacgagcgacgcctggcgggagcgcgcggcagcggggcgggcgtggagcgtgcgggggccgcgcgctgcttctctgaggcaggacggcactgccgggaggcggcggtgacaacgacggcggtggtgacgggcaccgggctcgcgggtgagacacagtaacctggttgaactctgcatctggaaagctgaagactgaagaaagataagagacattgactagtctggaaacagggacatctttggaacttcgttttcatccacagtaaacttttgaagtgtcatcaattggaattgatttcttcatcttattctgcctattgggaagaacatggcttcaaggattttaagtttccctttagttttacatgaactttgtaggaaacagagcccttaaagggcttgggaataacaagaagagattgaagacagagaagcttgccctgttttccttgccccttcaaagaaaaggatttacagctcaaacttagaacagctgttgtccagctttagccatcaagagagaaataaattaaaccaccattgccagactacaagccctggtgaagtcagggtgtgggagtggtggcattgagaagactacctaaaagagacaaagactgcagtaaacaaagctcctctttaaagttggaaggggcctcaggttccttcttggattgaaatagaaatagaaacacagggcacacctcttttaggtgcagctcacattttatggaactgtagtcgtggaggtactatagtatctcagaagaatttttctttgcccaaagtttttttgccataccctgatattctctccttcttttgaagacctgcctccatccatgagctgtatcttgatctgtctgactgtccatgttttccacctgcaaccatttgcatgtgtacagcctactgtttgtctccagtttttaaactgtacaagttgtgtttcttaatcttcccttctgccttgttctggggaggtggttattcatcatttggaatcacctttccccctcccatgtgctttccttcatttgagatcttttgacctttggctttatttgggagggggaagggtgataaagttttctgtttccctggttttcttttgtactcctctctgttgcttccctcctcccattttcttgtctgttctgccgctgtgtgggcctgggctatgcggcagggcagatttcccatcagagctccaacatgcccgcagagtctggaaagagattcaaacccagcaagtatgtcccggtctctgcagccgccatcttcctagtgggagctacgacactcttctttgcctttacgtgtccaggactaagcctgtatgtgtcacctgcagtgcccatctacaatgcaattatgtttctctttgtgttggccaacttcagcatggccaccttcatggacccagggattttccctcgagctgaggaggatgaggacaaggaagatgatttccgagctcccctttacaaaacagtggagataaagggcatccaggtgcgcatgaaatggtgtgccacctgccgcttttaccgtccccctcgatgttcccactgcagtgtctgtgacaactgtgtggaggaatttgatcatcactgcccctgggtgaataactgtattggtcgccggaactaccgttattttttccttttcctcctttccctgacagcccacattatgggtgtgtttggctttggcctcctttatgtcctctaccacatagaggaactctcaggggtccgcacggctgtcacaatggcagtaatgtgtgtggctggcttattcttcatccctgtagctggcctcacgggatttcacgtggttctggtggccaggggacgcacaaccaatgaacaggttacgggtaaattccggggaggtgtgaaccccttcaccaatggctgctgtaacaatgtcagccgtgttctctgcagttctccagcacccaggtatttggggagaccaaagaaagagaagacaattgtaatcagacctcccttccttcgaccagaagtttcagatgggcagataactgtgaagatcatggataatggcatccagggagagctgaggagaacaaagtctaagggaagcctggagataacagagagccagtctgcagatgctgaacctccacctcctcctaagccagacctgagccgttacacagggttgcgaacacacctcggcctggctactaatgaggatagtagcttattggccaaggacagccccccgacacctaccatgtacaagtatcggccgggttacagtagcagcagtacgtcagctgccatgccgcattcctccagcgccaagttgagtcgtggggacagcttgaaggagccaacctcaattgcagagagcagccgtcaccccagctaccgctcagagcccagcttggaaccagagagcttccgttctcctacctttggcaaaagttttcacttcgatccactatccagtggctcacgctcctccagcctcaagtcagcccagggcacaggctttgagctgggccagttgcaatccattcgttcagagggcaccacctccacctcctataagagcctggccaaccagacacgcaatggaagcctatcttatgacagcttgctcacaccttcagacagccctgattttgagtcagtgcaggcagggcctgagccagacccacctttaggctatacctctcccttcctgtcagccaggctggcccagcaacgggaagctgagaggcacccacgtttggtgccaactggcccaacacaccgagagccctcaccagtccgttacgacaatctgtcgcgccacattgtggcctctctccaggaacgagagaagttgctgcgccagtcacccccactcccgggccgtgaggaagaaccaggcttgggggactcaggcattcagtcaacaccaggctcgggccatgcccctcgtactagttcctcctcagatgattcaaagagatcacctttgggcaagactccactgggacgcccagctgtcccccgttttggcaagccagatgggctaaggggccggggagtagggtcccctgaaccaggcccaacagccccatacctgggccgatcgatgtcttacagcagccaaaaagcccaacctggtgtctctgagacagaagaagtggccttgcagccattactgacacccaaagatgaagtacagctgaagaccacctacagcaaatccaacgggcagcccaagagcttaggctcagcctcccctggcccaggccagccacctctcagtagccccacgaggggaggagtcaagaaggtgtcaggggttggtggtaccacctatgagatttcggtgtgagccttcggcacctcccctccccaacgcctctgcgcctacaccaaagggccccaggtggccaccttccttccctcaaggggctcccctcccgtgcatggacattttttaaaccaccgattccaagaggatgaggagtgttttctaaaatgcagtaggcttggggagtcggagagttggggccctgagactggggtagcaacccccccttttatcttttaagaccttcccttccttgatccctggaccagactcagtggacatttgtgcaattgctcgccctggagggaaccagatcatttttaaaccagaaataattttttttattattgttacggattctatttttttcctcttctgcgttaccaggtgtgtgtgtacatataatatatatatatatatattataaatatcaaagaaattatatatctatcctgggatgggaaaatgagggagggatacatatacggagggggatcttactcttcccattcctcagaccagcaggaaaagaggggagacgtcagtctttttcctgtggttccctctcatttgtcccagttactaactacggaaatagcatcctctgctggtgctaagtgtgattaggaagaagcctggggagaggcgagtctggaattttggtcacaagagggaaggacttggagaggagaattagttttctaggctcattggcatttagtttccctaggaaaggggtcaaaacttcaagacactggtggtggtgggagatcaggaaaataacttggcctagctcaaacaatattggataatcccctccttgggggagagggattagagtgtgctcctactggccccttggagcctcccctagcttacacagttaacttgattttaaaatccaaggccaggagagaagaatccaaaaagcaatatttttcatcacatgccaaaaacgggggatagagagaaggagtggcaggcctaggcccctccgattgtcccttgggggttacccctcagcccacctcactatggtgctgggtagaggggatacctgggttctaacctctaaataggggagatcccagcctccacaaagaggcccttttattttttattctgattagccattttaaaccaacgaggaataaaaagaaatcctgatctaaccagcgcaaaaaaacttgt

SEQ ID NO: 321708 - DNA, 3392 bp, Homo sapiens
gcactgagggcaacggccgcgcgccggctccgagacgagcgacgcctggcgggagcgcgcggcagcggggcgggcgtggagcgtgcgggggccgcgcgctgcttctctgaggcaggacggcactgccgggaggcggcggtgacaacgacggcggtggtgacgggcaccgggctcgcgggtgtccaggactaagcctgtatgtgtcacctgcagtgcccatctacaatgcaattatgtttctctttgtgttggccaacttcagcatggccaccttcatggacccagggattttccctcgagctgaggaggatgaggacaaggaagatgatttccgagctcccctttacaaaacagtggagataaagggcatccaggtgcgcatgaaatggtgtgccacctgccgcttttaccgtccccctcgatgttcccactgcagtgtctgtgacaactgtgtggaggaatttgatcatcactgcccctgggtgaataactgtattggtcgccggaactaccgttattttttccttttcctcctttccctgacagcccacattatgggtgtgtttggctttggcctcctttatgtcctctaccacatagaggaactctcaggggtccgcacggctgtcacaatggcagtaatgtgtgtggctggcttattcttcatccctgtagctggcctcacgggatttcacgtggttctggtggccaggggacgcacaaccaatgaacaggttacgggtaaattccggggaggtgtgaaccccttcaccaatggctgctgtaacaatgtcagccgtgttctctgcagttctccagcacccaggtatttggggagaccaaagaaagagaagacaattgtaatcagacctcccttccttcgaccagaagtttcagatgggcagataactgtgaagatcatggataatggcatccagggagagctgaggagaacaaagtctaagggaagcctggagataacagagagccagtctgcagatgctgaacctccacctcctcctaagccagacctgagccgttacacagggttgcgaacacacctcggcctggctactaatgaggatagtagcttattggccaaggacagccccccgacacctaccatgtacaagtatcggccgggttacagtagcagcagtacgtcagctgccatgccgcattcctccagcgccaagttgagtcgtggggacagcttgaaggagccaacctcaattgcagagagcagccgtcaccccagctaccgctcagagcccagcttggaaccagagagcttccgttctcctacctttggcaaaagttttcacttcgatccactatccagtggctcacgctcctccagcctcaagtcagcccagggcacaggctttgagctgggccagttgcaatccattcgttcagagggcaccacctccacctcctataagagcctggccaaccagacacgcaatggaagcctatcttatgacagcttgctcacaccttcagacagccctgattttgagtcagtgcaggcagggcctgagccagacccacctttaggctatacctctcccttcctgtcagccaggctggcccagcaacgggaagctgagaggcacccacgtttggtgccaactggcccaacacaccgagagccctcaccagtccgttacgacaatctgtcgcgccacattgtggcctctctccaggaacgagagaagttgctgcgccagtcacccccactcccgggccgtgaggaagaaccaggcttgggggactcaggcattcagtcaacaccaggctcgggccatgcccctcgtactagttcctcctcagatgattcaaagagatcacctttgggcaagactccactgggacgcccagctgtcccccgttttggcaagccagatgggctaaggggccggggagtagggtcccctgaaccaggcccaacagccccatacctgggccgatcgatgtcttacagcagccaaaaagcccaacctggtgtctctgagacagaagaagtggccttgcagccattactgacacccaaagatgaagtacagctgaagaccacctacagcaaatccaacgggcagcccaagagcttaggctcagcctcccctggcccaggccagccacctctcagtagccccacgaggggaggagtcaagaaggtgtcaggggttggtggtaccacctatgagatttcggtgtgagccttcggcacctcccctccccaacgcctctgcgcctacaccaaagggccccaggtggccaccttccttccctcaaggggctcccctcccgtgcatggacattttttaaaccaccgattccaagaggatgaggagtgttttctaaaatgcagtaggcttggggagtcggagagttggggccctgagactggggtagcaacccccccttttatcttttaagaccttcccttccttgatccctggaccagactcagtggacatttgtgcaattgctcgccctggagggaaccagatcatttttaaaccagaaataattttttttattattgttacggattctatttttttcctcttctgcgttaccaggtgtgtgtgtacatataatatatatatatatatattataaatatcaaagaaattatatatctatcctgggatgggaaaatgagggagggatacatatacggagggggatcttactcttcccattcctcagaccagcaggaaaagaggggagacgtcagtctttttcctgtggttccctctcatttgtcccagttactaactacggaaatagcatcctctgctggtgctaagtgtgattaggaagaagcctggggagaggcgagtctggaattttggtcacaagagggaaggacttggagaggagaattagttttctaggctcattggcatttagtttccctaggaaaggggtcaaaacttcaagacactggtggtggtgggagatcaggaaaataacttggcctagctcaaacaatattggataatcccctccttgggggagagggattagagtgtgctcctactggccccttggagcctcccctagcttacacagttaacttgattttaaaatccaaggccaggagagaagaatccaaaaagcaatatttttcatcacatgccaaaaacgggggatagagagaaggagtggcaggcctaggcccctccgattgtcccttgggggttacccctcagcccacctcactatggtgctgggtagaggggatacctgggttctaacctctaaataggggagatcccagcctccacaaagaggcccttttattttttattctgattagccattttaaaccaacgaggaataaaaagaaatcctgatctaaccagcgcaaaaaaacttgt

SEQ ID NO: 321709 - DNA, 4453 bp, Homo sapiens
gcactgagggcaacggccgcgcgccggctccgagacgagcgacgcctggcgggagcgcgcggcagcggggcgggcgtggagcgtgcgggggccgcgcgctgcttctctgaggcaggacggcactgccgggaggcggcggtgacaacgacggcggtggtgacgggcaccgggctcgcgggtgagacacagtaacctggttgaactctgcatctggaaagctgaagactgaagaaagataagagacattgactagtctggaaacagggacatctttggaacttcgttttcatccacagtaaacttttgaagtgtcatcaattggaattgatttcttcatcttattctgcctattgggaagaacatggcttcaaggattttaagtttccctttagttttacatgaactttgtaggaaacagagcccttaaagggcttgggaataacaagaagagattgaagacagagaagcttgccctgttttccttgccccttcaaagaaaaggatttacagctcaaacttagaacagctgttgtccagctttagccatcaagagagaaataaattaaaccaccattgccagactacaagccctggtgaagtcagggtgtgggagtggtggcattgagaagactacctaaaagagacaaagactgcagtaaacaaagctcctctttaaagttggaaggggcctcaggttccttcttggattgaaatagaaatagaaacacagggcacacctcttttaggtgcagctcacattttatggaactgtagtcgtggaggtactatagtatctcagaagaatttttctttgcccaaagtttttttgccataccctgatattctctccttcttttgaagacctgcctccatccatgagctgtatcttgatctgtctgactgtccatgttttccacctgcaaccatttgcatgtgtacagcctactgtttgtctccagtttttaaactgtacaagttgtgtttcttaatcttcccttctgccttgttctggggaggtggttattcatcatttggaatcacctttccccctcccatgtgctttccttcatttgagatcttttgacctttggctttatttgggagggggaagggtgataaagttttctgtttccctggttttcttttgtactcctctctgttgcttccctcctcccattttcttgtctgttctgccgctgtgtgggcctgggctatgcggcagggcagatttcccatcagagctccaacatgcccgcagagtctggaaagagattcaaacccagcaagtatgtcccggtctctgcagccgccatcttcctagtgggagctacgacactcttctttgcctttacgtgtccaggactaagcctgtatgtgtcacctgcagtgcccatctacaatgcaattatgtttctctttgtgttggccaacttcagcatggccaccttcatggacccagggattttccctcgagctgaggaggatgaggacaaggaagatgatttccgagctcccctttacaaaacagtggagataaagggcatccaggtgcgcatgaaatggtgtgccacctgccgcttttaccgtccccctcgatgttcccactgcagtgtctgtgacaactgtgtggaggaatttgatcatcactgcccctgggtgaataactgtattggtcgccggaactaccgttattttttccttttcctcctttccctgacagcccacattatgggtgtgtttggctttggcctcctttatgtcctctaccacatagaggaactctcaggggtccgcacggctgtcacaatggcagtaatgtgtgtggctggcttattcttcatccctgtagctggcctcacgggatttcacgtggttctggtggccaggggacgcacaaccaatgaacaggttacgggtaaattccggggaggtgtgaaccccttcaccaatggctgctgtaacaatgtcagccgtgttctctgcagttctccagcacccaggtatttggggagaccaaagaaagagaagacaattgtaatcagacctcccttccttcgaccagaagtttcagatgggcagataactgtgaagatcatggataatggcatccagggagagctgaggagaacaaagtctaagggaagcctggagataacagagagccagtctgcagatgctgaacctccacctcctcctaagccagacctgagccgttacacagggttgcgaacacacctcggcctggctactaatgaggatagtagcttattggccaaggacagccccccgacacctaccatgtacaagtatcggccgggttacagtagcagcagtacgtcagctgccatgccgcattcctccagcgccaagttgagtcgtggggacagcttgaaggagccaacctcaattgcagagagcagccgtcaccccagctaccgctcagagcccagcttggaaccagagagcttccgttctcctacctttggcaaaagttttcacttcgatccactatccagtggctcacgctcctccagcctcaagtcagcccagggcacaggctttgagctgggccagttgcaatccattcgttcagagggcaccacctccacctcctataagagcctggccaaccagacacgcaatggaagcctatcttatgacagcttgctcacaccttcagacagccctgattttgagtcagtgcaggcagggcctgagccagacccacctttaggctatacctctcccttcctgtcagccaggctggcccagcaacgggaagctgagaggcacccacgtttggtgccaactggcccaacacaccgagagccctcaccagtccgttacgacaatctgtcgcgccacattgtggcctctctccaggaacgagagaagttgctgcgccagtcacccccactcccgggccgtgaggaagaaccaggcttgggggactcaggcattcagtcaacaccaggctcgggccatgcccctcgtactagttcctcctcagatgattcaaagagatcacctttgggcaagactccactgggacgcccagctgtcccccgttttggcaagccagatgggctaaggggccggggagtagggtcccctgaaccaggcccaacagccccatacctgggccgatcgatgtcttacagcagccaaaaagcccaacctggtgtctctgagacagaagaagtggccttgcagccattactgacacccaaagatgaagtacagctgaagaccacctacagcaaatccaacgggcagcccaagagcttaggctcagcctcccctggcccaggccagccacctctcagtagccccacgaggggaggagtcaagaaggtgtcaggggttggtggtaccacctatgagatttcggtgtgagccttcggcacctcccctccccaacgcctctgcgcctacaccaaagggccccaggtggccaccttccttccctcaaggggctcccctcccgtgcatggacattttttaaaccaccgattccaagaggatgaggagtgttttctaaaatgcagtaggcttggggagtcggagagttggggccctgagactggggtagcaacccccccttttatcttttaagaccttcccttccttgatccctggaccagactcagtggacatttgtgcaattgctcgccctggagggaaccagatcatttttaaaccagaaataattttttttattattgttacggattctatttttttcctcttctgcgttaccaggtgtgtgtgtacatataatatatatatatatatattataaatatcaaagaaattatatatctatcctgggatgggaaaatgagggagggatacatatacggagggggatcttactcttcccattcctcagaccagcaggaaaagaggggagacgtcagtctttttcctgtggttccctctcatttgtcccagttactaactacggaaatagcatcctctgctggtgctaagtgtgattaggaagaagcctggggagaggcgagtctggaattttggtcacaagagggaaggacttggagaggagaattagttttctaggctcattggcatttagtttccctaggaaaggggtcaaaacttcaagacactggtggtggtgggagatcaggaaaataacttggcctagctcaaacaatattggataatcccctccttgggggagagggattagagtgtgctcctactggccccttggagcctcccctagcttacacagttaacttgattttaaaatccaaggccaggagagaagaatccaaaaagcaatatttttcatcacatgccaaaaacgggggatagagagaaggagtggcaggcctaggcccctccgatattttttattctgattagccattttaaaccaacgaggaataaaaagaaatcctgatctaaccagcgcaaaaaaacttgt

SEQ ID NO: 321710 - DNA, 1523 bp, Homo sapiens
tagtagtacataggagagattgggaatcaggcttattttaagcagggcaataaaggggaatgtttgggtaagaaagtatggatatagaaaagaacatcatttttttctctgaacctttgaaactgtctccctttccaatgttttctgtcccatttcctgacacctacgtcttgtctcttctttccagagatgaagtacagctgaagaccacctacagcaaatccaacgggcagcccaagagcttaggctcagcctcccctggcccaggccagccacctctcagtagccccacgaggggaggagtcaagaaggtgtcaggggttggtggtaccacctatgagatttcggtgtgagccttcggcacctcccctccccaacgcctctgcgcctacaccaaagggccccaggtggccaccttccttccctcaaggggctcccctcccgtgcatggacattttttaaaccaccgattccaagaggatgaggagtgttttctaaaatgcagtaggcttggggagtcggagagttggggccctgagactggggtagcaacccccccttttatcttttaagaccttcccttccttgatccctggaccagactcagtggacatttgtgcaattgctcgccctggagggaaccagatcatttttaaaccagaaataattttttttattattgttacggattctatttttttcctcttctgcgttaccaggtgtgtgtgtacatataatatatatatatatatattataaatatcaaagaaattatatatctatcctgggatgggaaaatgagggagggatacatatacggagggggatcttactcttcccattcctcagaccagcaggaaaagaggggagacgtcagtctttttcctgtggttccctctcatttgtcccagttactaactacggaaatagcatcctctgctggtgctaagtgtgattaggaagaagcctggggagaggcgagtctggaattttggtcacaagagggaaggacttggagaggagaattagttttctaggctcattggcatttagtttccctaggaaaggggtcaaaacttcaagacactggtggtggtgggagatcaggaaaataacttggcctagctcaaacaatattggataatcccctccttgggggagagggattagagtgtgctcctactggccccttggagcctcccctagcttacacagttaacttgattttaaaatccaaggccaggagagaagaatccaaaaagcaatatttttcatcacatgccaaaaacgggggatagagagaaggagtggcaggcctaggcccctccgattgtcccttgggggttacccctcagcccacctcactatggtgctgggtagaggggatacctgggttctaacctctaaataggggagatcccagcctccacaaagaggcccttttattttttattctgattagccattttaaaccaacgaggaataaaaagaaatcctgatctaaccagcgcaaaaaaacttgt

SEQ ID NO: 321711 - DNA, 1756 bp, Homo sapiens
tagtagtacataggagagattgggaatcaggcttattttaagcagggcaataaaggggaatgtttgggtaagaaagtatggatatagaaaagaacatcatttttttctctgaacctttgaaactgtctccctttccaatgttttctgtcccatttcctgacacctacgtcttgtctcttctttccagagatgaagtacagctgaagaccacctacagcaaatccaacgggcagcccaagagcttaggctcagcctcccctggcccaggccagccacctctcgcaatggaagcctatcttatgacagcttgctcacaccttcagacagccctgattttgagtcagtgcaggcagggctgagccagacccacctttaggctatacctctcccttcctgtcagccaggctggccagcaacgggaagctgagaggcaccacgtttggtgccaactggcccaacacaccgagagccctcaccagtccgttacgacaatctgtcgcgccacattgtggatagtagccccacgaggggaggagtcaagaaggtgtcaggggttggtggtaccacctatgagatttcggtgtgagccttcggcacctcccctccccaacgcctctgcgcctacaccaaagggccccaggtggccaccttccttccctcaaggggctcccctcccgtgcatggacattttttaaaccaccgattccaagaggatgaggagtgttttctaaaatgcagtaggcttggggagtcggagagttggggccctgagactggggtagcaacccccccttttatcttttaagaccttcccttccttgatccctggaccagactcagtggacatttgtgcaattgctcgccctggagggaaccagatcatttttaaaccagaaataattttttttattattgttacggattctatttttttcctcttctgcgttaccaggtgtgtgtgtacatataatatatatatatatatattataaatatcaaagaaattatatatctatcctgggatgggaaaatgagggagggatacatatacggagggggatcttactcttcccattcctcagaccagcaggaaaagaggggagacgtcagtctttttcctgtggttccctctcatttgtcccagttactaactacggaaatagcatcctctgctggtgctaagtgtgattaggaagaagcctggggagaggcgagtctggaattttggtcacaagagggaaggacttggagaggagaattagttttctaggctcattggcatttagtttccctaggaaaggggtcaaaacttcaagacactggtggtggtgggagatcaggaaaataacttggcctagctcaaacaatattggataatcccctccttgggggagagggattagagtgtgctcctactggccccttggagcctcccctagcttacacagttaacttgattttaaaatccaaggccaggagagaagaatccaaaaagcaatatttttcatcacatgccaaaaacgggggatagagagaaggagtggcaggcctaggcccctccgattgtcccttgggggttacccctcagcccacctcactatggtgctgggtagaggggatacctgggttctaacctctaaataggggagatcccagcctccacaaagaggcccttttattttttattctgattagccattttaaaccaacgaggaataaaaagaaatcctgatctaaccagcgcaaaaaaacttgt

SEQ ID NO: 321712 - DNA, 2515 bp, Homo sapiens
gcactgagggcaacggccgcgcgccggctccgagacgagcgacgcctggcgggagcgcgcggcagcggggcgggcgtggagcgtgcgggggccgcgcgctgcttctctgaggcaggacggcactgccgggaggcggcggtgacaacgacggcggtggtgacgggcaccgggctcgcgggtgagacacagtaacctggttgaactctgcatctggaaagctgaagactgaagaaagataagagacattgactagtctggaaacagggacatctttggaacttcgttttcatccacagtaaacttttgaagtgtcatcaattggaattgatttcttcatcttattctgcctattgggaagaacatggcttcaaggattttaagtttccctttagttttacatgaactttgtaggaaacagagcccttaaagggcttgggaataacaagaagagattgaagacagagaagcttgccctgttttccttgccccttcaaagaaaaggatttacagctcaaacttagaacagctgttgtccagctttagccatcaagagagaaataaattaaaccaccattgccagactacaagccctggtgaagtcagggtgtgggagtggtggcattgagaagactacctaaaagagacaaagactgcagtaaacaaagctcctctttaaagttggaaggggcctcaggttccttcttggattgaaatagaaatagaaacacagggcacacctcttttaggtgcagctcacattttatggaactgtagtcgtggaggtactatagtatctcagaagaatttttctttgcccaaagtttttttgccataccctgatattctctccttcttttgaagacctgcctccatccatgagctgtatcttgatctgtctgactgtccatgttttccacctgcaaccatttgcatgtgtacagcctactgtttgtctccagtttttaaactgtacaagttgtgtttcttaatcttcccttctgccttgttctggggaggtggttattcatcatttggaatcacctttccccctcccatgtgctttccttcatttgagatcttttgacctttggctttatttgggagggggaagggtgataaagttttctgtttccctggttttcttttgtactcctctctgttgcttccctcctcccattttcttgtctgttctgccgctgtgtgggcctgggctatgcggcagggcagatttcccatcagagctccaacatgcccgcagagtctggaaagagattcaaacccagcaagtatgtcccggtctctgcagccgccatcttcctagtgggagctacgacactcttctttgcctttacgtgtccaggactaagcctgtatgtgtcacctgcagtgcccatctacaatgcaattatgtttctctttgtgttggccaacttcagcatggccaccttcatggacccagggattttccctcgagctgaggaggatgaggacaaggaagatgatttccgagctcccctttacaaaacagtggagataaagggcatccaggtgcgcatgaaatggtgtgccacctgccgcttttaccgtccccctcgatgttcccactgcagtgtctgtgacaactgtgtggaggaatttgatcatcactgcccctgggtgaataactgtattggtcgccggaactaccgttattttttccttttcctcctttccctgacagcccacattatgggtgtgtttggctttggcctcctttatgtcctctaccacatagaggaactctcaggggtccgcacggctgtcacaatggcagtaatgtgtgtggctggcttattcttcatccctgtagctggcctcacgggatttcacgtggttctggtggccaggggacgcacaaccaatgaacaggttacgggtaaattccggggaggtgtgaaccccttcaccaatggctgctgtaacaatgtcagccgtgttctctgcagttctccagcacccaggtatttggggagaccaaagaaagagaagacaattgtaatcagacctcccttccttcgaccagaagtttcagatgggcagataactgtgaagatcatggataatggcatccagggagagctgaggagaacaaagtctaagggaagcctggagataacagagagccagtctgcagatgctgaacctccacctcctcctaagccagacctgagccgttacacagggttgcgaacacacctcggcctggctactaatgaggatagtagcttattggccaaggacagccccccgacacctaccatgtacaagtatcggccgggttacagtagcagcagtacgtcagctgccatgccgcattcctccagcgccaaggtactgagtactctaagaggtggggtaataacatgccaactggccaggcacagtggctcattcctgtaatcccagcactttgggagcccaaggtgggtggatcacaaggtcaagagattgagaccgtcctggccaacatggtgaa

SEQ ID NO: 321713 - DNA, 1925 bp, Homo sapiens
gcactgagggcaacggccgcgcgccggctccgagacgagcgacgcctggcgggagcgcgcggcagcggggcgggcgtggagcgtgcgggggccgcgcgctgcttctctgaggcaggacggcactgccgggaggcggcggtgacaacgacggcggtggtgacgggcaccgggctcgcgggtgagacacagtaacctggttgaactctgcatctggaaagctgaagactgaagaaagataagagacattgactagtctggaaacagggacatctttggaacttcgttttcatccacagtaaacttttgaagtgtcatcaattggaattgatttcttcatcttattctgcctattgggaagaacatggcttcaaggattttaagtttccctttagttttacatgaactttgtaggaaacagagcccttaaagggcttgggaataacaagaagagattgaagacagagaagcttgccctgttttccttgccccttcaaagaaaaggatttacagctcaaacttagaacagctgttgtccagctttagccatcaagagagaaataaattaaaccaccattgccagactacaagccctggtgaagtcagggtgtgggagtggtggcattgagaagactacctaaaagagacaaagactgcagtaaacaaagctcctctttaaagttggaaggggcctcaggttccttcttggattgaaatagaaatagaaacacagggcacacctcttttaggtgcagctcacattttatggaactgtagtcgtggaggtactatagtatctcagaagaatttttctttgcccaaagtttttttgccataccctgatattctctccttcttttgaagacctgcctccatccatgagctgtatcttgatctgtctgactgtccatgttttccacctgcaaccatttgcatgtgtacagcctactgtttgtctccagtttttaaactgtacaagttgtgtttcttaatcttcccttctgccttgttctggggaggtggttattcatcatttggaatcacctttccccctcccatgtgctttccttcatttgagatcttttgacctttggctttatttgggagggggaagggtgataaagttttctgtttccctggttttcttttgtactcctctctgttgcttccctcctcccattttcttgtctgttctgccgctgtgtgggcctgggctatgcggcagggcagatttcccatcagagctccaacatgcccgcagagtctggaaagagattcaaacccagcaagtatgtcccggtctctgcagccgccatcttcctagtgggagctacgacactcttctttgcctttacgtgtccaggactaagcctgtatgtgtcacctgcagtgcccatctacaatgcaattatgtttctctttgtgttggccaacttcagcatggccaccttcatggacccagggattttccctcgagctgaggaggatgaggacaaggaagatgatttccgagctcccctttacaaaacagtggagataaagggcatccaggtgcgcatgaaatggtgtgccacctgccgcttttaccgtccccctcgatgttcccactgcagtgtctgtgacaactgtgtggaggaatttgatcatcactgcccctgggtgaataactgtattggtcgccggaactaccgttattttttccttttcctcctttccctgacagcccacattatgggtgtgtttggctttggcctcctttatgtcctctaccacatagaggaactctcaggggtccgcacggctgtcacaatggcagtaatgtgtgtggctggcttattcttcatccctgtagctggcctcacgggatttcacataattctaataaccaaagaacccacaaccaataaaccaattacgaataaattcca

SEQ ID NO: 321714 - DNA, 1503 bp, Homo sapiens
gcactgagggcaacggccgcgcgccggctccgagacgagcgacgcctggcgggagcgcgcggcagcggggcgggcgtggagcgtgcgggggccgcgcgctgcttctctgaggcaggacggcactgccgggaggcggcggtgacaacgacggcggtggtgacgggcaccgggctcgcgggtgagacacagtaacctggttgaactctgcatctggaaagctgaagactgaagaaagataagagacattgactagtctggaaacagggacatctttggaacttcgttttcatccacagtaaacttttgaagtgtcatcaattggaattgatttcttcatcttattctgcctattgggaagaacatggcttcaaggattttaagtttccctttagttttacatgaactttgtaggaaacagagcccttaaagggcttgggaataacaagaagagattgaagacagagaagcttgccctgttttccttgccccttcaaagaaaaggatttacagctcaaacttagaacagctgttgtccagctttagccatcaagagagaaataaattaaaccaccattgccagactacaagccctggtgaagtcagggtgtgggagtggtggcattgagaagactacctaaaagagacaaagactgcagtaaacaaagctcctctttaaagttggaaggggcctcaggttccttcttggattgaaatagaaatagaaacacagggcacacctcttttaggtgcagctcacattttatggaactgtagtcgtggaggtactatagtatctcagaagaatttttctttgcccaaagtttttttgccataccctgatattctctccttcttttgaagacctgcctccatccatgagctgtatcttgatctgtctgactgtccatgttttccacctgcaaccatttgcatgtgtacagcctactgtttgtctccagtttttaaactgtacaagttgtgtttcttaatcttcccttctgccttgttctggggaggtggttattcatcatttggaatcacctttccccctcccatgtgctttccttcatttgagatcttttgacctttggctttatttgggagggggaagggtgataaagttttctgtttccctggttttcttttgtactcctctctgttgcttccctcctcccattttcttgtctgttctgccgctgtgtgggcctgggctatgcggcagggcagatttcccatcagagctccaacatgcccgcagagtctggaaagagattcaaacccagcaagtatgtcccggtctctgcagccgccatcttcgagattgagaccatcctggctaacatggtgaaaccccgtctctactaaaaatacaaaaaaattagccaggcatggtggcaggtgcctgtagtcccagctactcgggaggctgagccaggagaatggcatgaacccaggaagcggagcttgcagttagccgagatcatgccactgcactccagcctg

SEQ ID NO: 321715 - DNA, 546 bp, Homo sapiens
gcaaccatgaggtagacctaggatttgaactaaggaccctgactgtagattccctgctcttaaccataacatatataaatttcttgtgttttactcatttgcatagccctcagatagtgagtgcacaataacttgtaatagatttgtattttggcctttggaagtcaaggtctcatcttctaacctggtattttttttctccctctaggttacgggtaaattccggggaggtgtgaaccccttcaccaatggctgctgtaacaatgtcagccgtgttctctgcagttctccagcacccaggtacacctatccctctggtctagtgtttaccattggtcagaacttttatcttctttgggcttgttctggtaaaggaggggtctggtgagagcctttaggaagggttctctatcttagaatgttaagtacccactctatcttagaatggtaagtagtctatcttagaatggtaagtacctacatgcccatcctttagtgcagtggtccctaacctttttggcagcagggaccggtttcatgggagac

SEQ ID NO: 321716 - DNA, 4444 bp, Homo sapiens
gcactgagggcaacggccgcgcgccggctccgagacgagcgacgcctggcgggagcgcgcggcagcggggcgggcgtggagcgtgcgggggccgcgcgctgcttctctgaggcaggacggcactgccgggaggcggcggtgacaacgacggcggtggtgacgggcaccgggctcgcgggtgagacacagtaacctggttgaactctgcatctggaaagctgaagactgaagaaagataagagacattgactagtctggaaacagggacatctttggaacttcgttttcatccacagtaaacttttgaagtgtcatcaattggaattgatttcttcatcttattctgcctattgggaagaacatggcttcaaggattttaagtttccctttagttttacatgaactttgtaggaaacagagcccttaaagggcttgggaataacaagaagagattgaagacagagaagcttgccctgttttccttgccccttcaaagaaaaggatttacagctcaaacttagaacagctgttgtccagctttagccatcaagagagaaataaattaaaccaccattgccagactacaagccctggtgaagtcagggtgtgggagtggtggcattgagaagactacctaaaagagacaaagactgcagtaaacaaagctcctctttaaagttggaaggggcctcaggttccttcttggattgaaatagaaatagaaacacagggcacacctcttttaggtgcagctcacattttatggaactgtagtcgtggaggtactatagtatctcagaagaatttttctttgcccaaagtttttttgccataccctgatattctctccttcttttgaagacctgcctccatccatgagctgtatcttgatctgtctgactgtccatgttttccacctgcaaccatttgcatgtgtacagcctactgtttgtctccagtttttaaactgtacaagttgtgtttcttaatcttcccttctgccttgttctggggaggtggttattcatcatttggaatcacctttccccctcccatgtgctttccttcatttgagatcttttgacctttggctttatttgggagggggaagggtgataaagttttctgtttccctggttttcttttgtactcctctctgttgcttccctcctcccattttcttgtctgttctgccgctgtgtgggcctgggctatgcggcagggcagatttcccatcagagctccaacatgcccgcagagtctggaaagagattcaaacccagcaagtatgtcccggtctctgcagccgccatcttcctagtgggagctacgacactcttctttgcctttacctgaggaggatgaggacaaggaagatgatttccgagctcccctttacaaaacagtggagataaagggcatccaggtgcgcatgaaatggtgtgccacctgccgcttttaccgtccccctcgatgttcccactgcagtgtctgtgacaactgtgtggaggaatttgatcatcactgcccctgggtgaataactgtattggtcgccggaactaccgttattttttccttttcctcctttccctgacagcccacattatgggtgtgtttggctttggcctcctttatgtcctctaccacatagaggaactctcaggggtccgcacggctgtcacaatggcagtaatgtgtgtggctggcttattcttcatccctgtagctggcctcacgggatttcacgtggttctggtggccaggggacgcacaaccaatgaacaggttacgggtaaattccggggaggtgtgaaccccttcaccaatggctgctgtaacaatgtcagccgtgttctctgcagttctccagcacccaggtatttggggagaccaaagaaagagaagacaattgtaatcagacctcccttccttcgaccagaagtttcagatgggcagataactgtgaagatcatggataatggcatccagggagagctgaggagaacaaagtctaagggaagcctggagataacagagagccagtctgcagatgctgaacctccacctcctcctaagccagacctgagccgttacacagggttgcgaacacacctcggcctggctactaatgaggatagtagcttattggccaaggacagccccccgacacctaccatgtacaagtatcggccgggttacagtagcagcagtacgtcagctgccatgccgcattcctccagcgccaagttgagtcgtggggacagcttgaaggagccaacctcaattgcagagagcagccgtcaccccagctaccgctcagagcccagcttggaaccagagagcttccgttctcctacctttggcaaaagttttcacttcgatccactatccagtggctcacgctcctccagcctcaagtcagcccagggcacaggctttgagctgggccagttgcaatccattcgttcagagggcaccacctccacctcctataagagcctggccaaccagacacgcaatggaagcctatcttatgacagcttgctcacaccttcagacagccctgattttgagtcagtgcaggcagggcctgagccagacccacctttaggctatacctctcccttcctgtcagccaggctggcccagcaacgggaagctgagaggcacccacgtttggtgccaactggcccaacacaccgagagccctcaccagtccgttacgacaatctgtcgcgccacattgtggcctctctccaggaacgagagaagttgctgcgccagtcacccccactcccgggccgtgaggaagaaccaggcttgggggactcaggcattcagtcaacaccaggctcgggccatgcccctcgtactagttcctcctcagatgattcaaagagatcacctttgggcaagactccactgggacgcccagctgtcccccgttttggcaagccagatgggctaaggggccggggagtagggtcccctgaaccaggcccaacagccccatacctgggccgatcgatgtcttacagcagccaaaaagcccaacctggtgtctctgagacagaagaagtggccttgcagccattactgacacccaaagatgaagtacagctgaagaccacctacagcaaatccaacgggcagcccaagagcttaggctcagcctcccctggcccaggccagccacctctcagtagccccacgaggggaggagtcaagaaggtgtcaggggttggtggtaccacctatgagatttcggtgtgagccttcggcacctcccctccccaacgcctctgcgcctacaccaaagggccccaggtggccaccttccttccctcaaggggctcccctcccgtgcatggacattttttaaaccaccgattccaagaggatgaggagtgttttctaaaatgcagtaggcttggggagtcggagagttggggccctgagactggggtagcaacccccccttttatcttttaagaccttcccttccttgatccctggaccagactcagtggacatttgtgcaattgctcgccctggagggaaccagatcatttttaaaccagaaataattttttttattattgttacggattctatttttttcctcttctgcgttaccaggtgtgtgtgtacatataatatatatatatatatattataaatatcaaagaaattatatatctatcctgggatgggaaaatgagggagggatacatatacggagggggatcttactcttcccattcctcagaccagcaggaaaagaggggagacgtcagtctttttcctgtggttccctctcatttgtcccagttactaactacggaaatagcatcctctgctggtgctaagtgtgattaggaagaagcctggggagaggcgagtctggaattttggtcacaagagggaaggacttggagaggagaattagttttctaggctcattggcatttagtttccctaggaaaggggtcaaaacttcaagacactggtggtggtgggagatcaggaaaataacttggcctagctcaaacaatattggataatcccctccttgggggagagggattagagtgtgctcctactggccccttggagcctcccctagcttacacagttaacttgattttaaaatccaaggccaggagagaagaatccaaaaagcaatatttttcatcacatgccaaaaacgggggatagagagaaggagtggcaggcctaggcccctccgattgtcccttgggggttacccctcagcccacctcactatggtgctgggtagaggggatacctgggttctaacctctaaataggggagatcccagcctccacaaagaggcccttttattttttattctgattagccattttaaaccaacgaggaataaaaagaaatcctgatctaaccagcgcaaaaaaacttgt

SEQ ID NO: 321717 - DNA, 4512 bp, Homo sapiens
gcactgagggcaacggccgcgcgccggctccgagacgagcgacgcctggcgggagcgcgcggcagcggggcgggcgtggagcgtgcgggggccgcgcgctgcttctctgaggcaggacggcactgccgggaggcggcggtgacaacgacggcggtggtgacgggcaccgggctcgcgggtgagacacagtaacctggttgaactctgcatctggaaagctgaagactgaagaaagataagagacattgactagtctggaaacagggacatctttggaacttcgttttcatccacagtaaacttttgaagtgtcatcaattggaattgatttcttcatcttattctgcctattgggaagaacatggcttcaaggattttaagtttccctttagttttacatgaactttgtaggaaacagagcccttaaagggcttgggaataacaagaagagattgaagacagagaagcttgccctgttttccttgccccttcaaagaaaaggatttacagctcaaacttagaacagctgttgtccagctttagccatcaagagagaaataaattaaaccaccattgccagactacaagccctggtgaagtcagggtgtgggagtggtggcattgagaagactacctaaaagagacaaagactgcagtaaacaaagctcctctttaaagttggaaggggcctcaggttccttcttggattgaaatagaaatagaaacacagggcacacctcttttaggtgcagctcacattttatggaactgtagtcgtggaggtactatagtatctcagaagaatttttctttgcccaaagtttttttgccataccctgatattctctccttcttttgaagacctgcctccatccatgagctgtatcttgatctgtctgactgtccatgttttccacctgcaaccatttgcatgtgtacagcctactgtttgtctccagtttttaaactgtacaagttgtgtttcttaatcttcccttctgccttgttctggggaggtggttattcatcatttggaatcacctttccccctcccatgtgctttccttcatttgagatcttttgacctttggctttatttgggagggggaagggtgataaagttttctgtttccctggttttcttttgtactcctctctgttgcttccctcctcccattttcttgtctgttctgccgctgtgtgggcctgggctatgcggcagggcagatttcccatcagagctccaacatgcccgcagagtctggaaagagattcaaacccagcaagtatgtcccggtctctgcagccgccatcttcctagtgggagctacgacactcttctttgcctttacgtgtccaggactaagcctgtatgtgtcacctgcagtgcccatctacaatgcaattatgtttctctttgtgttggccaacttcagcatggccaccttcatggacccagggattttccctcgagctgaggaggatgaggacaaggaagatgatttccgagctcccctttacaaaacagtggagataaagggcatccaggtgcgcatgaaatggtgtgccacctgccgcttttaccgtccccctcgatgttcccactgcagtgtctgtgacaactgtgtggaggaatttgatcatcactgcccctgggtgaataactgtattggtcgccggaactaccgttattttttccttttcctcctttccctgacagcccacattatgggtgtgtttggctttggcctcctttatgtcctctaccacatagaggaactctcaggggtccgcacggctgtcacaatggcagtaatgtgtgtggctggcttattcttcatccctgtagctggcctcacgggatttcacgtggttctggtggccaggggacgcacaaccaatgaacaggttacgggtaaattccggggaggtgtgaaccccttcaccaatggctgctgtaacaatgtcagccgtgttctctgcagttctccagcacccaggtatttggggagaccaaagaaagagaagacaattgtaatcagacctcccttccttcgaccagaagtttcagatgggcagataactgtgaagatcatggataatggcatccagggagagctgaggagaacaaagtctaagggaagcctggagataacagagagccagtctgcagatgctgaacctccacctcctcctaagccagacctgagccgttacacagggttgcgaacacacctcggcctggctactaatgaggatagtagcttattggccaaggacagccccccgacacctaccatgtacaagtatcggccgggttacagtagcagcagtacgtcagctgccatgccgcattcctccagcgccaagttgagtcgtggggacagcttgaaggagccaacctcaattgcagagagcagccgtcaccccagctaccgctcagagcccagcttggaaccagagagcttccgttctcctacctttggcaaaagttttcacttcgatccactatccagtggctcacgctcctccagcctcaagtcagcccagggcacaggctttgagctgggccagttgcaatccattcgttcagagggcaccacctccacctcctataagagcctggccaaccagacacgcaatggaagcctatcttatgacagcttgctcacaccttcagacagccctgattttgagtcagtgcaggcagggcctgagccagacccacctttaggctatacctctcccttcctgtcagccaggctggcccagcaacgggaagctgagaggcacccacgtttggtgccaactggcccaacacaccgagagccctcaccagtccgttacgacaatctgtcgcgccacattgtggcctctctccaggaacgagagaagttgctgcgccagtcacccccactcccgggccgtgaggaagaaccaggcttgggggactcaggcattcagtcaacaccaggctcgggccatgcccctcgtactagttcctcctcagatgattcaaagagatcacctttgggcaagactccactgggacgcccagctgtcccccgttttggcaagccagatgggctaaggggccggggagtagggtcccctgaaccaggcccaacagccccatacctgggccgatcgatgtcttacagcagccaaaaagcccaacctggtgtctctgagacagaagaagtggccttgcagccattactgacacccaaagatgaagtacagctgaagaccacctacagcaaatccaacgggcagcccaagagcttaggctcagcctcccctggcccaggccagccacctctcagtagccccacgaggggaggagtcaagaaggtgtcaggggttggtggtaccacctatgagatttcggtgtgagccttcggcacctcccctccccaacgcctctgcgcctacaccaaagggccccaggtggccaccttccttccctcaaggggctcccctcccgtgcatggacattttttaaaccaccgattccaagaggatgaggagtgttttccaacccccccttttatcttttaagaccttcccttccttgatccctggaccagactcagtggacatttgtgcaattgctcgccctggagggaaccagatcatttttaaaccagaaataattttttttattattgttacggattctatttttttcctcttctgcgttaccaggtgtgtgtgtacatataatatatatatatatatattataaatatcaaagaaattatatatctatcctgggatgggaaaatgagggagggatacatatacggagggggatcttactcttcccattcctcagaccagcaggaaaagaggggagacgtcagtctttttcctgtggttccctctcatttgtcccagttactaactacggaaatagcatcctctgctggtgctaagtgtgattaggaagaagcctggggagaggcgagtctggaattttggtcacaagagggaaggacttggagaggagaattagttttctaggctcattggcatttagtttccctaggaaaggggtcaaaacttcaagacactggtggtggtgggagatcaggaaaataacttggcctagctcaaacaatattggataatcccctccttgggggagagggattagagtgtgctcctactggccccttggagcctcccctagcttacacagttaacttgattttaaaatccaaggccaggagagaagaatccaaaaagcaatatttttcatcacatgccaaaaacgggggatagagagaaggagtggcaggcctaggcccctccgattgtcccttgggggttacccctcagcccacctcactatggtgctgggtagaggggatacctgggttctaacctctaaataggggagatcccagcctccacaaagaggcccttttattttttattctgattagccattttaaaccaacgaggaataaaaagaaatcctgatctaaccagcgcaaaaaaacttgt

SEQ ID NO: 321718 - DNA, 2666 bp, Homo sapiens
gcactgagggcaacggccgcgcgccggctccgagacgagcgacgcctggcgggagcgcgcggcagcggggcgggcgtggagcgtgcgggggccgcgcgctgcttctctgaggcaggacggcactgccgggaggcggcggtgacaacgacggcggtggtgacgggcaccgggctcgcgggtgagacacagtaacctggttgaactctgcatctggaaagctgaagactgaagaaagataagagacattgactagtctggaaacagggacatctttggaacttcgttttcatccacagtaaacttttgaagtgtcatcaattggaattgatttcttcatcttattctgcctattgggaagaacatggcttcaaggattttaagtttccctttagttttacatgaactttgtaggaaacagagcccttaaagggcttgggaataacaagaagagattgaagacagagaagcttgccctgttttccttgccccttcaaagaaaaggatttacagctcaaacttagaacagctgttgtccagctttagccatcaagagagaaataaattaaaccaccattgccagactacaagccctggtgaagtcagggtgtgggagtggtggcattgagaagactacctaaaagagacaaagactgcagtaaacaaagctcctctttaaagttggaaggggcctcaggttccttcttggattgaaatagaaatagaaacacagggcacacctcttttaggtgcagctcacattttatggaactgtagtcgtggaggtactatagtatctcagaagaatttttctttgcccaaagtttttttgccataccctgatattctctccttcttttgaagacctgcctccatccatgagctgtatcttgatctgtctgactgtccatgttttccacctgcaaccatttgcatgtgtacagcctactgtttgtctccagtttttaaactgtacaagttgtgtttcttaatcttcccttctgccttgttctggggaggtggttattcatcatttggaatcacctttccccctcccatgtgctttccttcatttgagatcttttgacctttggctttatttgggagggggaagggtgataaagttttctgtttccctggttttcttttgtactcctctctgttgcttccctcctcccattttcttgtctgttctgccgctgtgtgggcctgggctatgcggcagggcagatttcccatcagagctccaacatgcccgcagagtctggaaagagattcaaacccagcaagtatgtcccggtctctgcagccgccatcttcctagtgggagctacgacactcttctttgcctttacgtgtccaggactaagcctgtatgtgtcacctgcagtgcccatctacaatgcaattatgtttctctttgtgttggccaacttcagcatggccaccttcatggacccagggattttccctcgagctgaggaggatgaggacaaggaagatgatttccgagctcccctttacaaaacagtggagataaagggcatccaggtgcgcatgaaatggtgtgccacctgccgcttttaccgtccccctcgatgttcccactgcagtgtctgtgacaactgtgtggaggaatttgatcatcactgcccctgggtgaataactgtattggggccctgagactggggtagcaacccccccttttatcttttaagaccttcccttccttgatccctggaccagactcagtggacatttgtgcaattgctcgccctggagggaaccagatcatttttaaaccagaaataattttttttattattgttacggattctatttttttcctcttctgcgttaccaggtgtgtgtgtacatataatatatatatatatatattataaatatcaaagaaattatatatctatcctgggatgggaaaatgagggagggatacatatacggagggggatcttactcttcccattcctcagaccagcaggaaaagaggggagacgtcagtctttttcctgtggttccctctcatttgtcccagttactaactacggaaatagcatcctctgctggtgctaagtgtgattaggaagaagcctggggagaggcgagtctggaattttggtcacaagagggaaggacttggagaggagaattagttttctaggctcattggcatttagtttccctaggaaaggggtcaaaacttcaagacactggtggtggtgggagatcaggaaaataacttggcctagctcaaacaatattggataatcccctccttgggggagagggattagagtgtgctcctactggccccttggagcctcccctagcttacacagttaacttgattttaaaatccaaggccaggagagaagaatccaaaaagcaatatttttcatcacatgccaaaaacgggggatagagagaaggagtggcaggcctaggcccctccgattgtcccttgggggttacccctcagcccacctcactatggtgctgggtagaggggatacctgggttctaacctctaaataggggagatcccagcctccacaaagaggcccttttattttttattctgattagccattttaaaccaacgaggaataaaaagaaatcctgatctaaccagcgcaaaaaaacttgt

SEQ ID NO: 321719 - DNA, 3549 bp, Homo sapiens
gcactgagggcaacggccgcgcgccggctccgagacgagcgacgcctggcgggagcgcgcggcagcggggcgggcgtggagcgtgcgggggccgcgcgctgcttctctgaggcaggacggcactgccgggaggcggcggtgacaacgacggcggtggtgacgggcaccgggctcgcgggtgagacacagtaacctggttgaactctgcatctggaaagctgaagactgaagaaagataagagacattgactagtctggaaacagggacatctttggaacttcgttttcatccacagtaaacttttgaagtgtcatcaattggaattgatttcttcatcttattctgcctattgggaagaacatggcttcaaggattttaagtttccctttagttttacatgaactttgtaggaaacagagcccttaaagggcttgggaataacaagaagagattgaagacagagaagcttgccctgttttccttgccccttcaaagaaaaggatttacagctcaaacttagaacagctgttgtccagctttagccatcaagagagaaataaattaaaccaccattgccagactacaagccctggtgaagtcagggtgtgggagtggtggcattgagaagactacctaaaagagacaaagactgcagtaaacaaagctcctctttaaagttggaaggggcctcaggttccttcttggattgaaatagaaatagaaacacagggcacacctcttttaggtgcagctcacattttatggaactgtagtcgtggaggtactatagtatctcagaagaatttttctttgcccaaagtttttttgccataccctgatattctctccttcttttgaagacctgcctccatccatgagctgtatcttgatctgtctgactgtccatgttttccacctgcaaccatttgcatgtgtacagcctactgtttgtctccagtttttaaactgtacaagttgtgtttcttaatcttcccttctgccttgttctggggaggtggttattcatcatttggaatcacctttccccctcccatgtgctttccttcatttgagatcttttgacctttggctttatttgggagggggaagggtgataaagttttctgtttccctggttttcttttgtactcctctctgttgcttccctcctcccattttcttgtctgttctgccgctgtgtgggcctgggctatgcggcagggcagatttcccatcagagctccaacatgcccgcagagtctggaaagagattcaaacccagcaagtatgtcccggtctctgcagccgccatcttcctagtgggagctacgacactcttctttgcctttacgtgtccaggactaagcctgtatgtgtcacctgcagtgcccatctacaatgcaattatgtttctctttgtgttggccaacttcagcatggccaccttcatggacccagggattttccctcgagctgaggaggatgaggacaaggaagatgatttccgagctcccctttacaaaacagtggagataaagggcatccaggtgcgcatgaaatggtgtgccacctgccgcttttaccgtccccctcgatgttcccactgcagtgtctgtgacaactgtgtggaggaatttgatcatcactgcccctgggtgaataactgtattggtcgccggaactaccgttattttttccttttcctcctttccctgacagcccacattatgggtgtgtttggctttggcctcctttatgtcctctaccacatagaggaactctcaggggtccgcacggctgtcacaatggcagtaatgtgtgtggctggcttattcttcatccctgtagctggcctcacgggatttcacgtggttctggtggccaggggacgcacaaccaatgaacaggttacgggtaaattccggggaggtgtgaaccccttcaccaatggctgctgtaacaatgtcagccgtgttctctgcagttctccagcacccaggtatttggggagaccaaagaaagagaagacaattgtaatcagacctcccttccttcgaccagaagtttcagatgggcagataactgtgaagatcatggataatggcatccagggagagctgaggagaacaaagtctaagggaagcctggagataacagagagccagtctgcagatgctgaacctccacctcctcctaagccagacctgagccgttacacagggttgcgaacacacctcggcctggctactaatgaggatagtagcttattggccaaggacagccccccgacacctaccatgtacaagtatcggccgggttacagtagcagcagtacgtcagctgccatgccgcattcctccagcgccaagttgagtcgtggggacagcttgaaggagccaacctcaattgcagagagcagccgtcaccccagctaccgctcagagcccagcttggaaccagagagcttccgttctcctacctttggcaaaagttttcacttcgatccactatccagtggctcacgctcctccagcctcaagtcagcccagggcacaggctttgagctgggccagttgcaatccattcgttcagagggcaccacctccacctcctataagagcctggccaaccagacacgcaatggaagcctatcttatgacagcttgctcacaccttcagacagccctgattttgagtcagtgcaggcagggcctgagccagacccacctttaggctatacctctcccttcctgtcagccaggctggcccagcaacgggaagctgagaggcacccacgtttggtgccaactggcccaacacaccgagagccctcaccagtccgttacgacaatctgtcgcgccacattgtggcctctctccaggaacgagagaagttgctgcgccagtcacccccactcccgggccgtgaggaagaaccaggcttgggggactcaggcattcagtcaacaccaggctcgggccatgcccctcgtactagttcctcctcagatgattcaaagagatcacctttgggcaagactccactgggacgcccagctgtcccccgttttggcaagccagatgggctaaggggccggggagtagggtcccctgaaccaggcccaacagccccatacctgggccgatcgatgtcttacagcagccaaaaagcccaacctggtgtctctgagacagaagaagtggccttgcagccattactgacacccaaagatgaagtacagctgaagaccacctacagcaaatccaacgggcagcccaagagcttaggctcagcctcccctggcccaggccagccacctctcagagaaggagtggcaggcctaggcccctccgattgtcccttgggggttacccctcagcccacctcactatggtgctgggtagaggggatacctgggttctaacctctaaataggggagatcccagcctccacaaagaggcccttttattttttattctgattagccattttaaaccaacgaggaataaaaagaaatcctgatctaaccagcgcaaaaaaacttgt

SEQ ID NO: 321720 - DNA, 345 bp, Homo sapiens
gtgctcacttgaacccatgaggcagaggttgcagtgagctgagatcgtgccaccacactccagcctgggcgacagagcaagactctgtctcaaaaaaacaaaagcaaaaacaaaaaacaataaaatggctgtagtaaattcttccctataaataattactttaaatgtaaattgattaaaccccctaatcaaaagatatagaatggctgagtggataaaaaaacaagactacatgctgtctataagaaactcactttagatttaaggacacacatagagcaatgtgtgtccttaaacatattccatgcaactggtaaacgagtgcagaagtggttatacttggat

SEQ ID NO: 321721 - DNA, 2720 bp, Homo sapiens
gcctctggattttgcgtataagcacacgtggggaaggaattgtttgttagtgagagcgccgattattcttgtaagaatggggatggcaagatattttcacttcgagtatcagacctttttaaagagaattgtgaatcgttcaattagggtcccgcggggtacaactgggggttcaaagcccgcggaagataccaggcagccttttttgggaaccccgaagttgtggcataattctacgaggggtcacgagaggatttgaagagccattcctgtgcataaacaattggtgtaaaccccgttgtttatgcgaaaaaatgtccccagattataccgcgggcgtgcatggcggggcgcccttcatggttcccacgctatccctcgggaaggctgaaggcacggagagaagtttaacctgaattccgcgcgagagttggaagtcttgccacaggtatgccccaggagttgtgccccctgcaactcccaccctgggccaacaggggccagaagatccgctttccaaaaaaataaaaaaaaaaaaaaaattgaagctgcaggtaactccgtgtgcttatgcagctactttagaaactgaaatgttcccactccttagatagattcttacatttggctctaatagcacacacaggatgtgactttggagaagaaggaagatctcttgccatttggcacagctttggagaaccaatgtttctgggagatcttgattttattaacatttggagacctacaagtttaaagagctacagaaacctttatactctttgcttgagagacatgaggatgcaacttaaaaatgttataatttaaatgttagaaattgactagagatgtataccaatgaaaaggaaaatgcttagttaagcatgatcattgtttacatgtgttataggaacttaagtttaaaatttatatttatctttcttacaacctaagagcaaataatgctttaaagagagattttaaaagttagtatgagttaatatgggagggcaaggaataacagggatatgtaaagccccttcagctacatgtacagaggccaactacaagagacatcattgaggaaatctgggaaaagtaagtgtccatgtctagggtgatggaatgtctgagtgagagaagaggacccttaagttgaacaggttcagagtgagattgcttccagtttctgctcagggatgtagagagccagaaacagcatcaccccagacttaacaacagaaaaatctagatgaaaggcaagttcaagacctttcttgacttcagagtgctgaggttacagagcagccagcaggcctaaaatctaaggagagaaacatatttgcagggaggagcaagatgcagcactggattccagtgcaccgacagcctgagtcaagtaacttgcaaaagacagaccctctcgaaggcacaatgccaaggaaagaccaaaagctgaaagtggagcagatactgagaaaaaacaaaaaaattacccaccaaaccagccaccagctgaggcaagaagtataactagaggaatttgaaagctgttgtacatgctgtagaaccattacaatactcaaacctggcctaaaaaatagattaattcagaggtctaaaagaaggaaaggcatgcccagtctctgtgtcctacacaagttacacagttctcaacaagaaattatgtagcatatgatgggcaagaagggaaaaaagaaacctcccaagagacaaaaccatcatcagaacaagactcagagaggacacagaagttggaactatctgacagggaaagtaaaataattatgaatgatgtattaaaggctagtggacaaagtgggcaccatgcaggaccgggtgggtaatcacagcgtagagatgggcatgaaagaaaccctcaaatggaaatgtaacatctgtaacatcaatgccagagatgaggaacgcatttgatagcactcaacacagcctggaaaagaatcattattcaagctgaaacagagaaagaagaatgaagcaaacagaatagagcattctaagaatttggagacagcctcaaactgtccaacataggtgtaattggaatctcagaagaaatagttgaagaaataacagtcaggaattttctactgagccaaagaccatcaagtaagttaaatacagaacaaaaacaaaacaaaacacttgggcatatcatattcaaactgatggaaaaaagaaaatcttgaaagcagagaaaaaagacagattacatacagagaaacatatttggcagggaggagcaagatgcagcactggattccaggtgcaccgacagcctgagtcaagtaacttgcaaaagacagaccctctcgaaggcacaatgccgaggaaagaccaaaagctgaaagtggagcagatactgagaaaaaacaaaaaattaccacaaacaggcaccagctgaggcaagaagtataactagaggaaatggaagctgtgtacatgctgtagaaccctgacatactcaactgggctagaaatgataattcgaggtctaagaggcaggtgccagtccgtgcacagttaccggctcccaaaaattgggcattagggcaagggaaaacaccccaaaaacctcaaatccaagacaatggctggcgccaacatacggtacggcagcccccgggcacaaacagattccaaggcccgaatcggaaattccgcgcatacaataggcg

SEQ ID NO: 321722 - DNA, 7442 bp, Homo sapiens
ccgcctctaccgcccagcggacgccgccgccgccgccgccgccgcgtacctagccaggtccctgaggggcgggcagatgaggcctaggggtgccgatccctagtgtcgactatgcgagatctgattccggagctgccatgattgaagtggtagcagagctcagccggggtcctgtatttttggctggggaggcgctggagtgtgtagtgaccgtcaccaacccccttccgcccacggccacttctgcatccagtgaggccctggcctgggccagtgcccaaatccactgccagttccatgccagtgagagtcgagtagcactgcctcctcctgactctagtcagccagatgtccagcccgacagccagactgtctttctgccacaccgaggtgagaggggccagtgtatcctttctactccaccgaaaattctattctgtgacctgaggcttgatcctggagagtccaaatcatactcctacagtgaagtgctgcccatagagggaccaccctcctttcggggtcagtcagtcaagtacgtctacaaactgaccattggctgccagcgtgtcaactcccctatcactttactcagagtccctctgagggttcttgtgctgactggccttcaggatgtccggtttccccaggatgaggctgtagccccatccagtccattcttggaggaggatgaaggtgggaagaaagattcatggctagctgagctggctggggaacgcctaatggctgccacatcctgccgcagcctccatctatacaatatcagtgatggccgagggaaagttgggacgtttggcatcttcaaatctgtgtacagacttggcgaggacgtggtggggaccttaaacttaggggaaggaaccgtagcttgtttgcagttttcagtcagcttacagaccgaggagcgtgtacagcctgagtaccagcggcgacgtggggcagggggtgtcccctctgtgtcacatgtgactcacgcccggcaccaggaatcctgcctacatacaactagaaccagcttctccctcccaatccctctcagctccaccccaggcttctgtacagccattgtgtccttgaagtggagattgcattttgaatttgtaacgtcccgagaaccaggattggtactcctaccccctgtggaacagcccgaacctaccacctggacaggacctgagcaagtacctgtagacaccttcagctgggacctgcccatcaaggtgctgcctactagccccaccctggcctcatatgctgccccaggccccagcaccagcaccataaccatctgaaactggcccaccctggtgctagttccttccggatactgagaactcagcacctggactctaatgggacccactttttccacctggggtccaatgtcgtggacagtgagagtcgggctttcagctatagcattaatttatttgttcagaatacattggcagctgctagtggtttccctggaagtggcagcagcagtgagcagtcagcagatggatgatcagttgagtttagctggagtggggagcaggagccccaggaacaggggtgttggctgagccccattctgggtcaggccctccccctttgcagggcagccgagggtcagatttttgcaccaaggagaactggcaggttcctgcctcctgacgtacctcacacccagccgggaagtcgatgggatgctgggacctggggaaccaaggataggggaaggagtcagcacagtgaaaggctgcctttatccctgcccacatgttccctctctcacagttttccccccacagagcccctttcagtggccccttggtcctcctaactaagctgtcacctaccatatgtgggcctttttgttttataacaggagtattttctctccaggtccaccccaacctcccctgatttatagcctgaagccttatctttcacactagtgttggtcccttcaggtttggcccatcttgtattgctcttctgttcattcttacatcacagcaatctagtcactccctggtcatccctcagtcactcatatcagagtcattctctctggccatctttggtcactcacgtgtcacagcagcccacgccaacaggatgcagacaggtgcaatggaaacagtccttgcggagccaagactcacccagggtaaaatatttcccctcatagtgacagggggggctagggaagaacgggaaatgttagtaggtgtaggagtgctgatgagaggcagaggctcttctggtctggggtggagacagtaagtacgcactatccccgtatttagtttgtctttcctgtttcacagctggaggaagcctgggtattttgacacgggatcatctgtaaggccccatcctccctgtgccctctctgctgctcctccattcctaacgcttcaccccactttaccttgagcttggaagtagcacttgctgtagactcctgggtgctggaggagtagagacatcaccaagcagatgatcccccagcctcctaggatccccttggcctgtccagcccagagcatccttagggccattgctgctgcacagccctctcagacccttcttggcctctgctcagctactctggtcttgactccttgactttgctttgcgttgctccttgagtcttagtttctgtctttctcccctgggctcctgtctcacactatctccctgccctctgctctcacaggctggggatgtttataaagtgaggaccctggccccctgctgagtagagctggaaaagttgtaactctgtttcctgaggtgagggcatgaaaacaagaggtctagctttaacaagctgtgagagctgattcatgccccggcacagctagagggagggaggtggccatggagggggcactggactgggcacttccccagcaaggaggcaggaggggcaagggcccccaggtggtccccagatctcttccctgacctggagagaaggaagcattccaccttccccctttctcccccactgccaccaccaggggtgtgtatgctgggatccctgcctggaccggagggaggcatttcctggggatggttaatcctgtgccccagccaaacccaggagctgcaatagggtgcgacggccagaagctccaggagagtgagcaggcacctggagtggagactgtgtttccctcagatcctagggcagggtttccctaatgtatccaagaaatagggctgcccctcagagatggtggggagggtctcttttcctcaggcattccagaggtgaactgtccattgcttatcaccttcaaacatacagcagatgtgggatcaccccacatctggggatggttctttcccctttcaaagaggagcatctctaagtgccctgatgggatgaatcactccaggttcacagaggtgtcctctctttcctcccatatataatggagtgaggtttttaggaatttatcatttggcatcctctgagtttcccacaggttctggaggagcccaggatggattattgagagcatgggctgtagagacagtcttcttggattcagatcctgactccacttagctatgtaacctggtcagattacttcacctctctgagcctgtttcctcatctataaattggggatagtaatgccaactcattgggctgttatgaggattactgagataatgcgtgcagtgctcttatcaccatctctggtgcgtaagcgtcaggaaatagcagttgctgtgattggggctaaagctctgaggcaaaatgggcgacattattttctttgaatgacattaagcagtttgtgcatagctgagggcttctattggggatggctgtctcctggcatagacctctgcacctttcacactcatactccttgtcagcagtccccaacctttttggtaccagggaccggttttgtggaaaacaatttttccaccagtggatggagggggatagcagcggggagatgattttgggatgaaactgtttcatctcagatcatcaggcattagattctcataaggagtgtgcaatctagatcccttgcatgcggagttcacagtggggtttgcactcctgtgagaatctaatgcctctgctgatctgccaggaggaggagctcaggcggtaatgctcactcgcctgccgcccacctcctgctttgtgctcccgcttcctaacaggccacagactggtactggcctgtggcctgggggatggagacccctaatccatgtcacctttcccacctctttcaaaaacaggtacctccaggaacattttggttttggcccttgtattgacttctgaatgtctagtttgagaaactgttcccaataagccttcttcccccagatctgcaccctcgcctctaccctaggacaagatgtccttttctcatcatcctgccaggctaactttaagtctcctgctttttctcacttggatttggatccatttcttcctatttccgctcatgtgaactctccagttctcctttctcaccactctcctgctagccatctctttggcactaaaggccctggtcaaattggatttctttcatttttccacacttcaaagacccatgttctaggtattctccatagggatagtctctttggcatttatttggtttttctacgttttcagtcccatttactccaagactcactccctgccacctagtgcatcagatacagctacttctggctgacttttcaagggggaccaccctacctgtcatctcttcactgttcagaaatgactgtgtcagtgcacctcaaactcccttgctgtccttttccaaggagacagctaaggtggatggagatgcagaatggacctcacgttcgccctagtcaggactgataccctttccgtttcagaggattgccaagaaaaaactcacagttgaggcagggtgctctgaggtcggctgcggtgtgggaggcacggcctgggcctgctctctgggctggagcaggtggattcgaaggcctgtctagcacgagggcccaaaggtcttgtcagtggccagtagctctgccgcctttcccagagagggggtccaggggacatcctggaaggctgggccctgggccaccttctgctcttgcaagctagagccagcccaatagggggcggatgtgagtggggagctggggcgcatgaaggtgggggtgatgccgaaggggaagggatcgccagtggggattggtgcgtgtgcggaaacggggacagaagtgaaggttcatcgcctataacgaagatgaggtaggcatataggggcttctggaaagctagaggctgggctgagccaggagtcctctcccagaagttggggggcggtgcagaggtgtgggtcgagcccgcatgcgtgcctgctggggagggggtgagtggtgaggaccaggcccgctgggtcctgggggcgcggtggctggcgcgcaggtcccggagggggcggctggcgcgcactacacgcttgggaacaaggaaaacatccgccggaggcccggccgggcggcgctccagcctcggggcaggtgcgcggagaggaagtgagagcattccggcccccccaccccaaccccggccgctggccctctggtgagtcacagccgacccccgccgccggagggagaggggagctgcgggccagagccccggagggtctggaggagccaggagggtttctgggagcagagggtcacttagtgggcttctgtcgtggtgtcgctacgggcgcgaaacggacactgaacacagtctgactgtatggaggcaggtggggagggatcccctgggagaacttggcgggccgagagcagaccccagggcaaggaggggcccccgagggggaaaccgggagtcgggcaggtggcgtaacccagaaagggaaggagagccggattgattggggtgagagaggaaggaagcacgccaagttaggcctgggagaactgagggacctgaggagggaggagggagaccaacacagggtgggaaggcggaaatggccaaaccccaggcatcaggtctgtccagaggctgacgtagacagtgaagggtgaagggtaggttttaggagtagggggagttatgattatttggttacattttgggattatttggtctcacaggtagaagggagcctgctggtctctgtgtaacggatggcttaaaagcaaggttgtctgcgtcttggattactgtctgccattcagcctttgccaaaaaatttggcactgatctgcacatttttatagtcatttaaaattgtatgactctgtcaaatgatttaagtaattttggtggatttttaaaaataaaaaaataaaaatagaaaagttgcacaatctaattcaatatttgacttaaaaccaaaagtgaggctctcagattggtaatatggtattcagcctttttcttgtttggcttttgtgccatttgcccctcactgacttgattgaattctttgtggctgatgcctcagtttttctggatcagtagtgctgcacttccacttttcctctccctcattttactgtctttatttttagccttttttctgtgtagccctctaacctgccctttatattttgaaccaaataaaacatttcttggaatgggagctttggactacagtatacagacaaacaactcacaattttagcatatgaggctactatcttctgtggatgtgtatgtaattatacagtttctgtatttatcctgtggctgatagaaaaagttaaagctgtttaattcaccatagtatttctacaacacagcaatttattagtctgacttctcttctaaaatcaactctaaaatggtattttgtacttgtctcagagacgaattctgccatgatccttatgatctgtgttatgttgggccaaaggtgattactttataaattataaagatccctaaactctgcattgcctttggtcccaaacaagcaaatctgggtcaattaatgaaaaaaaaaagaaaagaaaagaaaatgtcttactttgggccctgttgcactctcccgtgctgttttagccccagccctactctattcccagtggcctttgccttcattccttctttgctctgctgggcatcttgagaggaaaacttcacaccgacttcctctactataaattctctccctcctctcaactctacacttctctttgccaacatacaccatactgcttcactgatttttttttttaagcccacagtcctttctggctcttttccacctttaacactcttatgttgaaatcttccgtttttcctcctttctctttagtaagacctcaggtttttaaaaaagctaggcttgattgtttattctgcatggtccacttctgccttccttcctcttctattacccttttcttattctagactg

SEQ ID NO: 321723 - DNA, 6830 bp, Homo sapiens
ccgcctctaccgcccagcggacgccgccgccgccgccgccgccgcgtacctagccaggtccctgaggggcgggcagatgaggcctaggggtgccgatccctagtgtcgactatgcgagatctgattccggagctgccatgattgaagtggtagcagagctcagccggggtcctgtatttttggctggggaggcgctggagtgtgtagtgaccgtcaccaacccccttccgcccacggccacttctgcatccagtgaggccctggcctgggccagtgcccaaatccactgccagttccatgccagtgagagtcgagtagcactgcctcctcctgactctagtcagccagatgtccagcccgacagccagactgtctttctgccacaccgaggtgagaggggccagtgtatcctttctactccaccgaaaattctattctgtgacctgaggcttgatcctggagagtccaaatcatactcctacagtgaagtgctgcccatagagggaccaccctcctttcggggtcagtcagtcaagtacgtctacaaactgaccattggctgccagcgtgtcaactcccctatcactttactcagagtccctctgagggttcttgtgctgactggccttcaggatgtccggtttccccaggatgaggctgtagccccatccagtccattcttggaggaggatgaaggtgggaagaaagattcatggctagctgagctggctggggaacgcctaatggctgccacatcctgccgcagcctccatctatacaatatcagtgatggccgagggaaagttgggacgtttggcatcttcaaatctgtgtacagacttggcgaggacgtggtggggaccttaaacttaggggaaggaaccgtagcttgtttgcagttttcagtcagcttacagaccgaggagcgtgtacagcctgagtaccagcggcgacgtggggcagggggtgtcccctctgtgtcacatgtgactcacgcccggcaccaggaatcctgcctacatacaactagaaccagcttctccctcccaatccctctcagctccaccccaggcttctgtacagccattgtgtccttgaagtggagattgcattttgaatttgtaacgtcccgagaaccaggattggtactcctaccccctgtggaacagcccgaacctaccacctggacaggacctgagcaagtacctgtagacaccttcagctgggacctgcccatcaaggtgctgcctactagccccaccctggcctcatatgctgccccaggccccagcaccagcaccataaccatctgaaactggcccaccctggtgctagttccttccggatactgagaactcagcacctggactctaatgggacccactttttccacctggggtccaatgtcgtggacagtgagagtcgggctttcagctatagcattaatttatttgttcagaatacattggcagctgctagtggtttccctggaagtggcagcagcagtgagcagtcagcagatggatgatcagttgagtttagctggagtggggagcaggagccccaggaacaggggtgttggctgagccccattctgggtcaggccctccccctttgcagggcagccgagggtcagatttttgcaccaaggagaactggcaggttcctgcctcctgacgtacctcacacccagccgggaagtcgatgggatgctgggacgtgtcacagcagcccacgccaacaggatgcagacaggtgcaatggaaacagtccttgcggagccaagactcacccagggtaaaatatttcccctcatagtgacagggggcttgagcttggaagtagcacttgctgtagactcctgggtgctggaggagtagagacatcaccaagcagatgatcccccagcctcctaggatccccttggcctgtccagcccagagcatccttagggccattgctgctgcacagccctctcagacccttcttggcctctgctcagctactctggtcttgactccttgactttgctttgcgttgctccttgagtcttagtttctgtctttctcccctgggctcctgtctcacactatctccctgccctctgctctcacaggctggggatgtttataaagtgaggaccctggccccctgctgagtagagctggaaaagttgtaactctgtttcctgaggtgagggcatgaaaacaagaggtctagctttaacaagctgtgagagctgattcatgccccggcacagctagagggagggaggtggccatggagggggcactggactgggcacttccccagcaaggaggcaggaggggcaagggcccccaggtggtccccagatctcttccctgacctggagagaaggaagcattccaccttccccctttctcccccactgccaccaccaggggtgtgtatgctgggatccctgcctggaccggagggaggcatttcctggggatggttaatcctgtgccccagccaaacccaggagctgcaatagggtgcgacggccagaagctccaggagagtgagcaggcacctggagtggagactgtgtttccctcagatcctagggcagggtttccctaatgtatccaagaaatagggctgcccctcagagatggtggggagggtctcttttcctcaggcattccagaggtgaactgtccattgcttatcaccttcaaacatacagcagatgtgggatcaccccacatctggggatggttctttcccctttcaaagaggagcatctctaagtgccctgatgggatgaatcactccaggttcacagaggtgtcctctctttcctcccatatataatggagtgaggtttttaggaatttatcatttggcatcctctgagtttcccacaggttctggaggagcccaggatggattattgagagcatgggctgtagagacagtcttcttggattcagatcctgactccacttagctatgtaacctggtcagattacttcacctctctgagcctgtttcctcatctataaattggggatagtaatgccaactcattgggctgttatgaggattactgagataatgcgtgcagtgctcttatcaccatctctggtgcgtaagcgtcaggaaatagcagttgctgtgattggggctaaagctctgaggcaaaatgggcgacattattttctttgaatgacattaagcagtttgtgcatagctgagggcttctattggggatggctgtctcctggcatagacctctgcacctttcacactcatactccttgtcagcagtccccaacctttttggtaccagggaccggttttgtggaaaacaatttttccaccagtggatggagggggatagcagcggggagatgattttgggatgaaactgtttcatctcagatcatcaggcattagattctcataaggagtgtgcaatctagatcccttgcatgcggagttcacagtggggtttgcactcctgtgagaatctaatgcctctgctgatctgccaggaggaggagctcaggcggtaatgctcactcgcctgccgcccacctcctgctttgtgctcccgcttcctaacaggccacagactggtactggcctgtggcctgggggatggagacccctaatccatgtcacctttcccacctctttcaaaaacaggtacctccaggaacattttggttttggcccttgtattgacttctgaatgtctagtttgagaaactgttcccaataagccttcttcccccagatctgcaccctcgcctctaccctaggacaagatgtccttttctcatcatcctgccaggctaactttaagtctcctgctttttctcacttggatttggatccatttcttcctatttccgctcatgtgaactctccagttctcctttctcaccactctcctgctagccatctctttggcactaaaggccctggtcaaattggatttctttcatttttccacacttcaaagacccatgttctaggtattctccatagggatagtctctttggcatttatttggtttttctacgttttcagtcccatttactccaagactcactccctgccacctagtgcatcagatacagctacttctggctgacttttcaagggggaccaccctacctgtcatctcttcactgttcagaaatgactgtgtcagtgcacctcaaactcccttgctgtccttttccaaggagacagctaaggtggatggagatgcagaatggacctcacgttcgccctagtcaggactgataccctttccgtttcagaggattgccaagaaaaaactcacagttgaggcagggtgctctgaggtcggctgcggtgtgggaggcacggcctgggcctgctctctgggctggagcaggtggattcgaaggcctgtctagcacgagggcccaaaggtcttgtcagtggccagtagctctgccgcctttcccagagagggggtccaggggacatcctggaaggctgggccctgggccaccttctgctcttgcaagctagagccagcccaatagggggcggatgtgagtggggagctggggcgcatgaaggtgggggtgatgccgaaggggaagggatcgccagtggggattggtgcgtgtgcggaaacggggacagaagtgaaggttcatcgcctataacgaagatgaggtaggcatataggggcttctggaaagctagaggctgggctgagccaggagtcctctcccagaagttggggggcggtgcagaggtgtgggtcgagcccgcatgcgtgcctgctggggagggggtgagtggtgaggaccaggcccgctgggtcctgggggcgcggtggctggcgcgcaggtcccggagggggcggctggcgcgcactacacgcttgggaacaaggaaaacatccgccggaggcccggccgggcggcgctccagcctcggggcaggtgcgcggagaggaagtgagagcattccggcccccccaccccaaccccggccgctggccctctggtgagtcacagccgacccccgccgccggagggagaggggagctgcgggccagagccccggagggtctggaggagccaggagggtttctgggagcagagggtcacttagtgggcttctgtcgtggtgtcgctacgggcgcgaaacggacactgaacacagtctgactgtatggaggcaggtggggagggatcccctgggagaacttggcgggccgagagcagaccccagggcaaggaggggcccccgagggggaaaccgggagtcgggcaggtggcgtaacccagaaagggaaggagagccggattgattggggtgagagaggaaggaagcacgccaagttaggcctgggagaactgagggacctgaggagggaggagggagaccaacacagggtgggaaggcggaaatggccaaaccccaggcatcaggtctgtccagaggctgacgtagacagtgaagggtgaagggtaggttttaggagtagggggagttatgattatttggttacattttgggattatttggtctcacaggtagaagggagcctgctggtctctgtgtaacggatggcttaaaagcaaggttgtctgcgtcttggattactgtctgccattcagcctttgccaaaaaatttggcactgatctgcacatttttatagtcatttaaaattgtatgactctgtcaaatgatttaagtaattttggtggatttttaaaaataaaaaaataaaaatagaaaagttgcacaatctaattcaatatttgacttaaaaccaaaagtgaggctctcagattggtaatatggtattcagcctttttcttgtttggcttttgtgccatttgcccctcactgacttgattgaattctttgtggctgatgcctcagtttttctggatcagtagtgctgcacttccacttttcctctccctcattttactgtctttatttttagccttttttctgtgtagccctctaacctgccctttatattttgaaccaaataaaacatttcttggaatgggagctttggactacagtatacagacaaacaactcacaattttagcatatgaggctactatcttctgtggatgtgtatgtaattatacagtttctgtatttatcctgtggctgatagaaaaagttaaagctgtttaattcaccatagtatttctacaacacagcaatttattagtctgacttctcttctaaaatcaactctaaaatggtattttgtacttgtctcagagacgaattctgccatgatccttatgatctgtgttatgttgggccaaaggtgattactttataaattataaagatccctaaactctgcattgcctttggtcccaaacaagcaaatctgggtcaattaatgaaaaaaaaaagaaaagaaaagaaaatgtcttactttgggccctgttgcactctcccgtgctgttttagccccagccctactctattcccagtggcctttgccttcattccttctttgctctgctgggcatcttgagaggaaaacttcacaccgacttcctctactataaattctctccctcctctcaactctacacttctctttgccaacatacaccatactgcttcactgatttttttttttaagcccacagtcctttctggctcttttccacctttaacactcttatgttgaaatcttccgtttttcctcctttctctttagtaagacctcaggtttttaaaaaagctaggcttgattgtttattctgcatggtccacttctgccttccttcctcttctattacccttttcttattctagactg

SEQ ID NO: 321724 - DNA, 7299 bp, Homo sapiens
ccgcctctaccgcccagcggacgccgccgccgccgccgccgccgcgtacctagccaggtccctgaggggcgggcagatgaggcctaggggtgccgatccctagtgtcgactatgcgagatctgattccggagctgccatgattgaagtggtagcagagctcagccggggtcctgtatttttggctggggaggcgctggagtgtgtagtgaccgtcaccaacccccttccgcccacggccacttctgcatccagtgaggccctggcctgggccagtgcccaaatccactgccagttccatgccagtgagagtcgagtagcactgcctcctcctgactctagtcagccagatgtccagcccgacagccagactgtctttctgccacaccgaggtgagaggggccagtgtatcctttctactccaccgaaaattctattctgtgacctgaggcttgatcctggagagtccaaatcatactcctacagtgaagtgctgcccatagagggaccaccctcctttcggggtcagtcagtcaagtacgtctacaaactgaccattggctgccagcgtgtcaactcccctatcactttactcagagtccctctgagggttcttgtgctgactggccttcaggatgtccggtttccccaggatgaggctgtagccccatccagtccattcttggaggaggatgaaggtgggaagaaagattcatggctagctgagctggctggggaacgcctaatggctgccacatcctgccgcagcctccatctatacaatatcagtgatggccgagggaaagttgggacgtttggcatcttcaaatctgtgtacagacttggcgaggacgtggtggggaccttaaacttaggggaaggaaccgtagcttgtttgcagttttcagtcagcttacagaccgaggagcgtgtacagcctgagtaccagcggcgacgtggggcagggggtgtcccctctgtgtcacatgtgactcacgcccggcaccaggaatcctgcctacatacaactagaaccagcttctccctcccaatccctctcagctccaccccaggcttctgtacagccattgtgtccttgaagtggagattgcattttgaatttgtaacgtcccgagaaccaggattggtactcctaccccctgtggaacagcccgaacctaccacctggacaggacctgagcaagtacctgtagacaccttcagctgggacctgcccatcaaggtgctgcctactagccccaccctggcctcatatgctgccccaggccccagcaccagcaccataaccatctgaaactggcccaccctggtgctagttccttccggatactgagaactcagcacctggactctaatgggacccactttttccacctggggtccaatgtcgtggacagtgagagtcgggctttcagctatagcattaatttatttgttcagaatacattggcagctgctagtggtttccctggaagtggcagcagcagtgagcagtcagcagatggatgatcagttgagtttagctggagtggggagcaggagccccaggaacaggggtgttggctgagccccattctgggtcaggccctccccctttgcagggcagccgagggtcagatttttgcaccaaggagaactggcaggttcctgcctcctgacgtacctcacacccagccgggaagtcgatgggatgctgggaccatatgtgggcctttttgttttataacaggagtattttctctccaggtccaccccaacctcccctgatttatagcctgaagccttatctttcacactagtgttggtcccttcaggtttggcccatcttgtattgctcttctgttcattcttacatcacagcaatctagtcactccctggtcatccctcagtcactcatatcagagtcattctctctggccatctttggtcactcacgtgtcacagcagcccacgccaacaggatgcagacaggtgcaatggaaacagtccttgcggagccaagactcacccagggtaaaatatttcccctcatagtgacagggggggctagggaagaacgggaaatgttagtaggtgtaggagtgctgatgagaggcagaggctcttctggtctggggtggagacagtaagtacgcactatccccgtatttagtttgtctttcctgtttcacagctggaggaagcctgggtattttgacacgggatcatctgtaaggccccatcctccctgtgccctctctgctgctcctccattcctaacgcttcaccccactttaccttgagcttggaagtagcacttgctgtagactcctgggtgctggaggagtagagacatcaccaagcagatgatcccccagcctcctaggatccccttggcctgtccagcccagagcatccttagggccattgctgctgcacagccctctcagacccttcttggcctctgctcagctactctggtcttgactccttgactttgctttgcgttgctccttgagtcttagtttctgtctttctcccctgggctcctgtctcacactatctccctgccctctgctctcacaggctggggatgtttataaagtgaggaccctggccccctgctgagtagagctggaaaagttgtaactctgtttcctgaggtgagggcatgaaaacaagaggtctagctttaacaagctgtgagagctgattcatgccccggcacagctagagggagggaggtggccatggagggggcactggactgggcacttccccagcaaggaggcaggaggggcaagggcccccaggtggtccccagatctcttccctgacctggagagaaggaagcattccaccttccccctttctcccccactgccaccaccaggggtgtgtatgctgggatccctgcctggaccggagggaggcatttcctggggatggttaatcctgtgccccagccaaacccaggagctgcaatagggtgcgacggccagaagctccaggagagtgagcaggcacctggagtggagactgtgtttccctcagatcctagggcagggtttccctaatgtatccaagaaatagggctgcccctcagagatggtggggagggtctcttttcctcaggcattccagaggtgaactgtccattgcttatcaccttcaaacatacagcagatgtgggatcaccccacatctggggatggttctttcccctttcaaagaggagcatctctaagtgccctgatgggatgaatcactccaggttcacagaggtgtcctctctttcctcccatatataatggagtgaggtttttaggaatttatcatttggcatcctctgagtttcccacaggttctggaggagcccaggatggattattgagagcatgggctgtagagacagtcttcttggattcagatcctgactccacttagctatgtaacctggtcagattacttcacctctctgagcctgtttcctcatctataaattggggatagtaatgccaactcattgggctgttatgaggattactgagataatgcgtgcagtgctcttatcaccatctctggtgcgtaagcgtcaggaaatagcagttgctgtgattggggctaaagctctgaggcaaaatgggcgacattattttctttgaatgacattaagcagtttgtgcatagctgagggcttctattggggatggctgtctcctggcatagacctctgcacctttcacactcatactccttgtcagcagtccccaacctttttggtaccagggaccggttttgtggaaaacaatttttccaccagtggatggagggggatagcagcggggagatgattttgggatgaaactgtttcatctcagatcatcaggcattagattctcataaggagtgtgcaatctagatcccttgcatgcggagttcacagtggggtttgcactcctgtgagaatctaatgcctctgctgatctgccaggaggaggagctcaggcggtaatgctcactcgcctgccgcccacctcctgctttgtgctcccgcttcctaacaggccacagactggtactggcctgtggcctgggggatggagacccctaatccatgtcacctttcccacctctttcaaaaacaggtacctccaggaacattttggttttggcccttgtattgacttctgaatgtctagtttgagaaactgttcccaataagccttcttcccccagatctgcaccctcgcctctaccctaggacaagatgtccttttctcatcatcctgccaggctaactttaagtctcctgctttttctcacttggatttggatccatttcttcctatttccgctcatgtgaactctccagttctcctttctcaccactctcctgctagccatctctttggcactaaaggccctggtcaaattggatttctttcatttttccacacttcaaagacccatgttctaggtattctccatagggatagtctctttggcatttatttggtttttctacgttttcagtcccatttactccaagactcactccctgccacctagtgcatcagatacagctacttctggctgacttttcaagggggaccaccctacctgtcatctcttcactgttcagaaatgactgtgtcagtgcacctcaaactcccttgctgtccttttccaaggagacagctaaggtggatggagatgcagaatggacctcacgttcgccctagtcaggactgataccctttccgtttcagaggattgccaagaaaaaactcacagttgaggcagggtgctctgaggtcggctgcggtgtgggaggcacggcctgggcctgctctctgggctggagcaggtggattcgaaggcctgtctagcacgagggcccaaaggtcttgtcagtggccagtagctctgccgcctttcccagagagggggtccaggggacatcctggaaggctgggccctgggccaccttctgctcttgcaagctagagccagcccaatagggggcggatgtgagtggggagctggggcgcatgaaggtgggggtgatgccgaaggggaagggatcgccagtggggattggtgcgtgtgcggaaacggggacagaagtgaaggttcatcgcctataacgaagatgaggtaggcatataggggcttctggaaagctagaggctgggctgagccaggagtcctctcccagaagttggggggcggtgcagaggtgtgggtcgagcccgcatgcgtgcctgctggggagggggtgagtggtgaggaccaggcccgctgggtcctgggggcgcggtggctggcgcgcaggtcccggagggggcggctggcgcgcactacacgcttgggaacaaggaaaacatccgccggaggcccggccgggcggcgctccagcctcggggcaggtgcgcggagaggaagtgagagcattccggcccccccaccccaaccccggccgctggccctctggtgagtcacagccgacccccgccgccggagggagaggggagctgcgggccagagccccggagggtctggaggagccaggagggtttctgggagcagagggtcacttagtgggcttctgtcgtggtgtcgctacgggcgcgaaacggacactgaacacagtctgactgtatggaggcaggtggggagggatcccctgggagaacttggcgggccgagagcagaccccagggcaaggaggggcccccgagggggaaaccgggagtcgggcaggtggcgtaacccagaaagggaaggagagccggattgattggggtgagagaggaaggaagcacgccaagttaggcctgggagaactgagggacctgaggagggaggagggagaccaacacagggtgggaaggcggaaatggccaaaccccaggcatcaggtctgtccagaggctgacgtagacagtgaagggtgaagggtaggttttaggagtagggggagttatgattatttggttacattttgggattatttggtctcacaggtagaagggagcctgctggtctctgtgtaacggatggcttaaaagcaaggttgtctgcgtcttggattactgtctgccattcagcctttgccaaaaaatttggcactgatctgcacatttttatagtcatttaaaattgtatgactctgtcaaatgatttaagtaattttggtggatttttaaaaataaaaaaataaaaatagaaaagttgcacaatctaattcaatatttgacttaaaaccaaaagtgaggctctcagattggtaatatggtattcagcctttttcttgtttggcttttgtgccatttgcccctcactgacttgattgaattctttgtggctgatgcctcagtttttctggatcagtagtgctgcacttccacttttcctctccctcattttactgtctttatttttagccttttttctgtgtagccctctaacctgccctttatattttgaaccaaataaaacatttcttggaatgggagctttggactacagtatacagacaaacaactcacaattttagcatatgaggctactatcttctgtggatgtgtatgtaattatacagtttctgtatttatcctgtggctgatagaaaaagttaaagctgtttaattcaccatagtatttctacaacacagcaatttattagtctgacttctcttctaaaatcaactctaaaatggtattttgtacttgtctcagagacgaattctgccatgatccttatgatctgtgttatgttgggccaaaggtgattactttataaattataaagatccctaaactctgcattgcctttggtcccaaacaagcaaatctgggtcaattaatgaaaaaaaaaagaaaagaaaagaaaatgtcttactttgggccctgttgcactctcccgtgctgttttagccccagccctactctattcccagtggcctttgccttcattccttctttgctctgctgggcatcttgagaggaaaacttcacaccgacttcctctactataaattctctccctcctctcaactctacacttctctttgccaacatacaccatactgcttcactgatttttttttttaagcccacagtcctttctggctcttttccacctttaacactcttatgttgaaatcttccgtttttcctcctttctctttagtaagacctcaggtttttaaaaaagctaggcttgattgtttattctgcatggtccacttctgccttccttcctcttctattacccttttcttattctagactg

SEQ ID NO: 321725 - DNA, 6928 bp, Homo sapiens
ccgcctctaccgcccagcggacgccgccgccgccgccgccgccgcgtacctagccaggtccctgaggggcgggcagatgaggcctaggggtgccgatccctagtgtcgactatgcgagatctgattccggagctgccatgattgaagtggtagcagagctcagccggggtcctgtatttttggctggggaggcgctggagtgtgtagtgaccgtcaccaacccccttccgcccacggccacttctgcatccagtgaggccctggcctgggccagtgcccaaatccactgccagttccatgccagtgagagtcgagtagcactgcctcctcctgactctagtcagccagatgtccagcccgacagccagactgtctttctgccacaccgaggtgagaggggccagtgtatcctttctactccaccgaaaattctattctgtgacctgaggcttgatcctggagagtccaaatcatgtgagtgattgtccccatccctgaattgccttctaagtctcctggagggaggactcctctggtgcctctggctgtcctgacaactacttcccaaccagactcctacagtgaagtgctgcccatagagggaccaccctcctttcggggtcagtcagtcaagtacgtctacaaactgaccattggctgccagcgtgtcaactcccctatcactttactcagagtccctctgagggttcttgtgctgactggccttcaggatgtccggtttccccaggatgaggctgtagccccatccagtccattcttggaggaggatgaaggtgggaagaaagattcatggctagctgagctggctggggaacgcctaatggctgccacatcctgccgcagcctccatctatacaatatcagtgatggccgagggaaagttgggacgtttggcatcttcaaatctgtgtacagacttggcgaggacgtggtggggaccttaaacttaggggaaggaaccgtagcttgtttgcagttttcagtcagcttacagaccgaggagcgtgtacagcctgagtaccagcggcgacgtggggcagggggtgtcccctctgtgtcacatgtgactcacgcccggcaccaggaatcctgcctacatacaactagaaccagcttctccctcccaatccctctcagctccaccccaggcttctgtacagccattgtgtccttgaagtggagattgcattttgaatttgtaacgtcccgagaaccaggattggtactcctaccccctgtggaacagcccgaacctaccacctggacaggacctgagcaagtacctgtagacaccttcagctgggacctgcccatcaaggtgctgcctactagccccaccctggcctcatatgctgccccaggccccagcaccagcaccataaccatctgaaactggcccaccctggtgctagttccttccggatactgagaactcagcacctggactctaatgggacccactttttccacctggggtccaatgtcgtggacagtgagagtcgggctttcagctatagcattaatttatttgttcagaatacattggcagctgctagtggtttccctggaagtggcagcagcagtgagcagtcagcagatggatgatcagttgagtttagctggagtggggagcaggagccccaggaacaggggtgttggctgagccccattctgggtcaggccctccccctttgcagggcagccgagggtcagatttttgcaccaaggagaactggcaggttcctgcctcctgacgtacctcacacccagccgggaagtcgatgggatgctgggacgtgtcacagcagcccacgccaacaggatgcagacaggtgcaatggaaacagtccttgcggagccaagactcacccagggtaaaatatttcccctcatagtgacagggggcttgagcttggaagtagcacttgctgtagactcctgggtgctggaggagtagagacatcaccaagcagatgatcccccagcctcctaggatccccttggcctgtccagcccagagcatccttagggccattgctgctgcacagccctctcagacccttcttggcctctgctcagctactctggtcttgactccttgactttgctttgcgttgctccttgagtcttagtttctgtctttctcccctgggctcctgtctcacactatctccctgccctctgctctcacaggctggggatgtttataaagtgaggaccctggccccctgctgagtagagctggaaaagttgtaactctgtttcctgaggtgagggcatgaaaacaagaggtctagctttaacaagctgtgagagctgattcatgccccggcacagctagagggagggaggtggccatggagggggcactggactgggcacttccccagcaaggaggcaggaggggcaagggcccccaggtggtccccagatctcttccctgacctggagagaaggaagcattccaccttccccctttctcccccactgccaccaccaggggtgtgtatgctgggatccctgcctggaccggagggaggcatttcctggggatggttaatcctgtgccccagccaaacccaggagctgcaatagggtgcgacggccagaagctccaggagagtgagcaggcacctggagtggagactgtgtttccctcagatcctagggcagggtttccctaatgtatccaagaaatagggctgcccctcagagatggtggggagggtctcttttcctcaggcattccagaggtgaactgtccattgcttatcaccttcaaacatacagcagatgtgggatcaccccacatctggggatggttctttcccctttcaaagaggagcatctctaagtgccctgatgggatgaatcactccaggttcacagaggtgtcctctctttcctcccatatataatggagtgaggtttttaggaatttatcatttggcatcctctgagtttcccacaggttctggaggagcccaggatggattattgagagcatgggctgtagagacagtcttcttggattcagatcctgactccacttagctatgtaacctggtcagattacttcacctctctgagcctgtttcctcatctataaattggggatagtaatgccaactcattgggctgttatgaggattactgagataatgcgtgcagtgctcttatcaccatctctggtgcgtaagcgtcaggaaatagcagttgctgtgattggggctaaagctctgaggcaaaatgggcgacattattttctttgaatgacattaagcagtttgtgcatagctgagggcttctattggggatggctgtctcctggcatagacctctgcacctttcacactcatactccttgtcagcagtccccaacctttttggtaccagggaccggttttgtggaaaacaatttttccaccagtggatggagggggatagcagcggggagatgattttgggatgaaactgtttcatctcagatcatcaggcattagattctcataaggagtgtgcaatctagatcccttgcatgcggagttcacagtggggtttgcactcctgtgagaatctaatgcctctgctgatctgccaggaggaggagctcaggcggtaatgctcactcgcctgccgcccacctcctgctttgtgctcccgcttcctaacaggccacagactggtactggcctgtggcctgggggatggagacccctaatccatgtcacctttcccacctctttcaaaaacaggtacctccaggaacattttggttttggcccttgtattgacttctgaatgtctagtttgagaaactgttcccaataagccttcttcccccagatctgcaccctcgcctctaccctaggacaagatgtccttttctcatcatcctgccaggctaactttaagtctcctgctttttctcacttggatttggatccatttcttcctatttccgctcatgtgaactctccagttctcctttctcaccactctcctgctagccatctctttggcactaaaggccctggtcaaattggatttctttcatttttccacacttcaaagacccatgttctaggtattctccatagggatagtctctttggcatttatttggtttttctacgttttcagtcccatttactccaagactcactccctgccacctagtgcatcagatacagctacttctggctgacttttcaagggggaccaccctacctgtcatctcttcactgttcagaaatgactgtgtcagtgcacctcaaactcccttgctgtccttttccaaggagacagctaaggtggatggagatgcagaatggacctcacgttcgccctagtcaggactgataccctttccgtttcagaggattgccaagaaaaaactcacagttgaggcagggtgctctgaggtcggctgcggtgtgggaggcacggcctgggcctgctctctgggctggagcaggtggattcgaaggcctgtctagcacgagggcccaaaggtcttgtcagtggccagtagctctgccgcctttcccagagagggggtccaggggacatcctggaaggctgggccctgggccaccttctgctcttgcaagctagagccagcccaatagggggcggatgtgagtggggagctggggcgcatgaaggtgggggtgatgccgaaggggaagggatcgccagtggggattggtgcgtgtgcggaaacggggacagaagtgaaggttcatcgcctataacgaagatgaggtaggcatataggggcttctggaaagctagaggctgggctgagccaggagtcctctcccagaagttggggggcggtgcagaggtgtgggtcgagcccgcatgcgtgcctgctggggagggggtgagtggtgaggaccaggcccgctgggtcctgggggcgcggtggctggcgcgcaggtcccggagggggcggctggcgcgcactacacgcttgggaacaaggaaaacatccgccggaggcccggccgggcggcgctccagcctcggggcaggtgcgcggagaggaagtgagagcattccggcccccccaccccaaccccggccgctggccctctggtgagtcacagccgacccccgccgccggagggagaggggagctgcgggccagagccccggagggtctggaggagccaggagggtttctgggagcagagggtcacttagtgggcttctgtcgtggtgtcgctacgggcgcgaaacggacactgaacacagtctgactgtatggaggcaggtggggagggatcccctgggagaacttggcgggccgagagcagaccccagggcaaggaggggcccccgagggggaaaccgggagtcgggcaggtggcgtaacccagaaagggaaggagagccggattgattggggtgagagaggaaggaagcacgccaagttaggcctgggagaactgagggacctgaggagggaggagggagaccaacacagggtgggaaggcggaaatggccaaaccccaggcatcaggtctgtccagaggctgacgtagacagtgaagggtgaagggtaggttttaggagtagggggagttatgattatttggttacattttgggattatttggtctcacaggtagaagggagcctgctggtctctgtgtaacggatggcttaaaagcaaggttgtctgcgtcttggattactgtctgccattcagcctttgccaaaaaatttggcactgatctgcacatttttatagtcatttaaaattgtatgactctgtcaaatgatttaagtaattttggtggatttttaaaaataaaaaaataaaaatagaaaagttgcacaatctaattcaatatttgacttaaaaccaaaagtgaggctctcagattggtaatatggtattcagcctttttcttgtttggcttttgtgccatttgcccctcactgacttgattgaattctttgtggctgatgcctcagtttttctggatcagtagtgctgcacttccacttttcctctccctcattttactgtctttatttttagccttttttctgtgtagccctctaacctgccctttatattttgaaccaaataaaacatttcttggaatgggagctttggactacagtatacagacaaacaactcacaattttagcatatgaggctactatcttctgtggatgtgtatgtaattatacagtttctgtatttatcctgtggctgatagaaaaagttaaagctgtttaattcaccatagtatttctacaacacagcaatttattagtctgacttctcttctaaaatcaactctaaaatggtattttgtacttgtctcagagacgaattctgccatgatccttatgatctgtgttatgttgggccaaaggtgattactttataaattataaagatccctaaactctgcattgcctttggtcccaaacaagcaaatctgggtcaattaatgaaaaaaaaaagaaaagaaaagaaaatgtcttactttgggccctgttgcactctcccgtgctgttttagccccagccctactctattcccagtggcctttgccttcattccttctttgctctgctgggcatcttgagaggaaaacttcacaccgacttcctctactataaattctctccctcctctcaactctacacttctctttgccaacatacaccatactgcttcactgatttttttttttaagcccacagtcctttctggctcttttccacctttaacactcttatgttgaaatcttccgtttttcctcctttctctttagtaagacctcaggtttttaaaaaagctaggcttgattgtttattctgcatggtccacttctgccttccttcctcttctattacccttttcttattctagactg

SEQ ID NO: 321726 - DNA, 6886 bp, Homo sapiens
ccgcctctaccgcccagcggacgccgccgccgccgccgccgccgcgtacctagccaggtccctgaggggcgggcagatgaggcctaggggtgccgatccctagtgtcgactatgcgagatctgattccggagctgccatgattgaagtggtagcagagctcagccggggtcctgtatttttggctggggaggcgctggagtgtgtagtgaccgtcaccaacccccttccgcccacggccacttctgcatccagtgaggccctggcctgggccagtgcccaaatccactgccagttccatgccagtgagagtcgagtagcactgcctcctcctgactctagtcagccagatgtccagcccgacagccagactgtctttctgccacaccgaggtgagaggggccagtgtatcctttctactccaccgaaaattctattctgtgacctgaggcttgatcctggagagtccaaatcatactcctacagtgaagtgctgcccatagagggaccaccctcctttcggggtcagtcagtcaagtacgtctacaaactgaccattggctgccagcgtgtcaactcccctatcactttactcagagtccctctgagggttcttgtgctgactggccttcaggatgtccggtttccccaggatgaggctgtagccccatccagtccattcttggaggaggatgaaggtgggaagaaagattcatggctagctgagctggctggggaacgcctaatggctgccacatcctgccgcagcctccatctatacaatatcagtgatggccgagggaaagttgggacgtttggcatcttcaaatctgtgtacagacttggcgaggacgtggtggggaccttaaacttaggggaaggaaccgtagcttgtttgcagttttcagtcagcttacagaccgaggagcgtgtacagcctgagtaccagcggcgacgtggggcagggggtgtcccctctgtgtcacatgtgactcacgcccggcaccaggaatcctgcctacatacaactagaaccagcttctccctcccaatccctctcagctccaccccaggcttctgtacagccattgtgtccttgaagtggagattgcattttgaatttgtaacgtcccgagaaccaggattggtactcctaccccctgtggaacagcccgaacctaccacctggacaggacctgagcaagtacctgtagacaccttcagctgggacctgcccatcaaggtgctgcctactagccccaccctggcctcatatgctgccccaggccccagcaccagcaccataaccatctgaaactggcccaccctggtgctagttccttccggatactgagaactcagcacctggactctaatgggacccactttttccacctggggtccaatgtcgtggacagtgagagtcgggctttcagctatagcattaatttatttgttcagaatacattggcagctgctagtggtttccctggaagtggcagcagcagtgagcagtcagcagatggatgatcagttgagtttagctggagtggggagcaggagccccaggaacaggggtgttggctgagccccattctgggtcaggccctccccctttgcagggcagccgagggtcagatttttgcaccaaggagaactggcaggttcctgcctcctgacgtacctcacacccagccgggaagtcgatgggatgctgggacctggggaaccaaggataggggaaggagtcagcacagtgaaaggctgcctttatccctgcccacatgttccctctctcacagttttccccccacagagcccctttcagtggccccttggtcctcctaactaagctgtcacctaccatatgtgggcctttttgttttataacaggagtattttctctccaggtccaccccaacctcccctgatttatagcctgaagccttatctttcacactagtgttggtcccttcaggtttggcccatcttgtattgctcttctgttcattcttacatcacagcaatctagtcactccctggtcatccctcagtcactcatatcagagtcattctctctggccatctttggtcactcacgtgtcacagcagcccacgccaacaggatgcagacaggtgcaatggaaacagtccttgcggagccaagactcacccagggtaaaatatttcccctcatagtgacagggggctgctgagtagagctggaaaagttgtaactctgtttcctgaggtgagggcatgaaaacaagaggtctagctttaacaagctgtgagagctgattcatgccccggcacagctagagggagggaggtggccatggagggggcactggactgggcacttccccagcaaggaggcaggaggggcaagggcccccaggtggtccccagatctcttccctgacctggagagaaggaagcattccaccttccccctttctcccccactgccaccaccaggggtgtgtatgctgggatccctgcctggaccggagggaggcatttcctggggatggttaatcctgtgccccagccaaacccaggagctgcaatagggtgcgacggccagaagctccaggagagtgagcaggcacctggagtggagactgtgtttccctcagatcctagggcagggtttccctaatgtatccaagaaatagggctgcccctcagagatggtggggagggtctcttttcctcaggcattccagaggtgaactgtccattgcttatcaccttcaaacatacagcagatgtgggatcaccccacatctggggatggttctttcccctttcaaagaggagcatctctaagtgccctgatgggatgaatcactccaggttcacagaggtgtcctctctttcctcccatatataatggagtgaggtttttaggaatttatcatttggcatcctctgagtttcccacaggttctggaggagcccaggatggattattgagagcatgggctgtagagacagtcttcttggattcagatcctgactccacttagctatgtaacctggtcagattacttcacctctctgagcctgtttcctcatctataaattggggatagtaatgccaactcattgggctgttatgaggattactgagataatgcgtgcagtgctcttatcaccatctctggtgcgtaagcgtcaggaaatagcagttgctgtgattggggctaaagctctgaggcaaaatgggcgacattattttctttgaatgacattaagcagtttgtgcatagctgagggcttctattggggatggctgtctcctggcatagacctctgcacctttcacactcatactccttgtcagcagtccccaacctttttggtaccagggaccggttttgtggaaaacaatttttccaccagtggatggagggggatagcagcggggagatgattttgggatgaaactgtttcatctcagatcatcaggcattagattctcataaggagtgtgcaatctagatcccttgcatgcggagttcacagtggggtttgcactcctgtgagaatctaatgcctctgctgatctgccaggaggaggagctcaggcggtaatgctcactcgcctgccgcccacctcctgctttgtgctcccgcttcctaacaggccacagactggtactggcctgtggcctgggggatggagacccctaatccatgtcacctttcccacctctttcaaaaacaggtacctccaggaacattttggttttggcccttgtattgacttctgaatgtctagtttgagaaactgttcccaataagccttcttcccccagatctgcaccctcgcctctaccctaggacaagatgtccttttctcatcatcctgccaggctaactttaagtctcctgctttttctcacttggatttggatccatttcttcctatttccgctcatgtgaactctccagttctcctttctcaccactctcctgctagccatctctttggcactaaaggccctggtcaaattggatttctttcatttttccacacttcaaagacccatgttctaggtattctccatagggatagtctctttggcatttatttggtttttctacgttttcagtcccatttactccaagactcactccctgccacctagtgcatcagatacagctacttctggctgacttttcaagggggaccaccctacctgtcatctcttcactgttcagaaatgactgtgtcagtgcacctcaaactcccttgctgtccttttccaaggagacagctaaggtggatggagatgcagaatggacctcacgttcgccctagtcaggactgataccctttccgtttcagaggattgccaagaaaaaactcacagttgaggcagggtgctctgaggtcggctgcggtgtgggaggcacggcctgggcctgctctctgggctggagcaggtggattcgaaggcctgtctagcacgagggcccaaaggtcttgtcagtggccagtagctctgccgcctttcccagagagggggtccaggggacatcctggaaggctgggccctgggccaccttctgctcttgcaagctagagccagcccaatagggggcggatgtgagtggggagctggggcgcatgaaggtgggggtgatgccgaaggggaagggatcgccagtggggattggtgcgtgtgcggaaacggggacagaagtgaaggttcatcgcctataacgaagatgaggtaggcatataggggcttctggaaagctagaggctgggctgagccaggagtcctctcccagaagttggggggcggtgcagaggtgtgggtcgagcccgcatgcgtgcctgctggggagggggtgagtggtgaggaccaggcccgctgggtcctgggggcgcggtggctggcgcgcaggtcccggagggggcggctggcgcgcactacacgcttgggaacaaggaaaacatccgccggaggcccggccgggcggcgctccagcctcggggcaggtgcgcggagaggaagtgagagcattccggcccccccaccccaaccccggccgctggccctctggtgagtcacagccgacccccgccgccggagggagaggggagctgcgggccagagccccggagggtctggaggagccaggagggtttctgggagcagagggtcacttagtgggcttctgtcgtggtgtcgctacgggcgcgaaacggacactgaacacagtctgactgtatggaggcaggtggggagggatcccctgggagaacttggcgggccgagagcagaccccagggcaaggaggggcccccgagggggaaaccgggagtcgggcaggtggcgtaacccagaaagggaaggagagccggattgattggggtgagagaggaaggaagcacgccaagttaggcctgggagaactgagggacctgaggagggaggagggagaccaacacagggtgggaaggcggaaatggccaaaccccaggcatcaggtctgtccagaggctgacgtagacagtgaagggtgaagggtaggttttaggagtagggggagttatgattatttggttacattttgggattatttggtctcacaggtagaagggagcctgctggtctctgtgtaacggatggcttaaaagcaaggttgtctgcgtcttggattactgtctgccattcagcctttgccaaaaaatttggcactgatctgcacatttttatagtcatttaaaattgtatgactctgtcaaatgatttaagtaattttggtggatttttaaaaataaaaaaataaaaatagaaaagttgcacaatctaattcaatatttgacttaaaaccaaaagtgaggctctcagattggtaatatggtattcagcctttttcttgtttggcttttgtgccatttgcccctcactgacttgattgaattctttgtggctgatgcctcagtttttctggatcagtagtgctgcacttccacttttcctctccctcattttactgtctttatttttagccttttttctgtgtagccctctaacctgccctttatattttgaaccaaataaaacatttcttggaatgggagctttggactacagtatacagacaaacaactcacaattttagcatatgaggctactatcttctgtggatgtgtatgtaattatacagtttctgtatttatcctgtggctgatagaaaaagttaaagctgtttaattcaccatagtatttctacaacacagcaatttattagtctgacttctcttctaaaatcaactctaaaatggtattttgtacttgtctcagagacgaattctgccatgatccttatgatctgtgttatgttgggccaaaggtgattactttataaattataaagatccctaaactctgcattgcctttggtcccaaacaagcaaatctgggtcaattaatgaaaaaaaaaagaaaagaaaagaaaatgtcttactttgggccctgttgcactctcccgtgctgttttagccccagccctactctattcccagtggcctttgccttcattccttctttgctctgctgggcatcttgagaggaaaacttcacaccgacttcctctactataaattctctccctcctctcaactctacacttctctttgccaacatacaccatactgcttcactgatttttttttttaagcccacagtcctttctggctcttttccacctttaacactcttatgttgaaatcttccgtttttcctcctttctctttagtaagacctcaggtttttaaaaaagctaggcttgattgtttattctgcatggtccacttctgccttccttcctcttctattacccttttcttattctagactg

SEQ ID NO: 321727 - DNA, 5438 bp, Homo sapiens
tgtttttttgttgtggtttgtgtttttttttttttttttcagctatagcattaatttatttgttcagaatacattggcagctgctagtggtttccctggaagtggcagcagcagtgagcagtcagcagatggatgatcagttgagtttagctggagtggggagcaggagccccaggaacaggggtgttggctgagccccattctgggtcaggccctccccctttgcagggcagccgagggtcagatttttgcaccaaggagaactggcaggttcctgcctcctgacgtacctcacacccagccgggaagtcgatgggatgctgggacgtgtcacagcagcccacgccaacaggatgcagacaggtgcaatggaaacagtccttgcggagccaagactcacccagggtaaaatatttcccctcatagtgacagggggcttgagcttggaagtagcacttgctgtagactcctgggtgctggaggagtagagacatcaccaagcagatgatcccccagcctcctaggatccccttggcctgtccagcccagagcatccttagggccattgctgctgcacagccctctcagacccttcttggcctctgctcagctactctggtcttgactccttgactttgctttgcgttgctccttgagtcttagtttctgtctttctcccctgggctcctgtctcacactatctccctgccctctgctctcacaggctggggatgtttataaagtgaggaccctggccccctgctgagtagagctggaaaagttgtaactctgtttcctgaggtgagggcatgaaaacaagaggtctagctttaacaagctgtgagagctgattcatgccccggcacagctagagggagggaggtggccatggagggggcactggactgggcacttccccagcaaggaggcaggaggggcaagggcccccaggtggtccccagatctcttccctgacctggagagaaggaagcattccaccttccccctttctcccccactgccaccaccaggggtgtgtatgctgggatccctgcctggaccggagggaggcatttcctggggatggttaatcctgtgccccagccaaacccaggagctgcaatagggtgcgacggccagaagctccaggagagtgagcaggcacctggagtggagactgtgtttccctcagatcctagggcagggtttccctaatgtatccaagaaatagggctgcccctcagagatggtggggagggtctcttttcctcaggcattccagaggtgaactgtccattgcttatcaccttcaaacatacagcagatgtgggatcaccccacatctggggatggttctttcccctttcaaagaggagcatctctaagtgccctgatgggatgaatcactccaggttcacagaggtgtcctctctttcctcccatatataatggagtgaggtttttaggaatttatcatttggcatcctctgagtttcccacaggttctggaggagcccaggatggattattgagagcatgggctgtagagacagtcttcttggattcagatcctgactccacttagctatgtaacctggtcagattacttcacctctctgagcctgtttcctcatctataaattggggatagtaatgccaactcattgggctgttatgaggattactgagataatgcgtgcagtgctcttatcaccatctctggtgcgtaagcgtcaggaaatagcagttgctgtgattggggctaaagctctgaggcaaaatgggcgacattattttctttgaatgacattaagcagtttgtgcatagctgagggcttctattggggatggctgtctcctggcatagacctctgcacctttcacactcatactccttgtcagcagtccccaacctttttggtaccagggaccggttttgtggaaaacaatttttccaccagtggatggagggggatagcagcggggagatgattttgggatgaaactgtttcatctcagatcatcaggcattagattctcataaggagtgtgcaatctagatcccttgcatgcggagttcacagtggggtttgcactcctgtgagaatctaatgcctctgctgatctgccaggaggaggagctcaggcggtaatgctcactcgcctgccgcccacctcctgctttgtgctcccgcttcctaacaggccacagactggtactggcctgtggcctgggggatggagacccctaatccatgtcacctttcccacctctttcaaaaacaggtacctccaggaacattttggttttggcccttgtattgacttctgaatgtctagtttgagaaactgttcccaataagccttcttcccccagatctgcaccctcgcctctaccctaggacaagatgtccttttctcatcatcctgccaggctaactttaagtctcctgctttttctcacttggatttggatccatttcttcctatttccgctcatgtgaactctccagttctcctttctcaccactctcctgctagccatctctttggcactaaaggccctggtcaaattggatttctttcatttttccacacttcaaagacccatgttctaggtattctccatagggatagtctctttggcatttatttggtttttctacgttttcagtcccatttactccaagactcactccctgccacctagtgcatcagatacagctacttctggctgacttttcaagggggaccaccctacctgtcatctcttcactgttcagaaatgactgtgtcagtgcacctcaaactcccttgctgtccttttccaaggagacagctaaggtggatggagatgcagaatggacctcacgttcgccctagtcaggactgataccctttccgtttcagaggattgccaagaaaaaactcacagttgaggcagggtgctctgaggtcggctgcggtgtgggaggcacggcctgggcctgctctctgggctggagcaggtggattcgaaggcctgtctagcacgagggcccaaaggtcttgtcagtggccagtagctctgccgcctttcccagagagggggtccaggggacatcctggaaggctgggccctgggccaccttctgctcttgcaagctagagccagcccaatagggggcggatgtgagtggggagctggggcgcatgaaggtgggggtgatgccgaaggggaagggatcgccagtggggattggtgcgtgtgcggaaacggggacagaagtgaaggttcatcgcctataacgaagatgaggtaggcatataggggcttctggaaagctagaggctgggctgagccaggagtcctctcccagaagttggggggcggtgcagaggtgtgggtcgagcccgcatgcgtgcctgctggggagggggtgagtggtgaggaccaggcccgctgggtcctgggggcgcggtggctggcgcgcaggtcccggagggggcggctggcgcgcactacacgcttgggaacaaggaaaacatccgccggaggcccggccgggcggcgctccagcctcggggcaggtgcgcggagaggaagtgagagcattccggcccccccaccccaaccccggccgctggccctctggtgagtcacagccgacccccgccgccggagggagaggggagctgcgggccagagccccggagggtctggaggagccaggagggtttctgggagcagagggtcacttagtgggcttctgtcgtggtgtcgctacgggcgcgaaacggacactgaacacagtctgactgtatggaggcaggtggggagggatcccctgggagaacttggcgggccgagagcagaccccagggcaaggaggggcccccgagggggaaaccgggagtcgggcaggtggcgtaacccagaaagggaaggagagccggattgattggggtgagagaggaaggaagcacgccaagttaggcctgggagaactgagggacctgaggagggaggagggagaccaacacagggtgggaaggcggaaatggccaaaccccaggcatcaggtctgtccagaggctgacgtagacagtgaagggtgaagggtaggttttaggagtagggggagttatgattatttggttacattttgggattatttggtctcacaggtagaagggagcctgctggtctctgtgtaacggatggcttaaaagcaaggttgtctgcgtcttggattactgtctgccattcagcctttgccaaaaaatttggcactgatctgcacatttttatagtcatttaaaattgtatgactctgtcaaatgatttaagtaattttggtggatttttaaaaataaaaaaataaaaatagaaaagttgcacaatctaattcaatatttgacttaaaaccaaaagtgaggctctcagattggtaatatggtattcagcctttttcttgtttggcttttgtgccatttgcccctcactgacttgattgaattctttgtggctgatgcctcagtttttctggatcagtagtgctgcacttccacttttcctctccctcattttactgtctttatttttagccttttttctgtgtagccctctaacctgccctttatattttgaaccaaataaaacatttcttggaatgggagctttggactacagtatacagacaaacaactcacaattttagcatatgaggctactatcttctgtggatgtgtatgtaattatacagtttctgtatttatcctgtggctgatagaaaaagttaaagctgtttaattcaccatagtatttctacaacacagcaatttattagtctgacttctcttctaaaatcaactctaaaatggtattttgtacttgtctcagagacgaattctgccatgatccttatgatctgtgttatgttgggccaaaggtgattactttataaattataaagatccctaaactctgcattgcctttggtcccaaacaagcaaatctgggtcaattaatgaaaaaaaaaagaaaagaaaagaaaatgtcttactttgggccctgttgcactctcccgtgctgttttagccccagccctactctattcccagtggcctttgccttcattccttctttgctctgctgggcatcttgagaggaaaacttcacaccgacttcctctactataaattctctccctcctctcaactctacacttctctttgccaacatacaccatactgcttcactgatttttttttttaagcccacagtcctttctggctcttttccacctttaacactcttatgttgaaatcttccgtttttcctcctttctctttagtaagacctcaggtttttaaaaaagctaggcttgattgtttattctgcatggtccacttctgccttccttcctcttctattacccttttcttattctagactg

SEQ ID NO: 321728 - DNA, 6297 bp, Homo sapiens
ccgcctctaccgcccagcggacgccgccgccgccgccgccgccgcgtacctagccaggtccctgaggggcgggcagatgaggcctaggggtgccgatccctagtgtcgactatgcgagatctgattccggagctgccatgattgaagtggtagcagagctcagccggggtcctgtatttttggctggggaggcgctggagtgtgtagtgaccgtcaccaacccccttccgcccacggccacttctgcatccagtgaggccctggcctgggccagtgcccaaatccactgccagttccatgccagtgagagtcgagtagcactgcctcctcctgactctagtcagccagatgtccagcccgacagccagactgtctttctgccacaccgaggtgagaggggccagtgtatcctttctactccaccgaaaattctattctgtgacctgaggcttgatcctggagagtccaaatcatactcctacagtgaagtgctgcccatagagggaccaccctcctttcggggtcagtcagtcaagtacgtctacaaactgaccattggctgccagcgtgtcaactcccctatcactttactcagagtccctctgagggttcttgtgctgactggccttcaggatgtccggtttccccaggatgaggctgtagccccatccagtccattcttggaggaggatgaaggtgggaagaaagattcatggctagctgagctggctggggaacgcctaatggctgccacatcctgccgcagcctccatctatacaatatcagtgatggccgagggaaagttgggacgtttggcatcttcaaatctgtgtacagacttggcgaggacgtggtggggaccttaaacttaggggaaggaaccgtagcttgtttgcagttttcagtcagcttacagaccgaggagcgtgtacagcctgagtaccagcggcgacgtggggcagggggtgtcccctctgtgtcacatgtgactcacgcccggcaccaggaatcctgcctacatacaactagaaccagcttctccctcccaatccctctcagctccaccccaggcttctgtacagccattgtgtccttgaagtggagattgcattttgaatttgtaacgtcccgagaaccaggattggtactcctaccccctgtggaacagcccgaacctaccacctggacaggacctgagcaagtacctgtagacaccttcagctgggacctgcccatcaaggtgctgcctactagccccaccctggcctcatatgctgccccaggccccagcaccagcaccataaccatctgaaactggcccaccctggtgctagttccttccggatactgagaactcagcacctggactctaatgggacccactttttccacctggggtccaatgtcgtggacagtgagagtcgggctttcagctatagcattaatttatttgttcagaatacattggcagctgctagtggtttccctggaagtggcagcagcagtgagcagtcagcagatggatgatcagttgagtttagctggagtggggagcaggagccccaggaacaggggtgttggctgagccccattctgggtcaggccctccccctttgcagggcagccgagggtcagatttttgcaccaaggagaactggcaggttcctgcctcctgacgtacctcacacccagccgggaagtcgatgggatgctgggacgtgtcacagcagcccacgccaacaggatgcagacaggtgcaatggaaacagtccttgcggagccaagactcacccagggtaaaatatttcccctcatagtgacagggggcttgagcttggaagtagcacttgctgtagactcctgggtgctggaggagtagagacatcaccaagcagatgatcccccagcctcctaggatccccttggcctgtccagcccagagcatccttagggccattgctgctgcacagccctctcagacccttcttggcctctgctcagctactctggtcttgactccttgactttgctttgcgttgctccttgagtcttagtttctgtctttctcccctgggctcctgtctcacactatctccctgccctctgctctcacaggctggggatgtttataaagtgaggaccctggccccctgctgagtagagctggaaaagttgtaactctgtttcctgaggtgagggcatgaaaacaagaggtctagctttaacaagctgtgagagctgattcatgccccggcacagctagagggagggaggtggccatggagggggcactggactgggcacttccccagcaaggaggcaggaggggcaagggcccccaggtggtccccagatctcttccctgacctggagagaaggaagcattccaccttccccctttctcccccactgccaccaccaggggtgtgtatgctgggatccctgcctggaccggagggaggcatttcctggggatggttaatcctgtgccccagccaaacccaggagctgcaatagggtgcgacggccagaagctccaggagagtgagcaggcacctggagtggagactgtgtttccctcagatcctagggcagggtttccctaatgtatccaagaaatagggctgcccctcagagatggtggggagggtctcttttcctcaggcattccagaggtgaactgtccattgcttatcaccttcaaacatacagcagatgtgggatcaccccacatctggggatggttctttcccctttcaaagaggagcatctctaagtgccctgatgggatgaatcactccaggttcacagaggtgtcctctctttcctcccatatataatggagtgaggtttttaggaatttatcatttggcatcctctgagtttcccacaggttctggaggagcccaggatggattattgagagcatgggctgtagagacagtcttcttggattcagatcctgactccacttagctatgtaacctggtcagattacttcacctctctgagcctgtttcctcatctataaattggggatagtaatgccaactcattgggctgttatgaggattactgagataatgcgtgcagtgctcttatcaccatctctggtgcgtaagcgtcaggaaatagcagttgctgtgattggggctaaagctctgaggcaaaatgggcgacattattttctttgaatgacattaagcagtttgtgcatagctgagggcttctattggggatggctgtctcctggcatagacctctgcacctttcacactcatactccttgtcagcagtccccaacctttttggtaccagggaccggttttgtggaaaacaatttttccaccagtggatggagggggatagcagcggggagatgattttgggatgaaactgtttcatctcagatcatcaggcattagattctcataaggagtgtgcaatctagatcccttgcatgcggagttcacagtggggtttgcactcctgtgagaatctaatgcctctgctgatctgccaggaggaggagctcaggcggtaatgctcactcgcctgccgcccacctcctgctttgtgctcccgcttcctaacaggccacagactggtactggcctgtggcctgggggatggagacccctaatccatgtcacctttcccacctctttcaaaaacaggtacctccaggaacattttggttttggcccttgtattgacttctgaatgtctagtttgagaaactgttcccaataagccttcttcccccagatctgcaccctcgcctctaccctaggacaagatgtccttttctcatcatcctgccaggctaactttaagtctcctgctttttctcacttggatttggatccatttcttcctatttccgctcatgtgaactctccagttctcctttctcaccactctcctgctagccatctctttggcactaaaggccctggtcaaattggatttctttcatttttccacacttcaaagacccatgttctaggtattctccatagggatagtctctttggcatttatttggtttttctacgttttcagtcccatttactccaagactcactccctgccacctagtgcatcagatacagctacttctggctgacttttcaagggggaccaccctacctgtcatctcttcactgttcagaaatgactgtgtcagtgcacctcaaactcccttgctgtccttttccaaggagacagctaaggtggatggagatgcagaatggacctcacgttcgccctagtcaggactgataccctttccgtttcagaggattgccaagaaaaaactcacagttgaggcagggtgctctgaggtcggctgcggtgtgggaggcacggcctgggcctgctctctgggctggagcaggtggattcgaaggcctgtctagcacgagggcccaaaggtcttgtcagtggccagtagctctgccgcctttcccagagagggggtccaggggacatcctggaaggctgggccctgggccaccttctgctcttgcaagctagagccagcccaatagggggcggatgtgagtggggagctggggcgcatgaaggtgggggtgatgccgaaggggaagggatcgccagtggggattggtgcgtgtgcggaaacggggacagaagtgaaggttcatcgcctataacgaagatgaggtaggcatataggggcttctggaaagctagaggctgggctgagccaggagtcctctcccagaagttggggggcggtgcagaggtgtgggtcgagcccgcatgcgtgcctgctggggagggggtgagtggtgaggaccaggcccgctgggtcctgggggcgcggtggctggcgcgcaggtcccggagggggcggctggcgcgcactacacgcttgggaacaaggaaaacatccgccggaggcccggccgggcggcgctccagcctcggggcaggtgcgcggagaggaagtgagagcattccggcccccccaccccaaccccggccgctggccctctggtagaagggagcctgctggtctctgtgtaacggatggcttaaaagcaaggttgtctgcgtcttggattactgtctgccattcagcctttgccaaaaaatttggcactgatctgcacatttttatagtcatttaaaattgtatgactctgtcaaatgatttaagtaattttggtggatttttaaaaataaaaaaataaaaatagaaaagttgcacaatctaattcaatatttgacttaaaaccaaaagtgaggctctcagattggtaatatggtattcagcctttttcttgtttggcttttgtgccatttgcccctcactgacttgattgaattctttgtggctgatgcctcagtttttctggatcagtagtgctgcacttccacttttcctctccctcattttactgtctttatttttagccttttttctgtgtagccctctaacctgccctttatattttgaaccaaataaaacatttcttggaatgggagctttggactacagtatacagacaaacaactcacaattttagcatatgaggctactatcttctgtggatgtgtatgtaattatacagtttctgtatttatcctgtggctgatagaaaaagttaaagctgtttaattcaccatagtatttctacaacacagcaatttattagtctgacttctcttctaaaatcaactctaaaatggtattttgtacttgtctcagagacgaattctgccatgatccttatgatctgtgttatgttgggccaaaggtgattactttataaattataaagatccctaaactctgcattgcctttggtcccaaacaagcaaatctgggtcaattaatgaaaaaaaaaagaaaagaaaagaaaatgtcttactttgggccctgttgcactctcccgtgctgttttagccccagccctactctattcccagtggcctttgccttcattccttctttgctctgctgggcatcttgagaggaaaacttcacaccgacttcctctactataaattctctccctcctctcaactctacacttctctttgccaacatacaccatactgcttcactgatttttttttttaagcccacagtcctttctggctcttttccacctttaacactcttatgttgaaatcttccgtttttcctcctttctctttagtaagacctcaggtttttaaaaaagctaggcttgattgtttattctgcatggtccacttctgccttccttcctcttctattacccttttcttattctagactg

SEQ ID NO: 321729 - DNA, 5786 bp, Homo sapiens
tttcggtgcttccctcttcccccgttcgctggtctactgattgtgcgtcgcctgcatctcgcgtcctgcgggcgtttattgcgtggacgcgcctgcccgtcatgtgttttcgttgtcgctgtcgatggttcggtgcggtgctttatgtctgatgcgatctctggggctgtgcttcccctctctcactggtttgtgttttcttaagatgctgggttctgtttggcgtgtcccgtcgccaaactattatgatcttcgtgcgtctctctagctctttcgctcgcgtttgcggccttggtgttgggttgtttggtgtggtgttgggttgttgttgttttgtgtgtgtgtttaggtgttcggtgggtgtagtgttggtgactttttttttttcagctatagcattaatttatttgttcagaatacattggcagctgctagtggtttccctggaagtggcagcagcagtgagcagtcagcagatggatgatcagttgagtttagctggagtggggagcaggagccccaggaacaggggtgttggctgagccccattctgggtcaggccctccccctttgcagggcagccgagggtcagatttttgcaccaaggagaactggcaggttcctgcctcctgacgtacctcacacccagccgggaagtcgatgggatgctgggacgtgtcacagcagcccacgccaacaggatgcagacaggtgcaatggaaacagtccttgcggagccaagactcacccagggtaaaatatttcccctcatagtgacagggggcttgagcttggaagtagcacttgctgtagactcctgggtgctggaggagtagagacatcaccaagcagatgatcccccagcctcctaggatccccttggcctgtccagcccagagcatccttagggccattgctgctgcacagccctctcagacccttcttggcctctgctcagctactctggtcttgactccttgactttgctttgcgttgctccttgagtcttagtttctgtctttctcccctgggctcctgtctcacactatctccctgccctctgctctcacaggctggggatgtttataaagtgaggaccctggccccctgctgagtagagctggaaaagttgtaactctgtttcctgaggtgagggcatgaaaacaagaggtctagctttaacaagctgtgagagctgattcatgccccggcacagctagagggagggaggtggccatggagggggcactggactgggcacttccccagcaaggaggcaggaggggcaagggcccccaggtggtccccagatctcttccctgacctggagagaaggaagcattccaccttccccctttctcccccactgccaccaccaggggtgtgtatgctgggatccctgcctggaccggagggaggcatttcctggggatggttaatcctgtgccccagccaaacccaggagctgcaatagggtgcgacggccagaagctccaggagagtgagcaggcacctggagtggagactgtgtttccctcagatcctagggcagggtttccctaatgtatccaagaaatagggctgcccctcagagatggtggggagggtctcttttcctcaggcattccagaggtgaactgtccattgcttatcaccttcaaacatacagcagatgtgggatcaccccacatctggggatggttctttcccctttcaaagaggagcatctctaagtgccctgatgggatgaatcactccaggttcacagaggtgtcctctctttcctcccatatataatggagtgaggtttttaggaatttatcatttggcatcctctgagtttcccacaggttctggaggagcccaggatggattattgagagcatgggctgtagagacagtcttcttggattcagatcctgactccacttagctatgtaacctggtcagattacttcacctctctgagcctgtttcctcatctataaattggggatagtaatgccaactcattgggctgttatgaggattactgagataatgcgtgcagtgctcttatcaccatctctggtgcgtaagcgtcaggaaatagcagttgctgtgattggggctaaagctctgaggcaaaatgggcgacattattttctttgaatgacattaagcagtttgtgcatagctgagggcttctattggggatggctgtctcctggcatagacctctgcacctttcacactcatactccttgtcagcagtccccaacctttttggtaccagggaccggttttgtggaaaacaatttttccaccagtggatggagggggatagcagcggggagatgattttgggatgaaactgtttcatctcagatcatcaggcattagattctcataaggagtgtgcaatctagatcccttgcatgcggagttcacagtggggtttgcactcctgtgagaatctaatgcctctgctgatctgccaggaggaggagctcaggcggtaatgctcactcgcctgccgcccacctcctgctttgtgctcccgcttcctaacaggccacagactggtactggcctgtggcctgggggatggagacccctaatccatgtcacctttcccacctctttcaaaaacaggtacctccaggaacattttggttttggcccttgtattgacttctgaatgtctagtttgagaaactgttcccaataagccttcttcccccagatctgcaccctcgcctctaccctaggacaagatgtccttttctcatcatcctgccaggctaactttaagtctcctgctttttctcacttggatttggatccatttcttcctatttccgctcatgtgaactctccagttctcctttctcaccactctcctgctagccatctctttggcactaaaggccctggtcaaattggatttctttcatttttccacacttcaaagacccatgttctaggtattctccatagggatagtctctttggcatttatttggtttttctacgttttcagtcccatttactccaagactcactccctgccacctagtgcatcagatacagctacttctggctgacttttcaagggggaccaccctacctgtcatctcttcactgttcagaaatgactgtgtcagtgcacctcaaactcccttgctgtccttttccaaggagacagctaaggtggatggagatgcagaatggacctcacgttcgccctagtcaggactgataccctttccgtttcagaggattgccaagaaaaaactcacagttgaggcagggtgctctgaggtcggctgcggtgtgggaggcacggcctgggcctgctctctgggctggagcaggtggattcgaaggcctgtctagcacgagggcccaaaggtcttgtcagtggccagtagctctgccgcctttcccagagagggggtccaggggacatcctggaaggctgggccctgggccaccttctgctcttgcaagctagagccagcccaatagggggcggatgtgagtggggagctggggcgcatgaaggtgggggtgatgccgaaggggaagggatcgccagtggggattggtgcgtgtgcggaaacggggacagaagtgaaggttcatcgcctataacgaagatgaggtaggcatataggggcttctggaaagctagaggctgggctgagccaggagtcctctcccagaagttggggggcggtgcagaggtgtgggtcgagcccgcatgcgtgcctgctggggagggggtgagtggtgaggaccaggcccgctgggtcctgggggcgcggtggctggcgcgcaggtcccggagggggcggctggcgcgcactacacgcttgggaacaaggaaaacatccgccggaggcccggccgggcggcgctccagcctcggggcaggtgcgcggagaggaagtgagagcattccggcccccccaccccaaccccggccgctggccctctggtgagtcacagccgacccccgccgccggagggagaggggagctgcgggccagagccccggagggtctggaggagccaggagggtttctgggagcagagggtcacttagtgggcttctgtcgtggtgtcgctacgggcgcgaaacggacactgaacacagtctgactgtatggaggcaggtggggagggatcccctgggagaacttggcgggccgagagcagaccccagggcaaggaggggcccccgagggggaaaccgggagtcgggcaggtggcgtaacccagaaagggaaggagagccggattgattggggtgagagaggaaggaagcacgccaagttaggcctgggagaactgagggacctgaggagggaggagggagaccaacacagggtgggaaggcggaaatggccaaaccccaggcatcaggtctgtccagaggctgacgtagacagtgaagggtgaagggtaggttttaggagtagggggagttatgattatttggttacattttgggattatttggtctcacaggtagaagggagcctgctggtctctgtgtaacggatggcttaaaagcaaggttgtctgcgtcttggattactgtctgccattcagcctttgccaaaaaatttggcactgatctgcacatttttatagtcatttaaaattgtatgactctgtcaaatgatttaagtaattttggtggatttttaaaaataaaaaaataaaaatagaaaagttgcacaatctaattcaatatttgacttaaaaccaaaagtgaggctctcagattggtaatatggtattcagcctttttcttgtttggcttttgtgccatttgcccctcactgacttgattgaattctttgtggctgatgcctcagtttttctggatcagtagtgctgcacttccacttttcctctccctcattttactgtctttatttttagccttttttctgtgtagccctctaacctgccctttatattttgaaccaaataaaacatttcttggaatgggagctttggactacagtatacagacaaacaactcacaattttagcatatgaggctactatcttctgtggatgtgtatgtaattatacagtttctgtatttatcctgtggctgatagaaaaagttaaagctgtttaattcaccatagtatttctacaacacagcaatttattagtctgacttctcttctaaaatcaactctaaaatggtattttgtacttgtctcagagacgaattctgccatgatccttatgatctgtgttatgttgggccaaaggtgattactttataaattataaagatccctaaactctgcattgcctttggtcccaaacaagcaaatctgggtcaattaatgaaaaaaaaaagaaaagaaaagaaaatgtcttactttgggccctgttgcactctcccgtgctgttttagccccagccctactctattcccagtggcctttgccttcattccttctttgctctgctgggcatcttgagaggaaaacttcacaccgacttcctctactataaattctctccctcctctcaactctacacttctctttgccaacatacaccatactgcttcactgatttttttttttaagcccacagtcctttctggctcttttccacctttaacactcttatgttgaaatcttccgtttttcctcctttctctttagtaagacctcaggtttttaaaaaagctaggcttgattgtttattctgcatggtccacttctgccttccttcctcttctattacccttttcttattctagactg

SEQ ID NO: 321730 - DNA, 5494 bp, Homo sapiens
tgtttttttgttgtggtttgtgtttttttttttttttttttttttttttttttttttttttttttttttttttttttttttttttttttttttttcagctatagcattaatttatttgttcagaatacattggcagctgctagtggtttccctggaagtggcagcagcagtgagcagtcagcagatggatgatcagttgagtttagctggagtggggagcaggagccccaggaacaggggtgttggctgagccccattctgggtcaggccctccccctttgcagggcagccgagggtcagatttttgcaccaaggagaactggcaggttcctgcctcctgacgtacctcacacccagccgggaagtcgatgggatgctgggacgtgtcacagcagcccacgccaacaggatgcagacaggtgcaatggaaacagtccttgcggagccaagactcacccagggtaaaatatttcccctcatagtgacagggggcttgagcttggaagtagcacttgctgtagactcctgggtgctggaggagtagagacatcaccaagcagatgatcccccagcctcctaggatccccttggcctgtccagcccagagcatccttagggccattgctgctgcacagccctctcagacccttcttggcctctgctcagctactctggtcttgactccttgactttgctttgcgttgctccttgagtcttagtttctgtctttctcccctgggctcctgtctcacactatctccctgccctctgctctcacaggctggggatgtttataaagtgaggaccctggccccctgctgagtagagctggaaaagttgtaactctgtttcctgaggtgagggcatgaaaacaagaggtctagctttaacaagctgtgagagctgattcatgccccggcacagctagagggagggaggtggccatggagggggcactggactgggcacttccccagcaaggaggcaggaggggcaagggcccccaggtggtccccagatctcttccctgacctggagagaaggaagcattccaccttccccctttctcccccactgccaccaccaggggtgtgtatgctgggatccctgcctggaccggagggaggcatttcctggggatggttaatcctgtgccccagccaaacccaggagctgcaatagggtgcgacggccagaagctccaggagagtgagcaggcacctggagtggagactgtgtttccctcagatcctagggcagggtttccctaatgtatccaagaaatagggctgcccctcagagatggtggggagggtctcttttcctcaggcattccagaggtgaactgtccattgcttatcaccttcaaacatacagcagatgtgggatcaccccacatctggggatggttctttcccctttcaaagaggagcatctctaagtgccctgatgggatgaatcactccaggttcacagaggtgtcctctctttcctcccatatataatggagtgaggtttttaggaatttatcatttggcatcctctgagtttcccacaggttctggaggagcccaggatggattattgagagcatgggctgtagagacagtcttcttggattcagatcctgactccacttagctatgtaacctggtcagattacttcacctctctgagcctgtttcctcatctataaattggggatagtaatgccaactcattgggctgttatgaggattactgagataatgcgtgcagtgctcttatcaccatctctggtgcgtaagcgtcaggaaatagcagttgctgtgattggggctaaagctctgaggcaaaatgggcgacattattttctttgaatgacattaagcagtttgtgcatagctgagggcttctattggggatggctgtctcctggcatagacctctgcacctttcacactcatactccttgtcagcagtccccaacctttttggtaccagggaccggttttgtggaaaacaatttttccaccagtggatggagggggatagcagcggggagatgattttgggatgaaactgtttcatctcagatcatcaggcattagattctcataaggagtgtgcaatctagatcccttgcatgcggagttcacagtggggtttgcactcctgtgagaatctaatgcctctgctgatctgccaggaggaggagctcaggcggtaatgctcactcgcctgccgcccacctcctgctttgtgctcccgcttcctaacaggccacagactggtactggcctgtggcctgggggatggagacccctaatccatgtcacctttcccacctctttcaaaaacaggtacctccaggaacattttggttttggcccttgtattgacttctgaatgtctagtttgagaaactgttcccaataagccttcttcccccagatctgcaccctcgcctctaccctaggacaagatgtccttttctcatcatcctgccaggctaactttaagtctcctgctttttctcacttggatttggatccatttcttcctatttccgctcatgtgaactctccagttctcctttctcaccactctcctgctagccatctctttggcactaaaggccctggtcaaattggatttctttcatttttccacacttcaaagacccatgttctaggtattctccatagggatagtctctttggcatttatttggtttttctacgttttcagtcccatttactccaagactcactccctgccacctagtgcatcagatacagctacttctggctgacttttcaagggggaccaccctacctgtcatctcttcactgttcagaaatgactgtgtcagtgcacctcaaactcccttgctgtccttttccaaggagacagctaaggtggatggagatgcagaatggacctcacgttcgccctagtcaggactgataccctttccgtttcagaggattgccaagaaaaaactcacagttgaggcagggtgctctgaggtcggctgcggtgtgggaggcacggcctgggcctgctctctgggctggagcaggtggattcgaaggcctgtctagcacgagggcccaaaggtcttgtcagtggccagtagctctgccgcctttcccagagagggggtccaggggacatcctggaaggctgggccctgggccaccttctgctcttgcaagctagagccagcccaatagggggcggatgtgagtggggagctggggcgcatgaaggtgggggtgatgccgaaggggaagggatcgccagtggggattggtgcgtgtgcggaaacggggacagaagtgaaggttcatcgcctataacgaagatgaggtaggcatataggggcttctggaaagctagaggctgggctgagccaggagtcctctcccagaagttggggggcggtgcagaggtgtgggtcgagcccgcatgcgtgcctgctggggagggggtgagtggtgaggaccaggcccgctgggtcctgggggcgcggtggctggcgcgcaggtcccggagggggcggctggcgcgcactacacgcttgggaacaaggaaaacatccgccggaggcccggccgggcggcgctccagcctcggggcaggtgcgcggagaggaagtgagagcattccggcccccccaccccaaccccggccgctggccctctggtgagtcacagccgacccccgccgccggagggagaggggagctgcgggccagagccccggagggtctggaggagccaggagggtttctgggagcagagggtcacttagtgggcttctgtcgtggtgtcgctacgggcgcgaaacggacactgaacacagtctgactgtatggaggcaggtggggagggatcccctgggagaacttggcgggccgagagcagaccccagggcaaggaggggcccccgagggggaaaccgggagtcgggcaggtggcgtaacccagaaagggaaggagagccggattgattggggtgagagaggaaggaagcacgccaagttaggcctgggagaactgagggacctgaggagggaggagggagaccaacacagggtgggaaggcggaaatggccaaaccccaggcatcaggtctgtccagaggctgacgtagacagtgaagggtgaagggtaggttttaggagtagggggagttatgattatttggttacattttgggattatttggtctcacaggtagaagggagcctgctggtctctgtgtaacggatggcttaaaagcaaggttgtctgcgtcttggattactgtctgccattcagcctttgccaaaaaatttggcactgatctgcacatttttatagtcatttaaaattgtatgactctgtcaaatgatttaagtaattttggtggatttttaaaaataaaaaaataaaaatagaaaagttgcacaatctaattcaatatttgacttaaaaccaaaagtgaggctctcagattggtaatatggtattcagcctttttcttgtttggcttttgtgccatttgcccctcactgacttgattgaattctttgtggctgatgcctcagtttttctggatcagtagtgctgcacttccacttttcctctccctcattttactgtctttatttttagccttttttctgtgtagccctctaacctgccctttatattttgaaccaaataaaacatttcttggaatgggagctttggactacagtatacagacaaacaactcacaattttagcatatgaggctactatcttctgtggatgtgtatgtaattatacagtttctgtatttatcctgtggctgatagaaaaagttaaagctgtttaattcaccatagtatttctacaacacagcaatttattagtctgacttctcttctaaaatcaactctaaaatggtattttgtacttgtctcagagacgaattctgccatgatccttatgatctgtgttatgttgggccaaaggtgattactttataaattataaagatccctaaactctgcattgcctttggtcccaaacaagcaaatctgggtcaattaatgaaaaaaaaaagaaaagaaaagaaaatgtcttactttgggccctgttgcactctcccgtgctgttttagccccagccctactctattcccagtggcctttgccttcattccttctttgctctgctgggcatcttgagaggaaaacttcacaccgacttcctctactataaattctctccctcctctcaactctacacttctctttgccaacatacaccatactgcttcactgatttttttttttaagcccacagtcctttctggctcttttccacctttaacactcttatgttgaaatcttccgtttttcctcctttctctttagtaagacctcaggtttttaaaaaagctaggcttgattgtttattctgcatggtccacttctgccttccttcctcttctattacccttttcttattctagactg

SEQ ID NO: 321731 - DNA, 4333 bp, Homo sapiens
ccgcctctaccgcccagcggacgccgccgccgccgccgccgccgcgtacctagccaggtccctgaggggcgggcagatgaggcctaggggtgccgatccctagtgtcgactatgcgagatctgattccggagctgccatgattgaagtggtagcagagctcagccggggtcctgtatttttggctggggaggcgctggagtgtgtagtgaccgtcaccaacccccttccgcccacggccacttctgcatccagtgaggccctggcctgggccagtgcccaaatccactgccagttccatgccagtgagagtcgagtagcactgcctcctcctgactctagtcagccagatgtccagcccgacagccagactgtctttctgccacaccgaggtgagaggggccagtgtatcctttctactccaccgaaaattctattctgtgacctgaggcttgatcctggagagtccaaatcatactcctacagtgaagtgctgcccatagagggaccaccctcctttcggggtcagtcagtcaagtacgtctacaaactgaccattggctgccagcgtgtcaactcccctatcactttactcagagtccctctgagggttcttgtgctgactggccttcaggatgtccggtttccccaggatgaggctgtagccccatccagtccattcttggaggaggatgaaggtgggaagaaagattcatggctagctgagctggctggggaacgcctaatggctgccacatcctgccgcagcctccatctatacaatatcagtgatggccgagggaaagttgggacgtttggcatcttcaaatctgtgtacagacttggcgaggacgtggtggggaccttaaacttaggggaaggaaccgtagcttgtttgcagttttcagtcagcttacagaccgaggagcgtgtacagcctgagtaccagcggcgacgtggggcagggggtgtcccctctgtgtcacatgtgactcacgcccggcaccaggaatcctgcctacatacaactagaaccagcttctccctcccaatccctctcagctccaccccaggcttctgtacagccattgtgtccttgaagtggagattgcattttgaatttgtaacgtcccgagaaccaggattggtactcctaccccctgtggaacagcccgaacctaccacctggacaggacctgagcaagtacctgtagacaccttcagctgggacctgcccatcaaggtgctgcctactagccccaccctggcctcatatgctgccccaggccccagcaccagcaccataaccatctgaaactggcccaccctggtgctagttccttccggatactgagaactcagcacctggactctaatgggacccactttttccacctggggtccaatgtcgtggacagtgagagtcgggctttcagctatagcattaatttatttgttcagaatacattggcagctgctagtggtttccctggaagtggcagcagcagtgagcagtcagcagatggatgatcagttgagtttagctggagtggggagcaggagccccaggaacaggggtgttggctgagccccattctgggtcaggccctccccctttgcagggcagccgagggtcagatttttgcaccaaggagaactggcaggttcctgcctcctgacgtacctcacacccagccgggaagtcgatgggatgctgggacgtgtcacagcagcccacgccaacaggatgcagacaggtgcaatggaaacagtccttgcggagccaagactcacccagggtaaaatatttcccctcatagtgacagggggagttgaggcagggtgctctgaggtcggctgcggtgtgggaggcacggcctgggcctgctctctgggctggagcaggtggattcgaaggcctgtctagcacgagggcccaaaggtcttgtcagtggccagtagctctgccgcctttcccagagagggggtccaggggacatcctggaaggctgggccctgggccaccttctgctcttgcaagctagagccagcccaatagggggcggatgtgagtggggagctggggcgcatgaaggtgggggtgatgccgaaggggaagggatcgccagtggggattggtgcgtgtgcggaaacggggacagaagtgaaggttcatcgcctataacgaagatgaggtaggcatataggggcttctggaaagctagaggctgggctgagccaggagtcctctcccagaagttggggggcggtgcagaggtgtgggtcgagcccgcatgcgtgcctgctggggagggggtgagtggtgaggaccaggcccgctgggtcctgggggcgcggtggctggcgcgcaggtcccggagggggcggctggcgcgcactacacgcttgggaacaaggaaaacatccgccggaggcccggccgggcggcgctccagcctcggggcaggtgcgcggagaggaagtgagagcattccggcccccccaccccaaccccggccgctggccctctggtgagtcacagccgacccccgccgccggagggagaggggagctgcgggccagagccccggagggtctggaggagccaggagggtttctgggagcagagggtcacttagtgggcttctgtcgtggtgtcgctacgggcgcgaaacggacactgaacacagtctgactgtatggaggcaggtggggagggatcccctgggagaacttggcgggccgagagcagaccccagggcaaggaggggcccccgagggggaaaccgggagtcgggcaggtggcgtaacccagaaagggaaggagagccggattgattggggtgagagaggaaggaagcacgccaagttaggcctgggagaactgagggacctgaggagggaggagggagaccaacacagggtgggaaggcggaaatggccaaaccccaggcatcaggtctgtccagaggctgacgtagacagtgaagggtgaagggtaggttttaggagtagggggagttatgattatttggttacattttgggattatttggtctcacaggtagaagggagcctgctggtctctgtgtaacggatggcttaaaagcaaggttgtctgcgtcttggattactgtctgccattcagcctttgccaaaaaatttggcactgatctgcacatttttatagtcatttaaaattgtatgactctgtcaaatgatttaagtaattttggtggatttttaaaaataaaaaaataaaaatagaaaagttgcacaatctaattcaatatttgacttaaaaccaaaagtgaggctctcagattggtaatatggtattcagcctttttcttgtttggcttttgtgccatttgcccctcactgacttgattgaattctttgtggctgatgcctcagtttttctggatcagtagtgctgcacttccacttttcctctccctcattttactgtctttatttttagccttttttctgtgtagccctctaacctgccctttatattttgaaccaaataaaacatttcttggaatgggagctttggactacagtatacagacaaacaactcacaattttagcatatgaggctactatcttctgtggatgtgtatgtaattatacagtttctgtatttatcctgtggctgatagaaaaagttaaagctgtttaattcaccatagtatttctacaacacagcaatttattagtctgacttctcttctaaaatcaactctaaaatggtattttgtacttgtctcagagacgaattctgccatgatccttatgatctgtgttatgttgggccaaaggtgattactttataaattataaagatccctaaactctgcattgcctttggtcccaaacaagcaaatctgggtcaattaatgaaaaaaaaaagaaaagaaaagaaaatgtcttactttgggccctgttgcactctcccgtgctgttttagccccagccctactctattcccagtggcctttgccttcattccttctttgctctgctgggcatcttgagaggaaaacttcacaccgacttcctctactataaattctctccctcctctcaactctacacttctctttgccaacatacaccatactgcttcactgatttttttttttaagcccacagtcctttctggctcttttccacctttaacactcttatgttgaaatcttccgtttttcctcctttctctttagtaagacctcaggtttttaaaaaagctaggcttgattgtttattctgcatggtccacttctgccttccttcctcttctattacccttttcttattctagactg

SEQ ID NO: 321732 - DNA, 6598 bp, Homo sapiens
ccgcctctaccgcccagcggacgccgccgccgccgccgccgccgcgtacctagccaggtccctgaggggcgggcagatgaggcctaggggtgccgatccctagtgtcgactatgcgagatctgattccggagctgccatgattgaagtggtagcagagctcagccggggtcctgtatttttggctggggaggcgctggagtgtgtagtgaccgtcaccaacccccttccgcccacggccacttctgcatccagtgaggccctggcctgggccagtgcccaaatccactgccagttccatgccagtgagagtcgagtagcactgcctcctcctgactctagtcagccagatgtccagcccgacagccagactgtctttctgccacaccgaggtgagaggggccagtgtatcctttctactccaccgaaaattctattctgtgacctgaggcttgatcctggagagtccaaatcatactcctacagtgaagtgctgcccatagagggaccaccctcctttcggggtcagtcagtcaagtacgtctacaaactgaccattggctgccagcgtgtcaactcccctatcactttactcagagtccctctgagggttcttgtgctgactggccttcaggatgtccggtttccccaggatgaggctgtagccccatccagtccattcttggaggaggatgaaggtgggaagaaagattcatggctagctgagctggctggggaacgcctaatggctgccacatcctgccgcagcctccatctatacaatatcagtgatggccgagggaaagttgggacgtttggcatcttcaaatctgtgtacagacttggcgaggacgtggtggggaccttaaacttaggggaaggaaccgtagcttgtttgcaggagtcagcacagtgaaaggctgcctttatccctgcccacatgttccctctctcacagttttccccccacagagcccctttcagtggccccttggtcctcctaactaagctgtcacctaccatatgtgggcctttttgttttataacaggagtattttctctccaggtccaccccaacctcccctgatttatagcctgaagccttatctttcacactagtgttggtcccttcaggtttggcccatcttgtattgctcttctgttcattcttacatcacagcaatctagtcactccctggtcatccctcagtcactcatatcagagtcattctctctggccatctttggtcactcacgtgtcacagcagcccacgccaacaggatgcagacaggtgcaatggaaacagtccttgcggagccaagactcacccagggtaaaatatttcccctcatagtgacagggggggctagggaagaacgggaaatgttagtaggtgtaggagtgctgatgagaggcagaggctcttctggtctggggtggagacagtaagtacgcactatccccgtatttagtttgtctttcctgtttcacagctggaggaagcctgggtattttgacacgggatcatctgtaaggccccatcctccctgtgccctctctgctgctcctccattcctaacgcttcaccccactttaccttgagcttggaagtagcacttgctgtagactcctgggtgctggaggagtagagacatcaccaagcagatgatcccccagcctcctaggatccccttggcctgtccagcccagagcatccttagggccattgctgctgcacagccctctcagacccttcttggcctctgctcagctactctggtcttgactccttgactttgctttgcgttgctccttgagtcttagtttctgtctttctcccctgggctcctgtctcacactatctccctgccctctgctctcacaggctggggatgtttataaagtgaggaccctggccccctgctgagtagagctggaaaagttgtaactctgtttcctgaggtgagggcatgaaaacaagaggtctagctttaacaagctgtgagagctgattcatgccccggcacagctagagggagggaggtggccatggagggggcactggactgggcacttccccagcaaggaggcaggaggggcaagggcccccaggtggtccccagatctcttccctgacctggagagaaggaagcattccaccttccccctttctcccccactgccaccaccaggggtgtgtatgctgggatccctgcctggaccggagggaggcatttcctggggatggttaatcctgtgccccagccaaacccaggagctgcaatagggtgcgacggccagaagctccaggagagtgagcaggcacctggagtggagactgtgtttccctcagatcctagggcagggtttccctaatgtatccaagaaatagggctgcccctcagagatggtggggagggtctcttttcctcaggcattccagaggtgaactgtccattgcttatcaccttcaaacatacagcagatgtgggatcaccccacatctggggatggttctttcccctttcaaagaggagcatctctaagtgccctgatgggatgaatcactccaggttcacagaggtgtcctctctttcctcccatatataatggagtgaggtttttaggaatttatcatttggcatcctctgagtttcccacaggttctggaggagcccaggatggattattgagagcatgggctgtagagacagtcttcttggattcagatcctgactccacttagctatgtaacctggtcagattacttcacctctctgagcctgtttcctcatctataaattggggatagtaatgccaactcattgggctgttatgaggattactgagataatgcgtgcagtgctcttatcaccatctctggtgcgtaagcgtcaggaaatagcagttgctgtgattggggctaaagctctgaggcaaaatgggcgacattattttctttgaatgacattaagcagtttgtgcatagctgagggcttctattggggatggctgtctcctggcatagacctctgcacctttcacactcatactccttgtcagcagtccccaacctttttggtaccagggaccggttttgtggaaaacaatttttccaccagtggatggagggggatagcagcggggagatgattttgggatgaaactgtttcatctcagatcatcaggcattagattctcataaggagtgtgcaatctagatcccttgcatgcggagttcacagtggggtttgcactcctgtgagaatctaatgcctctgctgatctgccaggaggaggagctcaggcggtaatgctcactcgcctgccgcccacctcctgctttgtgctcccgcttcctaacaggccacagactggtactggcctgtggcctgggggatggagacccctaatccatgtcacctttcccacctctttcaaaaacaggtacctccaggaacattttggttttggcccttgtattgacttctgaatgtctagtttgagaaactgttcccaataagccttcttcccccagatctgcaccctcgcctctaccctaggacaagatgtccttttctcatcatcctgccaggctaactttaagtctcctgctttttctcacttggatttggatccatttcttcctatttccgctcatgtgaactctccagttctcctttctcaccactctcctgctagccatctctttggcactaaaggccctggtcaaattggatttctttcatttttccacacttcaaagacccatgttctaggtattctccatagggatagtctctttggcatttatttggtttttctacgttttcagtcccatttactccaagactcactccctgccacctagtgcatcagatacagctacttctggctgacttttcaagggggaccaccctacctgtcatctcttcactgttcagaaatgactgtgtcagtgcacctcaaactcccttgctgtccttttccaaggagacagctaaggtggatggagatgcagaatggacctcacgttcgccctagtcaggactgataccctttccgtttcagaggattgccaagaaaaaactcacagttgaggcagggtgctctgaggtcggctgcggtgtgggaggcacggcctgggcctgctctctgggctggagcaggtggattcgaaggcctgtctagcacgagggcccaaaggtcttgtcagtggccagtagctctgccgcctttcccagagagggggtccaggggacatcctggaaggctgggccctgggccaccttctgctcttgcaagctagagccagcccaatagggggcggatgtgagtggggagctggggcgcatgaaggtgggggtgatgccgaaggggaagggatcgccagtggggattggtgcgtgtgcggaaacggggacagaagtgaaggttcatcgcctataacgaagatgaggtaggcatataggggcttctggaaagctagaggctgggctgagccaggagtcctctcccagaagttggggggcggtgcagaggtgtgggtcgagcccgcatgcgtgcctgctggggagggggtgagtggtgaggaccaggcccgctgggtcctgggggcgcggtggctggcgcgcaggtcccggagggggcggctggcgcgcactacacgcttgggaacaaggaaaacatccgccggaggcccggccgggcggcgctccagcctcggggcaggtgcgcggagaggaagtgagagcattccggcccccccaccccaaccccggccgctggccctctggtgagtcacagccgacccccgccgccggagggagaggggagctgcgggccagagccccggagggtctggaggagccaggagggtttctgggagcagagggtcacttagtgggcttctgtcgtggtgtcgctacgggcgcgaaacggacactgaacacagtctgactgtatggaggcaggtggggagggatcccctgggagaacttggcgggccgagagcagaccccagggcaaggaggggcccccgagggggaaaccgggagtcgggcaggtggcgtaacccagaaagggaaggagagccggattgattggggtgagagaggaaggaagcacgccaagttaggcctgggagaactgagggacctgaggagggaggagggagaccaacacagggtgggaaggcggaaatggccaaaccccaggcatcaggtctgtccagaggctgacgtagacagtgaagggtgaagggtaggttttaggagtagggggagttatgattatttggttacattttgggattatttggtctcacaggtagaagggagcctgctggtctctgtgtaacggatggcttaaaagcaaggttgtctgcgtcttggattactgtctgccattcagcctttgccaaaaaatttggcactgatctgcacatttttatagtcatttaaaattgtatgactctgtcaaatgatttaagtaattttggtggatttttaaaaataaaaaaataaaaatagaaaagttgcacaatctaattcaatatttgacttaaaaccaaaagtgaggctctcagattggtaatatggtattcagcctttttcttgtttggcttttgtgccatttgcccctcactgacttgattgaattctttgtggctgatgcctcagtttttctggatcagtagtgctgcacttccacttttcctctccctcattttactgtctttatttttagccttttttctgtgtagccctctaacctgccctttatattttgaaccaaataaaacatttcttggaatgggagctttggactacagtatacagacaaacaactcacaattttagcatatgaggctactatcttctgtggatgtgtatgtaattatacagtttctgtatttatcctgtggctgatagaaaaagttaaagctgtttaattcaccatagtatttctacaacacagcaatttattagtctgacttctcttctaaaatcaactctaaaatggtattttgtacttgtctcagagacgaattctgccatgatccttatgatctgtgttatgttgggccaaaggtgattactttataaattataaagatccctaaactctgcattgcctttggtcccaaacaagcaaatctgggtcaattaatgaaaaaaaaaagaaaagaaaagaaaatgtcttactttgggccctgttgcactctcccgtgctgttttagccccagccctactctattcccagtggcctttgccttcattccttctttgctctgctgggcatcttgagaggaaaacttcacaccgacttcctctactataaattctctccctcctctcaactctacacttctctttgccaacatacaccatactgcttcactgatttttttttttaagcccacagtcctttctggctcttttccacctttaacactcttatgttgaaatcttccgtttttcctcctttctctttagtaagacctcaggtttttaaaaaagctaggcttgattgtttattctgcatggtccacttctgccttccttcctcttctattacccttttcttattctagactg

SEQ ID NO: 321733 - DNA, 6347 bp, Homo sapiens
ccgcctctaccgcccagcggacgccgccgccgccgccgccgccgcgtacctagccaggtccctgaggggcgggcagatgaggcctaggggtgccgatccctagtgtcgactatgcgagatctgattccggagctgccatgattgaagtggtagcagagctcagccggggtcctgtatttttggctggggaggcgctggagtgtgtagtgaccgtcaccaacccccttccgcccacggccacttctgcatccagtgaggccctggcctgggccagtgcccaaatccactgccagttccatgccagtgagagtcgagtagcactgcctcctcctgactctagtcagccagatgtccagcccgacagccagactgtctttctgccacaccgaggtgagaggggccagtgtatcctttctactccaccgaaaattctattctgtgacctgaggcttgatcctggagagtccaaatcatactcctacagtgaagtgctgcccatagagggaccaccctcctttcggggtcagtcagtcaagtacgtctacaaactgaccattggctgccagcgtgtcaactcccctatcactttactcagagtccctctgagggttcttgtgctgactggccttcaggatgtccggtttccccaggatgaggctgtagccccatccagtccattcttggaggaggatgaaggtgggaagaaagattcatggctagctgagctggctggggaacgcctaatggctgccacatcctgccgcagcctccatctatacaatatcagtgatggccgagggaaagttgggacgtttggcatcttcaaatctgtgtacagacttggcgaggacgtggtggggaccttaaacttaggggaaggaaccgtagcttgtttgcagttttcagtcagcttacagaccgaggagcgtgtacagcctgagtaccagcggcgacgtggggcagggggtgtcccctctgtgtcacatgtgactcacgcccggcaccaggaatcctgcctacatacaactagaaccagcttctccctcccaatccctctcagctccaccccaggcttctgtacagccattgtgtccttgaagtggagattgcattttgaatttgtaacgtcccgagaaccaggattggtactcctaccccctgtggaacagcccgaacctaccacctggacaggacctgagcaagtacctgtagacaccttcagctgggacctgcccatcaagctggaggaagcctgggtattttgacacgggatcatctgtaaggccccatcctccctgtgccctctctgctgctcctccattcctaacgcttcaccccactttaccttgagcttggaagtagcacttgctgtagactcctgggtgctggaggagtagagacatcaccaagcagatgatcccccagcctcctaggatccccttggcctgtccagcccagagcatccttagggccattgctgctgcacagccctctcagacccttcttggcctctgctcagctactctggtcttgactccttgactttgctttgcgttgctccttgagtcttagtttctgtctttctcccctgggctcctgtctcacactatctccctgccctctgctctcacaggctggggatgtttataaagtgaggaccctggccccctgctgagtagagctggaaaagttgtaactctgtttcctgaggtgagggcatgaaaacaagaggtctagctttaacaagctgtgagagctgattcatgccccggcacagctagagggagggaggtggccatggagggggcactggactgggcacttccccagcaaggaggcaggaggggcaagggcccccaggtggtccccagatctcttccctgacctggagagaaggaagcattccaccttccccctttctcccccactgccaccaccaggggtgtgtatgctgggatccctgcctggaccggagggaggcatttcctggggatggttaatcctgtgccccagccaaacccaggagctgcaatagggtgcgacggccagaagctccaggagagtgagcaggcacctggagtggagactgtgtttccctcagatcctagggcagggtttccctaatgtatccaagaaatagggctgcccctcagagatggtggggagggtctcttttcctcaggcattccagaggtgaactgtccattgcttatcaccttcaaacatacagcagatgtgggatcaccccacatctggggatggttctttcccctttcaaagaggagcatctctaagtgccctgatgggatgaatcactccaggttcacagaggtgtcctctctttcctcccatatataatggagtgaggtttttaggaatttatcatttggcatcctctgagtttcccacaggttctggaggagcccaggatggattattgagagcatgggctgtagagacagtcttcttggattcagatcctgactccacttagctatgtaacctggtcagattacttcacctctctgagcctgtttcctcatctataaattggggatagtaatgccaactcattgggctgttatgaggattactgagataatgcgtgcagtgctcttatcaccatctctggtgcgtaagcgtcaggaaatagcagttgctgtgattggggctaaagctctgaggcaaaatgggcgacattattttctttgaatgacattaagcagtttgtgcatagctgagggcttctattggggatggctgtctcctggcatagacctctgcacctttcacactcatactccttgtcagcagtccccaacctttttggtaccagggaccggttttgtggaaaacaatttttccaccagtggatggagggggatagcagcggggagatgattttgggatgaaactgtttcatctcagatcatcaggcattagattctcataaggagtgtgcaatctagatcccttgcatgcggagttcacagtggggtttgcactcctgtgagaatctaatgcctctgctgatctgccaggaggaggagctcaggcggtaatgctcactcgcctgccgcccacctcctgctttgtgctcccgcttcctaacaggccacagactggtactggcctgtggcctgggggatggagacccctaatccatgtcacctttcccacctctttcaaaaacaggtacctccaggaacattttggttttggcccttgtattgacttctgaatgtctagtttgagaaactgttcccaataagccttcttcccccagatctgcaccctcgcctctaccctaggacaagatgtccttttctcatcatcctgccaggctaactttaagtctcctgctttttctcacttggatttggatccatttcttcctatttccgctcatgtgaactctccagttctcctttctcaccactctcctgctagccatctctttggcactaaaggccctggtcaaattggatttctttcatttttccacacttcaaagacccatgttctaggtattctccatagggatagtctctttggcatttatttggtttttctacgttttcagtcccatttactccaagactcactccctgccacctagtgcatcagatacagctacttctggctgacttttcaagggggaccaccctacctgtcatctcttcactgttcagaaatgactgtgtcagtgcacctcaaactcccttgctgtccttttccaaggagacagctaaggtggatggagatgcagaatggacctcacgttcgccctagtcaggactgataccctttccgtttcagaggattgccaagaaaaaactcacagttgaggcagggtgctctgaggtcggctgcggtgtgggaggcacggcctgggcctgctctctgggctggagcaggtggattcgaaggcctgtctagcacgagggcccaaaggtcttgtcagtggccagtagctctgccgcctttcccagagagggggtccaggggacatcctggaaggctgggccctgggccaccttctgctcttgcaagctagagccagcccaatagggggcggatgtgagtggggagctggggcgcatgaaggtgggggtgatgccgaaggggaagggatcgccagtggggattggtgcgtgtgcggaaacggggacagaagtgaaggttcatcgcctataacgaagatgaggtaggcatataggggcttctggaaagctagaggctgggctgagccaggagtcctctcccagaagttggggggcggtgcagaggtgtgggtcgagcccgcatgcgtgcctgctggggagggggtgagtggtgaggaccaggcccgctgggtcctgggggcgcggtggctggcgcgcaggtcccggagggggcggctggcgcgcactacacgcttgggaacaaggaaaacatccgccggaggcccggccgggcggcgctccagcctcggggcaggtgcgcggagaggaagtgagagcattccggcccccccaccccaaccccggccgctggccctctggtgagtcacagccgacccccgccgccggagggagaggggagctgcgggccagagccccggagggtctggaggagccaggagggtttctgggagcagagggtcacttagtgggcttctgtcgtggtgtcgctacgggcgcgaaacggacactgaacacagtctgactgtatggaggcaggtggggagggatcccctgggagaacttggcgggccgagagcagaccccagggcaaggaggggcccccgagggggaaaccgggagtcgggcaggtggcgtaacccagaaagggaaggagagccggattgattggggtgagagaggaaggaagcacgccaagttaggcctgggagaactgagggacctgaggagggaggagggagaccaacacagggtgggaaggcggaaatggccaaaccccaggcatcaggtctgtccagaggctgacgtagacagtgaagggtgaagggtaggttttaggagtagggggagttatgattatttggttacattttgggattatttggtctcacaggtagaagggagcctgctggtctctgtgtaacggatggcttaaaagcaaggttgtctgcgtcttggattactgtctgccattcagcctttgccaaaaaatttggcactgatctgcacatttttatagtcatttaaaattgtatgactctgtcaaatgatttaagtaattttggtggatttttaaaaataaaaaaataaaaatagaaaagttgcacaatctaattcaatatttgacttaaaaccaaaagtgaggctctcagattggtaatatggtattcagcctttttcttgtttggcttttgtgccatttgcccctcactgacttgattgaattctttgtggctgatgcctcagtttttctggatcagtagtgctgcacttccacttttcctctccctcattttactgtctttatttttagccttttttctgtgtagccctctaacctgccctttatattttgaaccaaataaaacatttcttggaatgggagctttggactacagtatacagacaaacaactcacaattttagcatatgaggctactatcttctgtggatgtgtatgtaattatacagtttctgtatttatcctgtggctgatagaaaaagttaaagctgtttaattcaccatagtatttctacaacacagcaatttattagtctgacttctcttctaaaatcaactctaaaatggtattttgtacttgtctcagagacgaattctgccatgatccttatgatctgtgttatgttgggccaaaggtgattactttataaattataaagatccctaaactctgcattgcctttggtcccaaacaagcaaatctgggtcaattaatgaaaaaaaaaagaaaagaaaagaaaatgtcttactttgggccctgttgcactctcccgtgctgttttagccccagccctactctattcccagtggcctttgccttcattccttctttgctctgctgggcatcttgagaggaaaacttcacaccgacttcctctactataaattctctccctcctctcaactctacacttctctttgccaacatacaccatactgcttcactgatttttttttttaagcccacagtcctttctggctcttttccacctttaacactcttatgttgaaatcttccgtttttcctcctttctctttagtaagacctcaggtttttaaaaaagctaggcttgattgtttattctgcatggtccacttctgccttccttcctcttctattacccttttcttattctagactg

SEQ ID NO: 321734 - DNA, 5225 bp, Homo sapiens
agggggaggaagatgataggctaggtacgaggctgggtgttgagggctagggaagaacgggaaatgttagtaggtgtaggagtgctgatgagaggcagaggctcttctggtctggggtggagacagtaagtacgcactatccccgtatttagtttgtctttcctgtttcacagctggaggaagcctgggtattttgacacgggatcatctgtaaggccccatcctccctgtgccctctctgctgctcctccattcctaacgcttcaccccactttaccttgagcttggaagtagcacttgctgtagactcctgggtgctggaggagtagagacatcaccaagcagatgatcccccagcctcctaggatccccttggcctgtccagcccagagcatccttagggccattgctgctgcacagccctctcagacccttcttggcctctgctcagctactctggtcttgactccttgactttgctttgcgttgctccttgagtcttagtttctgtctttctcccctgggctcctgtctcacactatctccctgctgagtagagctggaaaagttgtaactctgtttcctgaggtgagggcatgaaaacaagaggtctagctttaacaagctgtgagagctgattcatgccccggcacagctagagggagggaggtggccatggagggggcactggactgggcacttccccagcaaggaggcaggaggggcaagggcccccaggtggtccccagatctcttccctgacctggagagaaggaagcattccaccttccccctttctcccccactgccaccaccaggggtgtgtatgctgggatccctgcctggaccggagggaggcatttcctggggatggttaatcctgtgccccagccaaacccaggagctgcaatagggtgcgacggccagaagctccaggagagtgagcaggcacctggagtggagactgtgtttccctcagatcctagggcagggtttccctaatgtatccaagaaatagggctgcccctcagagatggtggggagggtctcttttcctcaggcattccagaggtgaactgtccattgcttatcaccttcaaacatacagcagatgtgggatcaccccacatctggggatggttctttcccctttcaaagaggagcatctctaagtgccctgatgggatgaatcactccaggttcacagaggtgtcctctctttcctcccatatataatggagtgaggtttttaggaatttatcatttggcatcctctgagtttcccacaggttctggaggagcccaggatggattattgagagcatgggctgtagagacagtcttcttggattcagatcctgactccacttagctatgtaacctggtcagattacttcacctctctgagcctgtttcctcatctataaattggggatagtaatgccaactcattgggctgttatgaggattactgagataatgcgtgcagtgctcttatcaccatctctggtgcgtaagcgtcaggaaatagcagttgctgtgattggggctaaagctctgaggcaaaatgggcgacattattttctttgaatgacattaagcagtttgtgcatagctgagggcttctattggggatggctgtctcctggcatagacctctgcacctttcacactcatactccttgtcagcagtccccaacctttttggtaccagggaccggttttgtggaaaacaatttttccaccagtggatggagggggatagcagcggggagatgattttgggatgaaactgtttcatctcagatcatcaggcattagattctcataaggagtgtgcaatctagatcccttgcatgcggagttcacagtggggtttgcactcctgtgagaatctaatgcctctgctgatctgccaggaggaggagctcaggcggtaatgctcactcgcctgccgcccacctcctgctttgtgctcccgcttcctaacaggccacagactggtactggcctgtggcctgggggatggagacccctaatccatgtcacctttcccacctctttcaaaaacaggtacctccaggaacattttggttttggcccttgtattgacttctgaatgtctagtttgagaaactgttcccaataagccttcttcccccagatctgcaccctcgcctctaccctaggacaagatgtccttttctcatcatcctgccaggctaactttaagtctcctgctttttctcacttggatttggatccatttcttcctatttccgctcatgtgaactctccagttctcctttctcaccactctcctgctagccatctctttggcactaaaggccctggtcaaattggatttctttcatttttccacacttcaaagacccatgttctaggtattctccatagggatagtctctttggcatttatttggtttttctacgttttcagtcccatttactccaagactcactccctgccacctagtgcatcagatacagctacttctggctgacttttcaagggggaccaccctacctgtcatctcttcactgttcagaaatgactgtgtcagtgcacctcaaactcccttgctgtccttttccaaggagacagctaaggtggatggagatgcagaatggacctcacgttcgccctagtcaggactgataccctttccgtttcagaggattgccaagaaaaaactcacagttgaggcagggtgctctgaggtcggctgcggtgtgggaggcacggcctgggcctgctctctgggctggagcaggtggattcgaaggcctgtctagcacgagggcccaaaggtcttgtcagtggccagtagctctgccgcctttcccagagagggggtccaggggacatcctggaaggctgggccctgggccaccttctgctcttgcaagctagagccagcccaatagggggcggatgtgagtggggagctggggcgcatgaaggtgggggtgatgccgaaggggaagggatcgccagtggggattggtgcgtgtgcggaaacggggacagaagtgaaggttcatcgcctataacgaagatgaggtaggcatataggggcttctggaaagctagaggctgggctgagccaggagtcctctcccagaagttggggggcggtgcagaggtgtgggtcgagcccgcatgcgtgcctgctggggagggggtgagtggtgaggaccaggcccgctgggtcctgggggcgcggtggctggcgcgcaggtcccggagggggcggctggcgcgcactacacgcttgggaacaaggaaaacatccgccggaggcccggccgggcggcgctccagcctcggggcaggtgcgcggagaggaagtgagagcattccggcccccccaccccaaccccggccgctggccctctggtgagtcacagccgacccccgccgccggagggagaggggagctgcgggccagagccccggagggtctggaggagccaggagggtttctgggagcagagggtcacttagtgggcttctgtcgtggtgtcgctacgggcgcgaaacggacactgaacacagtctgactgtatggaggcaggtggggagggatcccctgggagaacttggcgggccgagagcagaccccagggcaaggaggggcccccgagggggaaaccgggagtcgggcaggtggcgtaacccagaaagggaaggagagccggattgattggggtgagagaggaaggaagcacgccaagttaggcctgggagaactgagggacctgaggagggaggagggagaccaacacagggtgggaaggcggaaatggccaaaccccaggcatcaggtctgtccagaggctgacgtagacagtgaagggtgaagggtaggttttaggagtagggggagttatgattatttggttacattttgggattatttggtctcacaggtagaagggagcctgctggtctctgtgtaacggatggcttaaaagcaaggttgtctgcgtcttggattactgtctgccattcagcctttgccaaaaaatttggcactgatctgcacatttttatagtcatttaaaattgtatgactctgtcaaatgatttaagtaattttggtggatttttaaaaataaaaaaataaaaatagaaaagttgcacaatctaattcaatatttgacttaaaaccaaaagtgaggctctcagattggtaatatggtattcagcctttttcttgtttggcttttgtgccatttgcccctcactgacttgattgaattctttgtggctgatgcctcagtttttctggatcagtagtgctgcacttccacttttcctctccctcattttactgtctttatttttagccttttttctgtgtagccctctaacctgccctttatattttgaaccaaataaaacatttcttggaatgggagctttggactacagtatacagacaaacaactcacaattttagcatatgaggctactatcttctgtggatgtgtatgtaattatacagtttctgtatttatcctgtggctgatagaaaaagttaaagctgtttaattcaccatagtatttctacaacacagcaatttattagtctgacttctcttctaaaatcaactctaaaatggtattttgtacttgtctcagagacgaattctgccatgatccttatgatctgtgttatgttgggccaaaggtgattactttataaattataaagatccctaaactctgcattgcctttggtcccaaacaagcaaatctgggtcaattaatgaaaaaaaaaagaaaagaaaagaaaatgtcttactttgggccctgttgcactctcccgtgctgttttagccccagccctactctattcccagtggcctttgccttcattccttctttgctctgctgggcatcttgagaggaaaacttcacaccgacttcctctactataaattctctccctcctctcaactctacacttctctttgccaacatacaccatactgcttcactgatttttttttttaagcccacagtcctttctggctcttttccacctttaacactcttatgttgaaatcttccgtttttcctcctttctctttagtaagacctcaggtttttaaaaaagctaggcttgattgtttattctgcatggtccacttctgccttccttcctcttctattacccttttcttattctagactg

SEQ ID NO: 321735 - DNA, 1892 bp, Homo sapiens
  misc_feature (1856)..(1856): n is a, c, g, or t
  misc_feature (1858)..(1858): n is a, c, g, or t
  misc_feature (1863)..(1863): n is a, c, g, or t
ccgcctctaccgcccagcggacgccgccgccgccgccgccgccgcgtacctagccaggtccctgaggggcgggcagatgaggcctaggggtgccgatccctagtgtcgactatgcgagatctgattccggagctgccatgattgaagtggtagcagagctcagccggggtcctgtatttttggctggggaggcgctggagtgtgtagtgaccgtcaccaacccccttccgcccacggccacttctgcatccagtgaggccctggcctgggccagtgcccaaatccactgccagttccatgccagtgagagtcgagtagcactgcctcctcctgactctagtcagccagatgtccagcccgacagccagactgtctttctgccacaccgaggtgagaggggccagtgtatcctttctactccaccgaaaattctattctgtgacctgaggcttgatcctggagagtccaaatcatactcctacagtgaagtgctgcccatagagggaccaccctcctttcggggtcagtcagtcaagtacgtctacaaactgaccattggctgccagcgtgtcaactcccctatcactttactcagagtccctctgagggttcttgtgctgactggccttcaggatgtccggtttccccaggatgaggctgtagccccatccagtccattcttggaggaggatgaaggtgggaagaaagattcatggctagctgagctggctggggaacgcctaatggctgccacatcctgccgcagcctccatctatacaatatcagtgatggccgagggaaagttgggacgtttggcatcttcaaatctgtgtacagacttggcgaggacgtggtggggaccttaaacttaggggaaggaaccgtagcttgtttgcagttttcagtcagcttacagaccgaggagcgtgtacagcctgagtaccagcggcgacgtggggcagggggtgtcccctctgtgtcacatgtgactcacgcccggcaccaggaatcctgcctacatacaactagaaccagcttctccctcccaatccctctcagctccaccccaggcttctgtacagccattgtgtccttgaagtggagattgcattttgaatttgtaacgtcccgagaaccaggattggtactcctaccccctgtggaacagcccgaacctaccacctggacaggacctgagcaagtacctgtagacaccttcagctgggacctgcccatcaaggtgctgcctactagccccaccctggcctcatatgctgccccaggccccagcaccagcaccataaccatctgaaactggcccaccctggtgctagttccttccggatactgagaactcagcacctggactctaatgggacccactttttccacctggggtccaatgtcgtggacagtgagagtcgggctttcagctatagcattaatttatttgttcagaatacattggcagctgctagtggtttccctggaagtggcagcagcagtgagcagtcagcagatggatgatcagttgagtttagctggagtggggagcaggagccccaggaacaggggtgttggctgagccccattctgggtcaggccctccccctttgcagggcagccgagggtcagatttttgcaccaaggagaactggcaggttcctgcctcctgacgtacctcacacccagccgggaagtcgatgggatgctgggacgtgtcacagcagcccacgccaacaggatgcagacaggtgcaatggaaacagtccttgcggagccaagactcacccagggtaaaatatttcccctcatagtgacagggggtgagcttggaagtagcacttgctgtagncnccagngtgctgatacgggaaccgagctggaattt

SEQ ID NO: 321736 - DNA, 4523 bp, Homo sapiens
  misc_feature (4518)..(4518): n is a, c, g, or t
ccgcctctaccgcccagcggacgccgccgccgccgccgccgccgcgtacctagccaggtccctgaggggcgggcagatgaggcctaggggtgccgatccctagtgtcgactatgcgagatctgattccggagctgccatgattgaagtggtagcagagctcagccggggtcctgtatttttggctggggaggcgctggagtgtgtagtgaccgtcaccaacccccttccgcccacggccacttctgcatccagtgaggccctggcctgggccagtgcccaaatccactgccagttccatgccagtgagagtcgagtagcactgcctcctcctgactctagtcagccagatgtccagcccgacagccagactgtctttctgccacaccgaggtgagaggggccagtgtatcctttctactccaccgaaaattctattctgtgacctgaggcttgatcctggagagtccaaatcatactcctacagtgaagtgctgcccatagagggaccaccctcctttcggggtcagtcagtcaagtacgtctacaaactgaccattggctgccagcgtgtcaactcccctatcactttactcagagtccctctgagggttcttgtgctgactggccttcaggatgtccggtttccccaggatgaggctgtagccccatccagtccattcttggaggaggatgaaggtgggaagaaagattcatggctagctgagctggctggggaacgcctaatggctgccacatcctgccgcagcctccatctatacaatatcagtgatggccgagggaaagttgggacgtttggcatcttcaaatctgtgtacagacttggcgaggacgtggtggggaccttaaacttaggggaaggaaccgtagcttgtttgcagttttcagtcagcttacagaccgaggagcgtgtacagcctgagtaccagcggcgacgtggggcagggggtgtcccctctgtgtcacatgtgactcacgcccggcaccaggaatcctgcctacatacaactagaaccagcttctccctcccaatccctctcagctccaccccaggcttctgtacagccattgtgtccttgaagtggagattgcattttgaatttgtaacgtcccgagaaccaggattggtactcctaccccctgtggaacagcccgaacctaccacctggacaggacctgagcaagtacctgtagacaccttcagctgggacctgcccatcaaggtgctgcctactagccccaccctggcctcatatgctgccccaggccccagcaccagcaccataaccatctgaaactggcccaccctggtgctagttccttccggatactgagaactcagcacctggactctaatgggacccactttttccacctggggtccaatgtcgtggacagtgagagtcgggctttcagctatagcattaatttatttgttcagaatacattggcagctgctagtggtttccctggaagtggcagcagcagtgagcagtcagcagatggatgatcagttgagtttagctggagtggggagcaggagccccaggaacaggggtgttggctgagccccattctgggtcaggccctccccctttgcagggcagccgagggtcagatttttgcaccaaggagaactggcaggttcctgcctcctgacgtacctcacacccagccgggaagtcgatgggatgctgggacgtgtcacagcagcccacgccaacaggatgcagacaggtgcaatggaaacagtccttgcggagccaagactcacccagggtaaaatatttcccctcatagtgacagggggcttgagcttggaagtagcacttgctgtagactcctgggtgctggaggagtagagacatcaccaagcagatgatcccccagcctcctaggatccccttggcctgtccagcccagagcatccttagggccattgctgctgcacagccctctcagacccttcttggcctctgctcagctactctggtcttgactccttgactttgctttgcgttgctccttgagtcttagtttctgtctttctcccctgggctcctgtctcacactatctccctgccctctgctctcacaggctggggatgtttataaagtgaggaccctggccccctgctgagtagagctggaaaagttgtaactctgtttcctgaggtgagggcatgaaaacaagaggtctagctttaacaagctgtgagagctgattcatgccccggcacagctagagggagggaggtggccatggagggggcactggactgggcacttccccagcaaggaggcaggaggggcaagggcccccaggtggtccccagatctcttccctgacctggagagaaggaagcattccaccttccccctttctcccccactgccaccaccaggggtgtgtatgctgggatccctgcctggaccggagggaggcatttcctggggatggttaatcctgtgccccagccaaacccaggagctgcaatagggtgcgacggccagaagctccaggagagtgagcaggcacctggagtggagactgtgtttccctcagatcctagggcagggtttccctaatgtatccaagaaatagggctgcccctcagagatggtggggagggtctcttttcctcaggcattccagaggtgaactgtccattgcttatcaccttcaaacatacagcagatgtgggatcaccccacatctggggatggttctttcccctttcaaagaggagcatctctaagtgccctgatgggatgaatcactccaggttcacagaggtgtcctctctttcctcccatatataatggagtgaggtttttaggaatttatcatttggcatcctctgagtttcccacaggttctggaggagcccaggatggattattgagagcatgggctgtagagacagtcttcttggattcagatcctgactccacttagctatgtaacctggtcagattacttcacctctctgagcctgtttcctcatctataaattggggatagtaatgccaactcattgggctgttatgaggattactgagataatgcgtgcagtgctcttatcaccatctctggtgcgtaagcgtcaggaaatagcagttgctgtgattggggctaaagctctgaggcaaaatgggcgacattattttctttgaatgacattaagcagtttgtgcatagctgagggcttctattggggatggctgtctcctggcatagacctctgcacctttcacactcatactccttgtcagcagtccccaacctttttggtaccagggaccggttttgtggaaaacaatttttccaccagtggatggagggggatagcagcggggagatgattttgggatgaaactgtttcatctcagatcatcaggcattagattctcataaggagtgtgcaatctagatcccttgcatgcggagttcacagtggggtttgcactcctgtgagaatctaatgcctctgctgatctgccaggaggaggagctcaggcggtaatgctcactcgcctgccgcccacctcctgctttgtgctcccgcttcctaacaggccacagactggtactggcctgtggcctgggggatggagacccctaatccatgtcacctttcccacctctttcaaaaacaggtacctccaggaacattttggttttggcccttgtattgacttctgaatgtctagtttgagaaactgttcccaataagccttcttcccccagatctgcaccctcgcctctaccctaggacaagatgtccttttctcatcatcctgccaggctaactttaagtctcctgctttttctcacttggatttggatccatttcttcctatttccgctcatgtgaactctccagttctcctttctcaccactctcctgctagccatctctttggcactaaaggccctggtcaaattggatttctttcatttttccacacttcaaagacccatgttctaggtattctccatagggatagtctctttggcatttatttggtttttctacgttttcagtcccatttactccaagactcactccctgccacctagtgcatcagatacagctacttctggctgacttttcaagggggaccaccctacctgtcatctcttcactgttcagaaatgactgtgtcagtgcacctcaaactcccttgctgtccttttccaaggagacagctaaggtggatggagatgcagaatggacctcacgttcgccctagtcaggactgataccctttccgtttcagaggattgccaagaaaaaactcacagttgaggcagggtgctctgaggtcggctgcggtgtggtggctcacgcctgtaatcccggcactttgggaggccgaggcaggcggatcacttaactcaggagttcaagaccagcctgagcaatgttacgaaatcccgtctctattaaaaaaatacaataaccagccagacgtggtggtgcgtgcctgcaatcncagct

SEQ ID NO: 321737 - DNA, 3050 bp, Homo sapiens
ccgcctctaccgcccagcggacgccgccgccgccgccgccgccgcgtacctagccaggtccctgaggggcgggcagatgaggcctaggggtgccgatccctagtgtcgactatgcgagatctgattccggagctgccatgattgaagtggtagcagagctcagccggggtcctgtatttttggctggggaggcgctggagtgtgtagtgaccgtcaccaacccccttccgcccacggccacttctgcatccagtgaggccctggcctgggccagtgcccaaatccactgccagttccatgccagtgagagtcgagtagcactgcctcctcctgactctagtcagccagatgtccagcccgacagccagactgtctttctgccacaccgaggtgagaggggccagtgtatcctttctactccaccgaaaattctattctgtgacctgaggcttgatcctggagagtccaaatcatactcctacagtgaagtgctgcccatagagggaccaccctcctttcggggtcagtcagtcaagtacgtctacaaactgaccattggctgccagcgtgtcaactcccctatcactttactcagagtccctctgagggttcttgtgctgactggccttcaggatgtccggtttccccaggatgaggctgtagccccatccagtccattcttggaggaggatgaaggtgggaagaaagattcatggctagctgagctggctggggaacgcctaatggctgccacatcctgccgcagcctccatctatacaatatcagtgatggccgagggaaagttgggacgtttggcatcttcaaatctgtgtacagacttggcgaggacgtggtggggaccttaaacttaggggaaggaaccgtagcttgtttgcagttttcagtcagcttacagaccgaggagcgtgtacagcctgagtaccagcggcgacgtggggcagggggtgtcccctctgtgtcacatgtgactcacgcccggcaccaggaatcctgcctacatacaactagaaccagcttctccctcccaatccctctcagctccaccccaggcttctgtacagccattgtgtccttgaagtggagattgcattttgaatttgtaacgtcccgagaaccaggattggtactcctaccccctgtggaacagcccgaacctaccacctggacaggacctgagcaagtacctgtagacaccttcagctgggacctgcccatcaaggtgctgcctactagccccaccctggcctcatatgctgccccaggccccagcaccagcaccataaccatctgaaactggcccaccctggtgctagttccttccggatactgagaactcagcacctggactctaatgggacccactttttccacctggggtccaatgtcgtggacagtgagagtcgggctttcagctatagcattaatttatttgttcagaatacattggcagctgctagtggtttccctggaagtggcagcagcagtgagcagtcagcagatggatgatcagttgagtttagctggagtggggagcaggagccccaggaacaggggtgttggctgagccccattctgggtcaggccctccccctttgcagggcagccgagggtcagatttttgcaccaaggagaactggcaggttcctgcctcctgacgtacctcacacccagccgggaagtcgatgggatgctgggacgtgtcacagcagcccacgccaacaggatgcagacaggtgcaatggaaacagtccttgcggagccaagactcacccagggtaaaatatttcccctcatagtgacagggggcttgagcttggaagtagcacttgctgtagactcctgggtgctggaggagtagagacatcaccaagcagatgatcccccagcctcctaggatccccttggcctgtccagcccagagcatccttagggccattgctgctgcacagccctctcagacccttcttggcctctgctcagctactctggtcttgactccttgactttgctttgcgttgctccttgagtcttagtttctgtctttctcccctgggctcctgtctcacactatctccctgccctctgctctcacaggctggggatgtttataaagtgaggaccctggccccctgctgagtagagctggaaaagttgtaactctgtttcctgaggtgagggcatgaaaacaagaggtctagctttaacaagctgtgagagctgattcatgccccggcacagctagagggagggaggtggccatggagggggcactggactgggcacttccccagcaaggaggcaggaggggcaagggcccccaggtggtccccagatctcttccctgacctggagagaaggaagcattccaccttccccctttctcccccactgccaccaccaggggtgtgtatgctgggatccctgcctggaccggagggaggcatttcctggggatggttaatcctgtgccccagccaaacccaggagctgcaatagggtgcgacggccagaagctccaggagagtgagcaggcacctggagtggagactgtgtttccctcagatcctagggcagggtttccctaatgtatccaagaaatagggctgcccctcagagatggtggggagggtctcttttcctcaggcattccagaggtgaactgtccattgcttatcaccttcaaacatacagcagatgtgggatcaccccacatctggggatggttctttcccctttcaaagaggagcatctctaagtgccctgatgggatgaatcactccaggttcacagaggtgtcctctctttcctcccatatataatggagtgaggtttttaggaatttatcatttggcatcctctgagtttcccacaggttctggaggagcccaggatggattattgagagcatgggctgtagagacagtcttcttggattcagatcctgactccacttagctatgtaacctggtcagattacttcacctctctgagcctgtttcctcatctataaattggggatagtaatgcc

SEQ ID NO: 321738 - DNA, 1871 bp, Homo sapiens
ccgcctctaccgcccagcggacgccgccgccgccgccgccgccgcgtacctagccaggtccctgaggggcgggcagatgaggcctaggggtgccgatccctagtgtcgactatgcgagatctgattccggagctgccatgattgaagtggtagcagagctcagccggggtcctgtatttttggctggggaggcgctggagtgtgtagtgaccgtcaccaacccccttccgcccacggccacttctgcatccagtgaggccctggcctgggccagtgcccaaatccactgccagttccatgccagtgagagtcgagtagcactgcctcctcctgactctagtcagccagatgtccagcccgacagccagactgtctttctgccacaccgaggtgagaggggccagtgtatcctttctactccaccgaaaattctattctgtgacctgaggcttgatcctggagagtccaaatcatactcctacagtgaagtgctgcccatagagggaccaccctcctttcggggtcagtcagtcaagtacgtctacaaactgaccattggctgccagcgtgtcaactcccctatcactttactcagagtccctctgagggttcttgtgctgactggccttcaggatgtccggtttccccaggatgaggctgtagccccatccagtccattcttggaggaggatgaaggtgggaagaaagattcatggctagctgagctggctggggaacgcctaatggctgccacatcctgccgcagcctccatctatacaatatcagtgatggccgagggaaagttgggacgtttggcatcttcaaatctgtgtacagacttggcgaggacgtggtggggaccttaaacttaggggaaggaaccgtagcttgtttgcagttttcagtcagcttacagaccgaggagcgtgtacagcctgagtaccagcggcgacgtggggcagggggtgtcccctctgtgtcacatgtgactcacgcccggcaccaggaatcctgcctacatacaactagaaccagcttctccctcccaatccctctcagctccaccccaggcttctgtacagccattgtgtccttgaagtggagattgcattttgaatttgtaacgtcccgagaaccaggattggtactcctaccccctgtggaacagcccgaacctaccacctggacaggacctgagcaagtacctgtagacaccttcagctgggacctgcccatcaaggtgctgcctactagccccaccctggcctcatatgctgccccaggccccagcaccagcaccataaccatctgaaactggcccaccctggtgctagttccttccggatactgagaactcagcacctggactctaatgggacccactttttccacctggggtccaatgtcgtggacagtgagagtcgggctttcagctatagcattaatttatttgttcagaatacattggcagctgctagtggtttccctggaagtggcagcagcagtgagcagtcagcagatggatgatcagttgagtttagctggagtggggagcaggagccccaggaacaggggtgttggctgagccccattctgggtcaggccctccccctttgcagggcagccgagggtcagatttttgcaccaaggagaactggcaggttcctgcctcctgacgtacctcacacccagccgggaagtcgatgggatgctgggacgtgtcacagcagcccacgccaacaggatgcagacaggtgcaatggaaacagtccttgcggagccaagactcacccagggtaaaatatttcccctcatagtgacagggggggcttggaagtagcactgctgtgacaaagtgatggggaccggc

SEQ ID NO: 321739 - DNA, 1295 bp, Homo sapiens
cccggcggccgtgcacttccggccggtggccggcccggcgcgcaccgccccttccgccgtcgcccagcgagcccagctccggtcccagccccggccgtcccggcgtcgcttcggagcgcggcggcagctgactgcgccttcacgatccgctgggacccgcgagccccgccgccgttatgaacatccgcaatgcgaggccagaggacctaatgaacatgcagcactgcaacctcctctgcctgcccgagaactaccagatgaaatactacttctaccatggcctttcctggccccagctctcttacattgctgaggacgagaatgggaagattgtggggtatgtcctggccaaaatggaagaggacccagatgatgtgccccatggacatatcacctcattggctgtgaagcgttcccaccggcgcctcggtctggctcagaaactgatggaccaggcctctcgagccatgatagagaacttcaatgccaaatatgtctccctgcatgtcaggaagaggtggaagccgggctgagggaagggggattgagggggagagatactgccttgacgggggtcctggggtacctcagcttttggtgaagatccaggaagtgggattggggggaaggagggaccaggaggaggggcaagacctggacgtgctacccctccctggccaaatccgtgcagctcagcagtgccttgttcccctgcagtaaccgggccgccctgcacctctattccaacaccctcaactttcagtaagtagatctcgatttttctaatgggctggggttgatcccaggtctggcccatcagggcacctgagaccggctgagttgccttccaggtcgggggtgggccggctgtggggaagaggctgtggaccccagcactgccaggatacctccacattcactcggcggctgatggttgaaaagccggcatggagacagcacctgcctgctgaaacgtgctccatgtgttgtgatggaggagctctggcccatgatggctgaggctggcgaagggcacacgggctgtttagtaatgtttgggaatagagaggtgtgggtccctggcgtgagcagatgctgaggagcaggactcaagcatgaccaagcacctagaagaatccaagagagagcagaatcgaggagaatgcacattcaggaaggaagggccagtggccaggcagcctagtggatgggggaggtctgcctgaggaccaggaggccccgtgtgcctagcacactagagagaacctggcagttggcatgcccagtagacagtg

SEQ ID NO: 321740 - DNA, 919 bp, Homo sapiens
tgggaagggcggtggcctctgggctggatgctggcaagagggatctgtgacccagatgacgatgtctggtgggaattgctttatagctaagtcagcaatcctcatgtcttaggcctggcagggccagcctaggccattgagtccagctccccttccagggacatggccacgcgagtctgcacacacacctgcccagtgtagtcacggccccagagctgctcaggcagggctcaccgtctttcctgggttctgatggctgttgtgaggcagctcagtaagggacagggcgcagggcagggagggaaggggaaggctgaattcagggcttcagctcacaagaaaccgcagaaatggatccttagtatccaggctaaggacacagaacgggggcaggacgggtggggcgggccgctgtgtcctggagcctttgctggagagaacagagggcaggtcacactggacttgttgtctcaggatggagccttcagggagaaaacatggcaccttgctccagtagccacgataccaggagtggaggagggtgtccccgggatacaggtcttcctccttgctctctaaccctctgcccccaggatcagtgaagtggagcccaaatactatgcagatggggaggacgcctatgccatgaagcgggacctcactcagatggccgacgaggtaagcgcctgcatgaagccaagcaaggcgagcgggggcggcactcaggagccccaagacagtggctgcaggcgagaccgactttggatgccagctcttgtggctacgttgccaggagtcacgacctcagtttcctaggctgggctttagaggaggccatctgcctagcagcctggagggtgatgggagaggcagagggaggaggcttttagaagggaagtggggaggtctagggaccagt

SEQ ID NO: 321741 - DNA, 1332 bp, Homo sapiens
tcccgagggccccggccgagcccggcccggtggccctgagtgtgcctgcggccgctggacctatggggctggcccagcccgccgaagaggccggggcgcggggccggggctgcgattccctcctgtttgcgtgatgtcgggcctccgttgggtgggctccggggacctccggggcgcccactcctgttcctgtgctccgggcgttgtgcaaagtcagatcgtcacagtgcctgcccagccccgagggaggggggccgagcagaccgacggggagcaggcttctcacccgtggtcaccgccgccttagactgagcgcgttccactgccctccttccctgcagccagaggacctaatgaacatgcagcactgcaacctcctctgcctgcccgagaactaccagatgaaatactacttctaccatggcctttcctggccccagctctcttacattgctgaggacgagaatgggaagattgtggggtatgtcctggccaaaatggaagaggacccagatgatgtgccccatggacatatcacctcattggctgtgaagcgttcccaccggcgcctcggtctggctcagaaactgatggaccaggcctctcgagccatgatagagaacttcaatgccaaatatgtctccctgcatgtcaggaagagtaaccgggccgccctgcacctctattccaacaccctcaactttcagatcagtgaagtggagcccaaatactatgcagatggggaggacgcctatgccatgaagcgggacctcactcagatggccgacgagctgaggcggcacctggagctgaaagagaagggcaggcacgtggtgctgggtgccatcgagaacaaggtggagagcaaaggcaattcacctccgagctcaggagaggcctgtcgcgaggagaagggcctggctgccgaggatagtggtggggacagcaaggacctcagcgaggtcagcgagaccacagagagcacagatgtcaaggacagctcagaggcctccgactcagcctcctagagcctgccccatcccctcctcaccccacgagctttcacaataaattcgctccgtggcactgggaaaaaaaaaaaaaaacaaaaaaaaaacaaaaaaaaacaaaagaacaacgccgcaggcggccactacatatgcgacgggctgcgcaaacaaagggccacggcaacacgggccgcccggggccacgaggcggtcaccccggacccccctctcgcgtcccacaggggggcaaccccgcgcgccccccacaaacacaggagggacacacatcaccaaaacccggctaacccgctaggaagacgcg

SEQ ID NO: 321742 - DNA, 1204 bp, Homo sapiens
  misc_feature (928)..(928): n is a, c, g, or t
  misc_feature (930)..(931): n is a, c, g, or t
cccggcggccgtgcacttccggccggtggccggcccggcgcgcaccgccccttccgccgtcgcccagcgagcccagctccggtcccagccccggccgtcccggcgtcgcttcggagcgcggcggcagctgactgcgccttcacgatccgctgggacccgcgagccccgccgccgttatgaacatccgcaatgcgaggccagaggacctaatgaacatgcagcactgcaacctcctctgcctgcccgagaactaccagatgaaatactacttctaccatggcctttcctggccccagctctcttacattgctgaggacgagaatgggaagattgtggggtatgtcctggccaaaatggaagaggacccagatgatgtgccccatggacatatcacctcattggctgtgaagcgttcccaccggcgcctcggtctggctcagaaactgatggaccaggcctctcgagccatgatagagaacttcaatgccaaatatgtctccctgcatgtcaggaagagtaaccgggccgccctgcacctctattccaacaccctcaactttcagatcagtgaagtggagcccaaatactatgcagatggggaggacgcctatgccatgaagcgggacctcactcagatggccgacgagctgaggcggcacctggagctgaaagagaagggcaggcacgtggtgctgggtgccatcgagaacaaggtggagagcaaaggcaattcacctccgagctcaggagaggcctgtcgcgaggagaagggcctggctgccgaggatagtggtggggacagcaaggacctcagcgaggtcagcgagaccacagagagcacagatgtcaaggacagctcagaggcctccgactcagcctcctagagcctgccccatcccctcctcaccccacgagctttcatccacanannttaaattccgctcccgtgggccacttggggggaaaaaaaaaaaaaaacaaaaaaaaaacaaaaaaaaacaaaagaacaacgccgcaggcggccactacatatgcgacgggctgcgcaaacaaagggccacggcaacacgggccgcccggggccacgaggcggtcaccccggacccccctctcgcgtcccacaggggggcaaccccgcgcgccccccacaaacacaggagggacacacatcaccaaaacccggctaacccgctaggaagacgcg

SEQ ID NO: 321743 - DNA, 1142 bp, Homo sapiens
cccggcggccgtgcacttccggccggtggccggcccggcgcgcaccgccccttccgccgtcgcccagcgagcccagctccggtcccagccccggccgtcccggcgtcgcttcggagcgcggcggcagctgactgcgccttcacgatccgctgggacccgcgagccccgccgccgttatgaacatccgcaatgcgaggccagaggacctaatgaacatgcagcactgcaacctcctctgcctgcccgagaactaccagatgaaatactacttctaccatggcctttcctggccccagctctcttacattgctgaggacgagaatgggaagattgtggggtatgtcctggccaaaatgctgtgaagcgttcccaccggcgcctcggtctggctcagaaactgatggaccaggcctctcgagccatgatagagaacttcaatgccaaatatgtctccctgcatgtcaggaagagtaaccgggccgccctgcacctctattccaacaccctcaactttcagatcagtgaagtggagcccaaatactatgcagatggggaggacgcctatgccatgaagcgggacctcactcagatggccgacgagctgaggcggcacctggagctgaaagagaagggcaggcacgtggtgctgggtgccatcgagaacaaggtggagagcaaaggcaattcacctccgagctcaggagaggcctgtcgcgaggagaagggcctggctgccgaggatagtggtggggacagcaaggacctcagcgaggtcagcgagaccacagagagcacagatgtcaaggacagctcagaggcctccgactcagcctcctagagcctgccccatcccctcctcaccccacgagctttcacaataaattcgctccgtggcactgggaaaaaaaaaaaaaaacaaaaaaaaaacaaaaaaaaacaaaagaacaacgccgcaggcggccactacatatgcgacgggctgcgcaaacaaagggccacggcaacacgggccgcccggggccacgaggcggtcaccccggacccccctctcgcgtcccacaggggggcaaccccgcgcgccccccacaaacacaggagggacacacatcaccaaaacccggctaacccgctaggaagacgcg

SEQ ID NO: 321744 - DNA, 1143 bp, Homo sapiens
cccggcggccgtgcacttccggccggtggccggcccggcgcgcaccgccccttccgccgtcgcccagcgagcccagctccggtcccagccccggccgtcccggcgtcgcttcggagcgcggcggcagctgactgcgccttcacgatccgctgggacccgcgagccccgccgccgttatgaacatccgcaatgcgaggccagaggacctaatgaacatgcagcactgcaacctcctctgcctgcccgagaactaccagatgaaatactacttctaccatggcctttcctggccccagctctcttacattgctgaggacgagaatgggaagattgtggggtatgtcctggccaaaatggaagaggacccagatgatgtgccccatggacatatcacctcattggctgtgaagcgttcccaccggcgcctcggtctggctcagaaactgatggaccaggcctctcgagccatgatagagaacttcaatgccaaatatgtctccctgcatgtcaggaagaggatcagtgaagtggagcccaaatactatgcagatggggaggacgcctatgccatgaagcgggacctcactcagatggccgacgagctgaggcggcacctggagctgaaagagaagggcaggcacgtggtgctgggtgccatcgagaacaaggtggagagcaaaggcaattcacctccgagctcaggagaggcctgtcgcgaggagaagggcctggctgccgaggatagtggtggggacagcaaggacctcagcgaggtcagcgagaccacagagagcacagatgtcaaggacagctcagaggcctccgactcagcctcctagagcctgccccatcccctcctcaccccacgagctttcacaataaattcgctccgtggcactgggaaaaaaaaaaaaaaacaaaaaaaaaacaaaaaaaaacaaaagaacaacgccgcaggcggccactacatatgcgacgggctgcgcaaacaaagggccacggcaacacgggccgcccggggccacgaggcggtcaccccggacccccctctcgcgtcccacaggggggcaaccccgcgcgccccccacaaacacaggagggacacacatcaccaaaacccggctaacccgctaggaagacgcg

SEQ ID NO: 321745 - DNA, 903 bp, Homo sapiens
cccggcggccgtgcacttccggccggtggccggcccggcgcgcaccgccccttccgccgtcgcccagcgagcccagctccggtcccagccccggccgtcccggcgtcgcttcggagcgcggcggcagctgactgcgccttcacgatccgctgggacccgcgagccccgccgccgttatgaacatccgcaatgcgaggccagaggacctaatgaacatgcagcactgcaacctcctctgcctgcccgagaactaccagatgaaatactacttctaccatggcctttcctggccccagctctcttacattgctgaggacgagaatgggaagattgtggggtatgtcctggccaaaatggaagaggacccagatgatgtgccccatggacatatcacctcattggctgtgaagcgttcccaccggcgcctcggtctggctcagaaactgatggaccaggcctctcgagccatgatagagaacttcaatgccaaatatgtctccctgcatgtcaggaagagtaaccgggccgccctgcacctctattccaacaccctcaactttcaatcagtgaagtggagcccaaatactatgcagatgaggtgcacctcatctgctcctgcactacccccgcccccaaaataacggctccaacaattaattaatcttcttcatcttggcgtaaatgggacaaccctctattccaatcaaaaacttaagaaacaatcttaatttgtccctttaaactcatatccaaagccttaatcaagccttatcaatcctacctccaagatgggttcccaaatatctgtgctcagtctcatttctggacatctgctactgttcccttatgctgagaagcttctggattactcttaggttggtacccgattcaggttgggcaata

SEQ ID NO: 321746 - DNA, 657 bp, Homo sapiens
gccctgctgcctcactatgcccctctcctcagccagcgacagggccaggctccctttgtctggaaacttaggccctgtctctttgcccccgcttctccctgggttcctggtggcagctgaggcggcacctggagctgaaagagaagggcaggcacgtggtgctgggtgccatcgagaacaaggtggagagcaaaggcaattcacctccgagctcaggagaggcctgtcgcgaggagaagggcctggctgccgaggatagtggtggggacagcaaggacctcagcgaggtcagcgagaccacagagagcacagatgtcaaggacagctcagaggcctccgactcagcctcctagagcctgccccatcccctcctcaccccacgagctttcacaataaattcgctccgtggcactgggaaaaaaaaaaaaaaacaaaaaaaaaacaaaaaaaaacaaaagaacaacgccgcaggcggccactacatatgcgacgggctgcgcaaacaaagggccacggcaacacgggccgcccggggccacgaggcggtcaccccggacccccctctcgcgtcccacaggggggcaaccccgcgcgccccccacaaacacaggagggacacacatcaccaaaacccggctaacccgctaggaagacgcg

SEQ ID NO: 321747 - DNA, 676 bp, Homo sapiens
cagctggggtcttagggggctgtagtgcatgtccactctacaaatggcaggggggctggaggtggctgtgcctacactgagctcctttgcagcctctcctttctccctctccactccctgggttcctggtggcagctgaggcggcacctggagctgaaagagaagggcaggcacgtggtgctgggtgccatcgagaacaaggtggagagcaaaggcaattcacctccgagctcaggagaggcctgtcgcgaggagaagggcctggctgccgaggatagtggtggggacagcaaggacctcagcgaggtcagcgagaccacagagagcacagatgtcaaggacagctcagaggcctccgactcagcctcctagagcctgccccatcccctcctcaccccacgagctttcacaataaattcgctccgtggcactgggaaaaaaaaaaaaaaacaaaaaaaaaacaaaaaaaaacaaaagaacaacgccgcaggcggccactacatatgcgacgggctgcgcaaacaaagggccacggcaacacgggccgcccggggccacgaggcggtcaccccggacccccctctcgcgtcccacaggggggcaaccccgcgcgccccccacaaacacaggagggacacacatcaccaaaacccggctaacccgctaggaagacgcg

SEQ ID NO: 321748 - DNA, 622 bp, Homo sapiens
tcggccgcctactactactaaattcgcgggcgcgtcgacgcctcagctcgtcggccatctgagtgaggtcccgcttcatggctgaggcggcacctggagctgaaagagaagggcaggcacgtggtgctgggtgccatcgagaacaaggtggagagcaaaggcaattcacctccgagctcaggagaggcctgtcgcgaggagaagggcctggctgccgaggatagtggtggggacagcaaggacctcagcgaggtcagcgagaccacagagagcacagatgtcaaggacagctcagaggcctccgactcagcctcctagagcctgccccatcccctcctcaccccacgagctttcacaataaattcgctccgtggcactgggaaaaaaaaaaaaaaacaaaaaaaaaacaaaaaaaaacaaaagaacaacgccgcaggcggccactacatatgcgacgggctgcgcaaacaaagggccacggcaacacgggccgcccggggccacgaggcggtcaccccggacccccctctcgcgtcccacaggggggcaaccccgcgcgccccccacaaacacaggagggacacacatcaccaaaacccggctaacccgctaggaagacgcg

SEQ ID NO: 321749 - DNA, 1188 bp, Homo sapiens
cccggcggccgtgcacttccggccggtggccggcccggcgcgcaccgccccttccgccgtcgcccagcgagcccagctccggtcccagccccggccgtcccggcgtcgcttcggagcgcggcggcagctgactgcgccttcacgatccgctgggacccgcgagccccgccgccgttatgaacatccgcaatgcgaggccagaggacctaatgaacatgcagcactgcaacctcctctgcctgcccgagaactaccagatgaaatactacttctaccatggcctttcctggccccagctctcttacattgctgaggacgagaatgggaagattgtggggtatgtcctggccaaaatggaagaggacccagatgatgtgccccatggacatatcacctcattggctgtgaagcgttcccaccggcgcctcggtctggctcagaaactgatggaccaggcctctcgagccatgatagagaacttcaatgccaaatatgtctccctgcatgtcaggaagagtaaccgggccgccctgcacctctattccaacaccctcaactttcagatcagtgaagtggagcccaaatactatgcagatggggaggacgcctatgccatgaagcgggacctcactcagatggccgacgagctgaggcggcacctggagctgaaagagaagggcaggcacgtggtgctgggtgccatcgagaacaaggtggagagcaaaggcaattcacctccgagctcaggagaggcctgtcgcgaggagaagggcctggctgccgaggatagtggtggggacagcaaggacctcagcgaggtcagcgagaccacagagagcacagatgtcaaggacagctcagaggcctccgactcagcctcctagagcctgccccatcccctcctcaccccacgagctttcacaataaattcgctccgtggcactgggaaaaaaaaaaaaaaacaaaaaaaaaacaaaaaaaaacaaaagaacaacgccgcaggcggccactacatatgcgacgggctgcgcaaacaaagggccacggcaacacgggccgcccggggccacgaggcggtcaccccggacccccctctcgcgtcccacaggggggcaaccccgcgcgccccccacaaacacaggagggacacacatcaccaaaacccggctaacccgctaggaagacgcg

SEQ ID NO: 321750 - DNA, 1066 bp, Homo sapiens
  misc_feature (1042)..(1042): n is a, c, g, or t
  misc_feature (1066)..(1066): n is a, c, g, or t
cccggcggccgtgcacttccggccggtggccggcccggcgcgcaccgccccttccgccgtcgcccagcgagcccagctccggtcccagccccggccgtcccggcgtcgcttcggagcgcggcggcagctgactgcgccttcacgatccgctgggacccgcgagccccgccgccgttatgaacatccgcaatgcgaggccagaggacctaatgaacatgcagcactgcaacctcctctgcctgcccgagaactaccagatgaaatactacttctaccatggcctttcctggccccagctctcttacattgctgaggacgagaatgggaagattgtggggtatgtcctggccaaaatggaagaggacccagatgatgtgccccatggacatatcacctcattggctgtgaagcgttcccaccggcgcctcggtctggctcagaaactgatggaccaggcctctcgagccatgatagagaacttcaatgccaaatatgtctccctgcatgtcaggaagagtaaccgggccgccctgcacctctattccaacaccctcaactttcagatcagtgaagtggagcccaaatactatgcagatggggaggacgcctatgccatgaagcgggacctcactcagatggccgacgagctgaggcggcacctggagctgaaagagaagggcaggcacgtggtgctgggtgccatcgagaacaaggtggagagcaaaggcaattcacctccgagctcaggagaggcctgtcgcgaggagaagggcctggctgccgaggatagtggtggggacagcaaggacctcagcgaggtcagcgagaccacagagagcacagatgtcaaggacagctcagaggcctccgactcagcctcctagagcctgccccatcccctcctcaccccacgagctttcacaataaattcgctccgtggcactgggaacaaacataaacaacactaacaacatacacaacaccgggcctcttcttcggggagacacgatatacgacgcgcgaatatctcaccctttcaagnacacgccgccaagtgtatacgacn

SEQ ID NO: 321751 - DNA, 538 bp, Homo sapiens
tcccgagggccccggccgagcccggcccggtggccctgagtgtgcctgcggccgctggacctatggggctggcccagcccgccgaagaggccggggcgcggggccggggctgcgattccctcctgtttgcgtgatgtcgggcctccgttgggtgggctccggggacctccggggcgcccactcctgttcctgtgctccgggcgttgtgcaaagtcagatcgtcacagtgcctgcccagccccgagggaggggggccgagcagaccgacggggagcaggcttctcacccgtggtcaccgccgccttagactgagcgcgttccactgccctccttccctgcagccagaggacctaatgaacatgcagcactgcaacctcctctgcctgcccgagaactaccagatgaaatactacttctaccatggcctttcctggccccaggtgggcagcttctgaatttgggcatgggggaaagcaggccgaggaaaatcccatctggccatcttggagggagtggacaagtctgtcagagcccaggg

SEQ ID NO: 321752 - DNA, 567 bp, Homo sapiens
cagagtccaaacagtgctcagagtccaaacagtgcccagagtccaaacagtgcccagagtccaaacagtgccagagaacttcaatgccaaatatgtctccctgcatgtcaggaagagtaaccgggccgccctgcacctctattccaacaccctcaactttcagatcagtgaagtggagcccaaatactatgcagatggggaggacgcctatgccatgaagcgggacctcactcagatggccgacgagtggcccacacaattgtttagccaggggcagtggtgatccatcttcagcacacacctgttgcagatgctgcagtggtgtgttcgggctggcttggggtaaatgcacttcttacagatggagacggtggcgatatcattcctgccctggggtgggtacccaggcggagtggtgatggcctggtagtagtggaagacaatcaggatcagattccagtggctatagaagaaatgccagcagagtcgtggcactgagtaggttcggaggatgagaggcaggacacacaggtaggcgatagctacaatggagcctgtcagcacgaa

SEQ ID NO: 321753 - DNA, 1024 bp, Homo sapiens
cccggcggccgtgcacttccggccggtggccggcccggcgcgcaccgccccttccgccgtcgcccagcgagcccagctccggtcccagccccggccgtcccggcgtcgcttcggagcgcggcggcagctgactgcgccttcacgatccgctgggacccgcgagccccgccgccgttatgaacatccgcaatgcgaggccagaggacctaatgaacatgcagcactgcaacctcctctgcctgcccgagaactaccagatgaaatactacttctaccatggcctttcctggccccagctctcttacattgctgaggacgagaatgggaagattgtggggtatgtcctggccaaaatggaagaggacccagatgatgtgccccatggacatatcacctcattggctgtgaagcgttcccaccggcgcctcggtctggctcagaaactgatggaccaggcctctcgagccatgatagagaacttcaatgccaaatatgtctccctgcatgtcaggaagagtaaccgggccgccctgcacctctattccaacaccctcaactttcagatcagtgaagtggagcccaaatactatgcagatggggaggacgcctatgccatgaagcgggacctcactcagatggccgacgagctgaggcggcacctggagctgaaagagaagggcaggcacgtggtgctgggtgccatcgagaacaaggtggagagcaaaggcaattcacctccgagctcaggagaggcctgtcgcgaggagaagggcctggctgccgaggatagtggtggggacagcaaggacctcagcgaggtcagcgagaccacagagagcacagatgtcaaggacagctcagaggcctccgactcagcctcctagagcctgccccatcccctcctcaccccacgagctttcacaataaattcgctccgtggcactgggaaaacaacaaaccaaaacaagaaaaacaaaagaaaaaacacggagagacaatacaagggggagaaaagagtaaaacg

SEQ ID NO: 321754 - DNA, 1135 bp, Homo sapiens
aaggctaggtacgaggctgggtggtccggtcccagccccggccgtcccggcgtcgcttcggagcgcggcggcagctgactgcgccttcacgatccgctgggacccgcgagccccgccgccgttatgaacatccgcaatgcgaggccagaggacctaatgaacatgcagcactgcaacctcctctgcctgcccgagaactaccagatgaaatactacttctaccatggcctttcctggccccagctctcttacattgctgaggacgagaatgggaagattgtggggtatgtcctggccaaaatggaagaggacccagatgatgtgccccatggacatatcacctcattggctgtgaagcgttcccaccggcgcctcggtctggctcagaaactgatggaccaggcctctcgagccatgatagagaacttcaatgccaaatatgtctccctgcatgtcaggaagagtaaccgggccgccctgcacctctattccaacaccctcaactttcagatcagtgaagtggagcccaaatactatgcagatggggaggacgcctatgccatgaagcgggacctcactcagatggccgacgagctgaggcggcacctggagctgaaagagaagggcaggcacgtggtgctgggtgccatcgagaacaaggtggagagcaaaggcaattcacctccgagctcaggagaggcctgtcgcgaggagaagggcctggctgccgaggatagtggtggggacagcaaggacctcagcgaggtcagcgagaccacagagagcacagatgtcaaggacagctcagaggcctccgactcagcctcctagagcctgccccatcccctcctcaccccacgagctttcacaataaattcgctccgtggcactgggaaaaaaaaaaaaaaacaaaaaaaaaacaaaaaaaaacaaaagaacaacgccgcaggcggccactacatatgcgacgggctgcgcaaacaaagggccacggcaacacgggccgcccggggccacgaggcggtcaccccggacccccctctcgcgtcccacaggggggcaaccccgcgcgccccccacaaacacaggagggacacacatcaccaaaacccggctaacccgctaggaagacgcg

SEQ ID NO: 321755 - DNA, 1042 bp, Homo sapiens
  misc_feature (33)..(33): n is a, c, g, or t
ctagtggatcccccgggctggcaggagttcggnacgagccgcaatgcgaggccagaggacctaatgaacatgcagcactgcaacctcctctgcctgcccgagaactaccagatgaaatactacttctaccatggcctttcctggccccagctctcttacattgctgaggacgagaatgggaagattgtggggtatgtcctggccaaaatggaagaggacccagatgatgtgccccatggacatatcacctcattggctgtgaagcgttcccaccggcgcctcggtctggctcagaaactgatggaccaggcctctcgagccatgatagagaacttcaatgccaaatatgtctccctgcatgtcaggaagagtaaccgggccgccctgcacctctattccaacaccctcaactttcagatcagtgaagtggagcccaaatactatgcagatggggaggacgcctatgccatgaagcgggacctcactcagatggccgacgagctgaggcggcacctggagctgaaagagaagggcaggcacgtggtgctgggtgccatcgagaacaaggtggagagcaaaggcaattcacctccgagctcaggagaggcctgtcgcgaggagaagggcctggctgccgaggatagtggtggggacagcaaggacctcagcgaggtcagcgagaccacagagagcacagatgtcaaggacagctcagaggcctccgactcagcctcctagagcctgccccatcccctcctcaccccacgagctttcacaataaattcgctccgtggcactgggaaaaaaaaaaaaaaacaaaaaaaaaacaaaaaaaaacaaaagaacaacgccgcaggcggccactacatatgcgacgggctgcgcaaacaaagggccacggcaacacgggccgcccggggccacgaggcggtcaccccggacccccctctcgcgtcccacaggggggcaaccccgcgcgccccccacaaacacaggagggacacacatcaccaaaacccggctaacccgctaggaagacgcg

SEQ ID NO: 321756 - DNA, 1388 bp, Homo sapiens
cccggcggccgtgcacttccggccggtggccggcccggcgcgcaccgccccttccgccgtcgcccagcgagcccagctccggtcccagccccggccgtcccggcgtcgcttcggagcgcggcggcagctgactgcgccttcacgatccgctgggacccgcgagccccgccgccgttatgaacatccgcaatgcgaggccagaggacctaatgaacatgcagcactgcaacctcctctgcctgcccgagaactaccagatgaaatactacttctaccatggcctttcctggccccagctctcttacattgctgaggacgagaatgggaagattgtggggtatgtcctggccaaaatggaagaggacccagatgatgtgccccatggacatatcacctcattggctgtgaagcgttcccaccggcgcctcggtctggctcagaaactgatggaccaggcctctcgagccatgatagagaacttcaatgccaaatatgtctccctgcatgtcaggaagaggtggaagccgggctgagggaagggggattgagggggagagatactgccttgacgggggtcctggggtacctcagcttttggtgaagatccaggaagtgggattggggggaaggagggaccaggaggaggggcaagacctggacgtgctacccctccctggccaaatccgtgcagctcagcagtgccttgttcccctgcagtaaccgggccgccctgcacctctattccaacaccctcaactttcagatcagtgaagtggagcccaaatactatgcagatggggaggacgcctatgccatgaagcgggacctcactcagatggccgacgagctgaggcggcacctggagctgaaagagaagggcaggcacgtggtgctgggtgccatcgagaacaaggtggagagcaaaggcaattcacctccgagctcaggagaggcctgtcgcgaggagaagggcctggctgccgaggatagtggtggggacagcaaggacctcagcgaggtcagcgagaccacagagagcacagatgtcaaggacagctcagaggcctccgactcagcctcctagagcctgccccatcccctcctcaccccacgagctttcacaataaattcgctccgtggcactgggaaaaaaaaaaaaaaacaaaaaaaaaacaaaaaaaaacaaaagaacaacgccgcaggcggccactacatatgcgacgggctgcgcaaacaaagggccacggcaacacgggccgcccggggccacgaggcggtcaccccggacccccctctcgcgtcccacaggggggcaaccccgcgcgccccccacaaacacaggagggacacacatcaccaaaacccggctaacccgctaggaagacgcg

SEQ ID NO: 321757 - DNA, 1219 bp, Homo sapiens
tgggaagggcggtggcctctgggctggatgctggcaagagggatctgtgacccagatgacgatgtctggtgggaattgctttatagctaagtcagcaatcctcatgtcttaggcctggcagggccagcctaggccattgagtccagctccccttccagggacatggccacgcgagtctgcacacacacctgcccagtgtagtcacggccccagagctgctcaggcagggctcaccgtctttcctgggttctgatggctgttgtgaggcagctcagtaagggacagggcgcagggcagggagggaaggggaaggctgaattcagggcttcagctcacaagaaaccgcagaaatggatccttagtatccaggctaaggacacagaacgggggcaggacgggtggggcgggccgctgtgtcctggagcctttgctggagagaacagagggcaggtcacactggacttgttgtctcaggatggagccttcagggagaaaacatggcaccttgctccagtagccacgataccaggagtggaggagggtgtccccgggatacaggtcttcctccttgctctctaaccctctgcccccaggatcagtgaagtggagcccaaatactatgcagatggggaggacgcctatgccatgaagcgggacctcactcagatggccgacgagctgaggcggcacctggagctgaaagagaagggcaggcacgtggtgctgggtgccatcgagaacaaggtggagagcaaaggcaattcacctccgagctcaggagaggcctgtcgcgaggagaagggcctggctgccgaggatagtggtggggacagcaaggacctcagcgaggtcagcgagaccacagagagcacagatgtcaaggacagctcagaggcctccgactcagcctcctagagcctgccccatcccctcctcaccccacgagctttcacaataaattcgctccgtggcactgggaaaaaaaaaaaaaaacaaaaaaaaaacaaaaaaaaacaaaagaacaacgccgcaggcggccactacatatgcgacgggctgcgcaaacaaagggccacggcaacacgggccgcccggggccacgaggcggtcaccccggacccccctctcgcgtcccacaggggggcaaccccgcgcgccccccacaaacacaggagggacacacatcaccaaaacccggctaacccgctaggaagacgcg

SEQ ID NO: 321758 - DNA, 1124 bp, Homo sapiens
gtgacagcttccggcaactgatgcctccactggccactcctccctccgtccacctgtcacttcgggtagctgggaggccaggtgaggggcgcgcacgggggaggggcgtgcatagttgagacagaaacccggaagacccaactgtggcgcggcactgcttgaccgaggggctccggagcccagctgcaccggctgcggtttgagcgcccagggccggggtgcggggtggaccgcggcggcccttcgaccaaaggtgcttgaagctcgagcccattactttctgtggactctgactcgagctgcaaaagcttttctgcactgtttttctcatctatgttatgaagataataattccggccctaaccgtagtatgcttgcgagaatccaacaatatgatgtttctgaaagcgccggctgaactaagagcgcgtgaaatagaatgacagacagctctgcaagaacggaggccctgtctattttgtacccagctgtacggtactggcgccgaaagacgttcaataaatacttattgaatgacgaatacgcgttaggagtttaaaaaaaatggaacctttttcctgtgacactttcgtggcattacctccagcaacagtcgataacaggattatttttggaaaaaattcagatagactctatgatgaagtacaagaggtggtttattttcctgctgtagttcatgataacctgggagaacgtcttaagtgtacatatatagaaattgatcaagttcctgaaacatatgctgttgtcctgagtcgcccagtgctaaacgacggtataaaaaccagaagtttggttttggtggaaagaagaaaggctcaaagtggaacactcgggagagctatgatgatgtatctagcttccgggccaagacagctcatggcagaggcctcaagaggcctggcaagaaagggtcaaataagagacctggaaaacgaacaagagagaagatgaagaacagaacacactaaatagcatctttgaatacaaagaaccaagaaaaaggaatgaagactcgcaatttcacgacacactttgatcccttctgttggtgtcatgttgtaaacatttctttcaataaactaaagaaaaattattaaagg

SEQ ID NO: 321759 - DNA, 894 bp, Homo sapiens
gtgacagcttccggcaactgatgcctccactggccactcctccctccgtccacctgtcacttcgggtagctgggaggccaggtgaggggcgcgcacgggggaggggcgtgcatagttgagacagaaacccggaagacccaactgtggcgcggcactgcttgaccgaggggctccggagcccagctgcaccggctgcggtttgagcgcccagggccggggtgcggggtggaccgcggcggcccttcgaccaaaggtgcttgaagctcgagcccattactttctgtggactctgactcgagctgcaaaagcttttctgcactgtttttctcatctatgttatgaagataataattccggccctaaccgtagtatgcttgcgagaatccaacaatatgatgtttctgaaagcgccggctgaactaagagcgcgtgaaatagaatgacagacagctctgcaagaacggaggccctgtctattttgtacccagctgtacggtactggcgccgaaagacgttcaataaatacttattgaatgacgaatacgcgttaggagttggtaaaatctctcaaggcttcacctcctcagtgggctaggtgcaattctaaccagggggcaagtttccttagctttccctacgaccccagttaggcagctcaggttactattgcagcttgatggcccttgggactccaggtttttgagtggacgtggctgctactgcagcaggtgatccacaaccaagttctctatcagggtaatgttaggaattaaccttggccgggcgcggtagctcacgcctgtaatcccagcactttgggaggccaaggtgggtggatcacctgaggtcaggagttcaagaccagcctggccaacatggtgaaaccccgtctct

SEQ ID NO: 321760 - DNA, 439 bp, Homo sapiens
ttttttcctcttcccaagtacagacgcagagcagacttgtctttccgcttaacctcaacctcgtgtgatctgccagtttcgctcccgacgccaaattccagcgaaacagctgatgccagccagcttgaagacccctgccacagaagaagggaatcagcatgagaatacagcttcttcatctcgctgtcccatgacttcgccctgtactcttcagccaattaatgatctccacacttgggaccactctaaaacccttaagaacctgagactcaaagtcctcctggagacgaatttgaggtttcctcctatctgtgtttggtggccctatgattaaacctctttctcttctgcaacctggtgtcccagtgtattaacttgccatgggcatcagacaacaaacctatatatagtatcccaaatatggtgctccactttgaaa

SEQ ID NO: 321761 - DNA, 568 bp, Homo sapiens
ttttttcctcttcccaagtacagacgcagagcagacttgtctttccgcttaacctcaacctcgtgtgatctgccagtttcgctcccggttagcccaggactttttatagcatagagttttaaagcaagggcttagaatcagacctgggtcaaaatcctgccttccaccttcaccaaggcagtgtgaccttgacgttcctacataagagattaaaatacgccaaattccagcgaaacagctgatgccagccagcttgaagacccctgccacagaagaagggaatcagcatgagaatacagcttcttcatctcgctgtcccatgacttcgccctgtactcttcagccaattaatgatctccacacttgggaccactctaaaacccttaagaacctgagactcaaagtcctcctggagacgaatttgaggtttcctcctatctgtgtttggtggccctatgattaaacctctttctcttctgcaacctggtgtcccagtgtattaacttgccatgggcatcagacaacaaacctatatatagtatcccaaatatggtgctccactttgaaa

SEQ ID NO: 321762 - DNA, 3860 bp, Homo sapiens
aaaaaacaaaaaacgaataagcctttatgagaaattttctctcctaccaaataataacaataacagctttcatgtgagtatctactatgttctatgcactgtgcaaaacactttacgtgttgccttattaagttctcataacagcccatcaaatagtgtcttatttttctgatgaggcagaaggcataggtaagagagagattaaatagtctgccaaagttatatagtgatagaactaactataaaacacaaatagaaggagatccaggacataagagttgaaatacagaaagaaaataacagaagccatcaagacatcagacttctcgtcactgaggagaagaggaaaacccttaagagtttcagtctgaagtttttatttagtcattttcttttctttttaaggaaacatttattatatttaaattttgtttttaagttgctagcatctgcctgtgtaaagccattttaaggttttgccattattaaaggaaagaaggaaactctgtaaaacaatgtgtctgttctggcagcaaaataaggacctttaggtgttctattataagtgaagatctaagattttccaagttacaactgaagaggtaatctagatattaaagtatataattgcgatttataaattaaatatgtgaactttctcctagaaatatcagcaatttggaattatattgacatatttttgtctgaatcaatgagtctgtttcaaaatttcagtctcatcagaattataatgtgtattatttcccagctcaaataagaccccttcttccttcctttgaggaagtactgggcacgtaagatttttttccataagacaagttccagcaaagagaatataaagattagtaagacatactcccagccctcaaggatctcattgtccagtaaagggatttatatatacacgaatgtaatggaatctagcctttacaacaatagagctaggtacacggattcccaaatatggaaatggtgaaacgaaattcagggaagactttaggagagaaaggtcttagagaataaatgtgaactatacagtagaagaaggtagttctcattgccattttcttactgagttgtagtaccagattgagtcccaagtcatattcttactgatttttaggctgtagtatacaaaatttaaaactttaatgaacagccaagcacggtcactcatgcctgtaatcccagggctttgggaggcagaagggggaggatctcctgagcccaggagttccaggctgcagtaagccctgatcatacaactgcactccagcctgggtgaaagagctagaccttgtctccaaaaaataaaaataaaaaaatcaaagctttaatgaacatccttaattagatatggcaataatatcctttggtcattgagtaaaactctttatttttatatacttaaaagtgttctttttattttaaaacatctgtataatttttagttaaaaaaaatggaacctttttcctgtgacactttcgtggcattacctccagcaacagtcgataacaggattatttttggaaaaaattcagatagactctatgatgaagtacaagaggtggtttattttcctgctgtagttcatgataacctgggagaacgtcttaagtgtacatatatagaaattgatcaagttcctgaaacatatgctgttgtcctgagtcgcccagcgtggttgtggggggcagaaatgggagccaatgagcatggagtttgcattgggaatgaagctgtatggggaagagaagaagtttgtgatgaagaagcactattaggaatggaccttgtcagacttggccttgaaagagctgatacagctgaaaaagccctcaatgtcattgttgacttactagaaaaatatggccagggtggaaattgcacagagggtagaatggtatttagctatcacaacagtttcctgatagctgataggaatgaagcctggattctggagactgcagggaagtactgggcagcagaaaaagtacaagagggagttcgtaatatttctaatcaactttccataacaaccaagattgcccgggaacacccagacatgagaaactatgctaagcggaaaggttggtgggatggtaaaaaggagtttgattttgctgcagcatattcctatcttgacacagccaagatgatgacttcatcaggcagatactgtgagggctacaagcttctaaataagcacaaaggaaatataacttttgaaacaatgatggaaattcttcgagataaaccaagtggcattaatatggagggagaattcctgaccactgcaagcatggtttctattttacctcaagactccagccttccttgcattcacttctttacagggactcctgatcctgagagatctgtttttaagcctttcatatttgtgccacatatttcacaactattggataccagttcaccaacatttgaacttgaagatctagttaaaaagaaatcacattttaagcctgacagaagacacccactctaccaaaaacatcaacaggcattggaagtagtaaataataatgaggaaaaagccaaaataatgttggacaacatgaggaaactggagaaagaactattcagagagatggaatcaatccttcaaaacaagcatcttgatgtggagaaaattgttaatctctttcctcagtgtacaaaagatgaaattcaaatttatcagtcaaatttatcagtcaaagttagttcttagtgatcatatggtcagctaatattagttcttagtgatcagtggtcagtaatcttcaaagtcagaatctatcaccttggtaaattatataaacctaacttgagcagatctgattattcttggatagtattcaagtggtatcttgactattaaactacgtatagtgttgctgaaatagaaagaaaacagcattggaattggattcatgtatcgtgggatacaggtgttatttcaggtgatgtacttgcattattttctttagccatagtaactttttgtcacaataactaagtattcaattatatataaagagtgaaacattaaaatgacgcatggatttatatttattataattatgtagtaccctcaaatcattttgtcagttacatcaagaaagcagatttttctttagtcatgaaaaatatctcaagtggtaagttgtttgtgctttaggcaaacattaaccagctctaacaagaaaaatgtctagatttacacattgtcaatacagtatattagttctgcaaatgcacttttgttaaactcaaacatgctctttgtcaagacttggctaaccagtgagcttgtagctctgattatctagcatttttagggtcattctccttaataggcttttatgttaataagatatatttttagaagagcttgtttgggagattagagaataagataaaagaaccaaaaccttaggatatactgtttctgggtctgaaatctctctcattgtttacttctgttcactcagtgaaaacagaaacaagaatgaggtagtggcaatgaaatagaattattagtatattatgaacattataacattttgaacactataatgcattatatattatgaacttttatgaactttatacatgagtaatagcttcctaaagtttataaaacattgtttaggttacataaagattaccaagtaagactcaaaattgcaaatataaacaaaagaaaaatccaactgaaaataacactaagtatttttgagttcctagaatgtccattttggtatttggttacattatcatatttactagtcactatcagcacaattaggttaataaagaagtgggtcattat

SEQ ID NO: 321763 - DNA, 3806 bp, Homo sapiens
aaaaaacaaaaaacgaataagcctttatgagaaattttctctcctaccaaataataacaataacagctttcatgtgagtatctactatgttctatgcactgtgcaaaacactttacgtgttgccttattaagttctcataacagcccatcaaatagtgtcttatttttctgatgaggcagaaggcataggtaagagagagattaaatagtctgccaaagttatatagtgatagaactaactataaaacacaaatagaaggagatccaggacataagagttgaaatacagaaagaaaataacagaagccatcaagacatcagacttctcgtcactgaggagaagaggttaaggaaacatttattatatttaaattttgtttttaagttgctagcatctgcctgtgtaaagccattttaaggttttgccattattaaaggaaagaaggaaactctgtaaaacaatgtgtctgttctggcagcaaaataaggacctttaggtgttctattataagtgaagatctaagattttccaagttacaactgaagaggtaatctagatattaaagtatataattgcgatttataaattaaatatgtgaactttctcctagaaatatcagcaatttggaattatattgacatatttttgtctgaatcaatgagtctgtttcaaaatttcagtctcatcagaattataatgtgtattatttcccagctcaaataagaccccttcttccttcctttgaggaagtactgggcacgtaagatttttttccataagacaagttccagcaaagagaatataaagattagtaagacatactcccagccctcaaggatctcattgtccagtaaagggatttatatatacacgaatgtaatggaatctagcctttacaacaatagagctaggtacacggattcccaaatatggaaatggtgaaacgaaattcagggaagactttaggagagaaaggtcttagagaataaatgtgaactatacagtagaagaaggtagttctcattgccattttcttactgagttgtagtaccagattgagtcccaagtcatattcttactgatttttaggctgtagtatacaaaatttaaaactttaatgaacagccaagcacggtcactcatgcctgtaatcccagggctttgggaggcagaagggggaggatctcctgagcccaggagttccaggctgcagtaagccctgatcatacaactgcactccagcctgggtgaaagagctagaccttgtctccaaaaaataaaaataaaaaaatcaaagctttaatgaacatccttaattagatatggcaataatatcctttggtcattgagtaaaactctttatttttatatacttaaaagtgttctttttattttaaaacatctgtataatttttagttaaaaaaaatggaacctttttcctgtgacactttcgtggcattacctccagcaacagtcgataacaggattatttttggaaaaaattcagatagactctatgatgaagtacaagaggtggtttattttcctgctgtagttcatgataacctgggagaacgtcttaagtgtacatatatagaaattgatcaagttcctgaaacatatgctgttgtcctgagtcgcccagcgtggttgtggggggcagaaatgggagccaatgagcatggagtttgcattgggaatgaagctgtatggggaagagaagaagtttgtgatgaagaagcactattaggaatggaccttgtcagacttggccttgaaagagctgatacagctgaaaaagccctcaatgtcattgttgacttactagaaaaatatggccagggtggaaattgcacagagggtagaatggtatttagctatcacaacagtttcctgatagctgataggaatgaagcctggattctggagactgcagggaagtactgggcagcagaaaaagtacaagagggagttcgtaatatttctaatcaactttccataacaaccaagattgcccgggaacacccagacatgagaaactatgctaagcggaaaggttggtgggatggtaaaaaggagtttgattttgctgcagcatattcctatcttgacacagccaagatgatgacttcatcaggcagatactgtgagggctacaagcttctaaataagcacaaaggaaatataacttttgaaacaatgatggaaattcttcgagataaaccaagtggcattaatatggagggagaattcctgaccactgcaagcatggtttctattttacctcaagactccagccttccttgcattcacttctttacagggactcctgatcctgagagatctgtttttaagcctttcatatttgtgccacatatttcacaactattggataccagttcaccaacatttgaacttgaagatctagttaaaaagaaatcacattttaagcctgacagaagacacccactctaccaaaaacatcaacaggcattggaagtagtaaataataatgaggaaaaagccaaaataatgttggacaacatgaggaaactggagaaagaactattcagagagatggaatcaatccttcaaaacaagcatcttgatgtggagaaaattgttaatctctttcctcagtgtacaaaagatgaaattcaaatttatcagtcaaatttatcagtcaaagttagttcttagtgatcatatggtcagctaatattagttcttagtgatcagtggtcagtaatcttcaaagtcagaatctatcaccttggtaaattatataaacctaacttgagcagatctgattattcttggatagtattcaagtggtatcttgactattaaactacgtatagtgttgctgaaatagaaagaaaacagcattggaattggattcatgtatcgtgggatacaggtgttatttcaggtgatgtacttgcattattttctttagccatagtaactttttgtcacaataactaagtattcaattatatataaagagtgaaacattaaaatgacgcatggatttatatttattataattatgtagtaccctcaaatcattttgtcagttacatcaagaaagcagatttttctttagtcatgaaaaatatctcaagtggtaagttgtttgtgctttaggcaaacattaaccagctctaacaagaaaaatgtctagatttacacattgtcaatacagtatattagttctgcaaatgcacttttgttaaactcaaacatgctctttgtcaagacttggctaaccagtgagcttgtagctctgattatctagcatttttagggtcattctccttaataggcttttatgttaataagatatatttttagaagagcttgtttgggagattagagaataagataaaagaaccaaaaccttaggatatactgtttctgggtctgaaatctctctcattgtttacttctgttcactcagtgaaaacagaaacaagaatgaggtagtggcaatgaaatagaattattagtatattatgaacattataacattttgaacactataatgcattatatattatgaacttttatgaactttatacatgagtaatagcttcctaaagtttataaaacattgtttaggttacataaagattaccaagtaagactcaaaattgcaaatataaacaaaagaaaaatccaactgaaaataacactaagtatttttgagttcctagaatgtccattttggtatttggttacattatcatatttactagtcactatcagcacaattaggttaataaagaagtgggtcattat

SEQ ID NO: 321764 - DNA, 2469 bp, Homo sapiens
gtgacagcttccggcaactgatgcctccactggccactcctccctccgtccacctgtcacttcgggtagctgggaggccagttaaaaaaaatggaacctttttcctgtgacactttcgtggcattacctccagcaacagtcgataacaggattatttttggaaaaaattcagatagactctatgatgaagtacaagaggtggtttattttcctgctgtagttcatgataacctgggagaacgtcttaagtgtacatatatagaaattgatcaagttcctgaaacatatgctgttgtcctgagtcgcccagcgtggttgtggggggcagaaatgggagccaatgagcatggagtttgcattgggaatgaagctgtatggggaagagaagaagtttgtgatgaagaagcactattaggaatggaccttgtcagacttggccttgaaagagctgatacagctgaaaaagccctcaatgtcattgttgacttactagaaaaatatggccagggtggaaattgcacagagggtagaatggtatttagctatcacaacagtttcctgatagctgataggaatgaagcctggattctggagactgcagggaagtactgggcagcagaaaaagtacaagagggagttcgtaatatttctaatcaactttccataacaaccaagattgcccgggaacacccagacatgagaaactatgctaagcggaaaggttggtgggatggtaaaaaggagtttgattttgctgcagcatattcctatcttgacacagccaagatgatgacttcatcaggcagatactgtgagggctacaagcttctaaataagcacaaaggaaatataacttttgaaacaatgatggaaattcttcgagataaaccaagtggcattaatatggagggagaattcctgaccactgcaagcatggtttctattttacctcaagactccagccttccttgcattcacttctttacagggactcctgatcctgagagatctgtttttaagcctttcatatttgtgccacatatttcacaactattggataccagttcaccaacatttgaacttgaagatctagttaaaaagaaatcacattttaagcctgacagaagacacccactctaccaaaaacatcaacaggcattggaagtagtaaataataatgaggaaaaagccaaaataatgttggacaacatgaggaaactggagaaagaactattcagagagatggaatcaatccttcaaaacaagcatcttgatgtggagaaaattgttaatctctttcctcagtgtacaaaagatgaaattcaaatttatcagtcaaatttatcagtcaaagttagttcttagtgatcatatggtcagctaatattagttcttagtgatcagtggtcagtaatcttcaaagtcagaatctatcaccttggtaaattatataaacctaacttgagcagatctgattattcttggatagtattcaagtggtatcttgactattaaactacgtatagtgttgctgaaatagaaagaaaacagcattggaattggattcatgtatcgtgggatacaggtgttatttcaggtgatgtacttgcattattttctttagccatagtaactttttgtcacaataactaagtattcaattatatataaagagtgaaacattaaaatgacgcatggatttatatttattataattatgtagtaccctcaaatcattttgtcagttacatcaagaaagcagatttttctttagtcatgaaaaatatctcaagtggtaagttgtttgtgctttaggcaaacattaaccagctctaacaagaaaaatgtctagatttacacattgtcaatacagtatattagttctgcaaatgcacttttgttaaactcaaacatgctctttgtcaagacttggctaaccagtgagcttgtagctctgattatctagcatttttagggtcattctccttaataggcttttatgttaataagatatatttttagaagagcttgtttgggagattagagaataagataaaagaaccaaaaccttaggatatactgtttctgggtctgaaatctctctcattgtttacttctgttcactcagtgaaaacagaaacaagaatgaggtagtggcaatgaaatagaattattagtatattatgaacattataacattttgaacactataatgcattatatattatgaacttttatgaactttatacatgagtaatagcttcctaaagtttataaaacattgtttaggttacataaagattaccaagtaagactcaaaattgcaaatataaacaaaagaaaaatccaactgaaaataacactaagtatttttgagttcctagaatgtccattttggtatttggttacattatcatatttactagtcactatcagcacaattaggttaataaagaagtgggtcattat

SEQ ID NO: 321765 - DNA, 3836 bp, Homo sapiens
aaaaaacaaaaaacgaataagcctttatgagaaattttctctcctaccaaataataacaataacagctttcatgtgagtatctactatgttctatgcactgtgcaaaacactttacgtgttgccttattaagttctcataacagcccatcaaatagtgtcttatttttctgatgaggcagaaggcataggtaagagagagattaaatagtctgccaaagttatatagtgatagaactaactataaaacacaaatagaaggagatccaggacataagagttgaaatacagaaagaaaataacagaagccatcaagacatcagacttctcgtcactgaggagaagaggaaaacccttaagagtttcagtctgaagtttttatttagtcattttcttttctttttaaggaaacatttattatatttaaattttgtttttaagttgctagcatctgcctgtgtaaagccattttaaggttttgccattattaaaggaaagaaggaaactctgtaaaacaatgtgtctgttctggcagcaaaataaggacctttaggtgttctattataagtgaagatctaagattttccaagttacaactgaagaggtaatctagatattaaagtatataattgcgatttataaattaaatatgtgaactttctcctagaaatatcagcaatttggaattatattgacatatttttgtctgaatcaatgagtctgtttcaaaatttcagtctcatcagaattataatgtgtattatttcccagctcaaataagaccccttcttccttcctttgaggaagtactgggcacgtaagatttttttccataagacaagttccagcaaagagaatataaagattagtaagacatactcccagccctcaaggatctcattgtccagtaaagggatttatatatacacgaatgtaatggaatctagcctttacaacaatagagctaggtacacggattcccaaatatggaaatggtgaaacgaaattcagggaagactttaggagagaaaggtcttagagaataaatgtgaactatacagtagaagaaggtagttctcattgccattttcttactgagttgtagtaccagattgagtcccaagtcatattcttactgatttttaggctgtagtatacaaaatttaaaactttaatgaacagccaagcacggtcactcatgcctgtaatcccagggctttgggaggcagaagggggaggatctcctgagcccaggagttccaggctgcagtaagccctgggtgaaagagctagaccttgtctccaaaaaataaaaataaaaaaatcaaagctttaatgaacatccttaattagatatggcaataatatcctttggtcattgagtaaaactctttatttttatatacttaaaagtgttctttttattttaaaacatctgtataatttttagttaaaaaaaatggaacctttttcctgtgacactttcgtggcattacctccagcaacagtcgataacaggattatttttggaaaaaattcagatagactctatgatgaagtacaagaggtggtttattttcctgctgtagttcatgataacctgggagaacgtcttaagtgtacatatatagaaattgatcaagttcctgaaacatatgctgttgtcctgagtcgcccagcgtggttgtggggggcagaaatgggagccaatgagcatggagtttgcattgggaatgaagctgtatggggaagagaagaagtttgtgatgaagaagcactattaggaatggaccttgtcagacttggccttgaaagagctgatacagctgaaaaagccctcaatgtcattgttgacttactagaaaaatatggccagggtggaaattgcacagagggtagaatggtatttagctatcacaacagtttcctgatagctgataggaatgaagcctggattctggagactgcagggaagtactgggcagcagaaaaagtacaagagggagttcgtaatatttctaatcaactttccataacaaccaagattgcccgggaacacccagacatgagaaactatgctaagcggaaaggttggtgggatggtaaaaaggagtttgattttgctgcagcatattcctatcttgacacagccaagatgatgacttcatcaggcagatactgtgagggctacaagcttctaaataagcacaaaggaaatataacttttgaaacaatgatggaaattcttcgagataaaccaagtggcattaatatggagggagaattcctgaccactgcaagcatggtttctattttacctcaagactccagccttccttgcattcacttctttacagggactcctgatcctgagagatctgtttttaagcctttcatatttgtgccacatatttcacaactattggataccagttcaccaacatttgaacttgaagatctagttaaaaagaaatcacattttaagcctgacagaagacacccactctaccaaaaacatcaacaggcattggaagtagtaaataataatgaggaaaaagccaaaataatgttggacaacatgaggaaactggagaaagaactattcagagagatggaatcaatccttcaaaacaagcatcttgatgtggagaaaattgttaatctctttcctcagtgtacaaaagatgaaattcaaatttatcagtcaaatttatcagtcaaagttagttcttagtgatcatatggtcagctaatattagttcttagtgatcagtggtcagtaatcttcaaagtcagaatctatcaccttggtaaattatataaacctaacttgagcagatctgattattcttggatagtattcaagtggtatcttgactattaaactacgtatagtgttgctgaaatagaaagaaaacagcattggaattggattcatgtatcgtgggatacaggtgttatttcaggtgatgtacttgcattattttctttagccatagtaactttttgtcacaataactaagtattcaattatatataaagagtgaaacattaaaatgacgcatggatttatatttattataattatgtagtaccctcaaatcattttgtcagttacatcaagaaagcagatttttctttagtcatgaaaaatatctcaagtggtaagttgtttgtgctttaggcaaacattaaccagctctaacaagaaaaatgtctagatttacacattgtcaatacagtatattagttctgcaaatgcacttttgttaaactcaaacatgctctttgtcaagacttggctaaccagtgagcttgtagctctgattatctagcatttttagggtcattctccttaataggcttttatgttaataagatatatttttagaagagcttgtttgggagattagagaataagataaaagaaccaaaaccttaggatatactgtttctgggtctgaaatctctctcattgtttacttctgttcactcagtgaaaacagaaacaagaatgaggtagtggcaatgaaatagaattattagtatattatgaacattataacattttgaacactataatgcattatatattatgaacttttatgaactttatacatgagtaatagcttcctaaagtttataaaacattgtttaggttacataaagattaccaagtaagactcaaaattgcaaatataaacaaaagaaaaatccaactgaaaataacactaagtatttttgagttcctagaatgtccattttggtatttggttacattatcatatttactagtcactatcagcacaattaggttaataaagaagtgggtcattat

SEQ ID NO: 321766 - DNA, 2878 bp, Homo sapiens
gtgacagcttccggcaactgatgcctccactggccactcctccctccgtccacctgtcacttcgggtagctgggaggccaggtgaggggcgcgcacgggggaggggcgtgcatagttgagacagaaacccggaagacccaactgtggcgcggcactgcttgaccgaggggctccggagcccagctgcaccggctgcggtttgagcgcccagggccggggtgcggggtggaccgcggcggcccttcgaccaaaggtgcttgaagctcgagcccattactttctgtggactctgactcgagctgcaaaagcttttctgcactgtttttctcatctatgttatgaagataataattccggccctaaccgtagtatgcttgcgagaatccaacaatatgatgtttctgaaagcgccggctgaactaagagcgcgtgaaatagaatgacagacagctctgcaagaacggaggccctgtctattttgtacccagctttaaaaaaaatggaacctttttcctgtgacactttcgtggcattacctccagcaacagtcgataacaggattatttttggaaaaaattcagatagactctatgatgaagtacaagaggtggtttattttcctgctgtagttcatgataacctgggagaacgtcttaagtgtacatatatagaaattgatcaagttcctgaaacatatgctgttgtcctgagtcgcccagcgtggttgtggggggcagaaatgggagccaatgagcatggagtttgcattgggaatgaagctgtatggggaagagaagaagtttgtgatgaagaagcactattaggaatggaccttgtcagacttggccttgaaagagctgatacagctgaaaaagccctcaatgtcattgttgacttactagaaaaatatggccagggtggaaattgcacagagggtagaatggtatttagctatcacaacagtttcctgatagctgataggaatgaagcctggattctggagactgcagggaagtactgggcagcagaaaaagtacaagagggagttcgtaatatttctaatcaactttccataacaaccaagattgcccgggaacacccagacatgagaaactatgctaagcggaaaggttggtgggatggtaaaaaggagtttgattttgctgcagcatattcctatcttgacacagccaagatgatgacttcatcaggcagatactgtgagggctacaagcttctaaataagcacaaaggaaatataacttttgaaacaatgatggaaattcttcgagataaaccaagtggcattaatatggagggagaattcctgaccactgcaagcatggtttctattttacctcaagactccagccttccttgcattcacttctttacagggactcctgatcctgagagatctgtttttaagcctttcatatttgtgccacatatttcacaactattggataccagttcaccaacatttgaacttgaagatctagttaaaaagaaatcacattttaagcctgacagaagacacccactctaccaaaaacatcaacaggcattggaagtagtaaataataatgaggaaaaagccaaaataatgttggacaacatgaggaaactggagaaagaactattcagagagatggaatcaatccttcaaaacaagcatcttgatgtggagaaaattgttaatctctttcctcagtgtacaaaagatgaaattcaaatttatcagtcaaatttatcagtcaaagttagttcttagtgatcatatggtcagctaatattagttcttagtgatcagtggtcagtaatcttcaaagtcagaatctatcaccttggtaaattatataaacctaacttgagcagatctgattattcttggatagtattcaagtggtatcttgactattaaactacgtatagtgttgctgaaatagaaagaaaacagcattggaattggattcatgtatcgtgggatacaggtgttatttcaggtgatgtacttgcattattttctttagccatagtaactttttgtcacaataactaagtattcaattatatataaagagtgaaacattaaaatgacgcatggatttatatttattataattatgtagtaccctcaaatcattttgtcagttacatcaagaaagcagatttttctttagtcatgaaaaatatctcaagtggtaagttgtttgtgctttaggcaaacattaaccagctctaacaagaaaaatgtctagatttacacattgtcaatacagtatattagttctgcaaatgcacttttgttaaactcaaacatgctctttgtcaagacttggctaaccagtgagcttgtagctctgattatctagcatttttagggtcattctccttaataggcttttatgttaataagatatatttttagaagagcttgtttgggagattagagaataagataaaagaaccaaaaccttaggatatactgtttctgggtctgaaatctctctcattgtttacttctgttcactcagtgaaaacagaaacaagaatgaggtagtggcaatgaaatagaattattagtatattatgaacattataacattttgaacactataatgcattatatattatgaacttttatgaactttatacatgagtaatagcttcctaaagtttataaaacattgtttaggttacataaagattaccaagtaagactcaaaattgcaaatataaacaaaagaaaaatccaactgaaaataacactaagtatttttgagttcctagaatgtccattttggtatttggttacattatcatatttactagtcactatcagcacaattaggttaataaagaagtgggtcattat

SEQ ID NO: 321767 - DNA, 2538 bp, Homo sapiens
gtgacagcttccggcaactgatgcctccactggccactcctccctccgtccacctgtcacttcgggtagctgggaggccagcaaaataaggacctttaggtgttctattataagtgaagatctaagattttccaagttacaactgaagagttaaaaaaaatggaacctttttcctgtgacactttcgtggcattacctccagcaacagtcgataacaggattatttttggaaaaaattcagatagactctatgatgaagtacaagaggtggtttattttcctgctgtagttcatgataacctgggagaacgtcttaagtgtacatatatagaaattgatcaagttcctgaaacatatgctgttgtcctgagtcgcccagcgtggttgtggggggcagaaatgggagccaatgagcatggagtttgcattgggaatgaagctgtatggggaagagaagaagtttgtgatgaagaagcactattaggaatggaccttgtcagacttggccttgaaagagctgatacagctgaaaaagccctcaatgtcattgttgacttactagaaaaatatggccagggtggaaattgcacagagggtagaatggtatttagctatcacaacagtttcctgatagctgataggaatgaagcctggattctggagactgcagggaagtactgggcagcagaaaaagtacaagagggagttcgtaatatttctaatcaactttccataacaaccaagattgcccgggaacacccagacatgagaaactatgctaagcggaaaggttggtgggatggtaaaaaggagtttgattttgctgcagcatattcctatcttgacacagccaagatgatgacttcatcaggcagatactgtgagggctacaagcttctaaataagcacaaaggaaatataacttttgaaacaatgatggaaattcttcgagataaaccaagtggcattaatatggagggagaattcctgaccactgcaagcatggtttctattttacctcaagactccagccttccttgcattcacttctttacagggactcctgatcctgagagatctgtttttaagcctttcatatttgtgccacatatttcacaactattggataccagttcaccaacatttgaacttgaagatctagttaaaaagaaatcacattttaagcctgacagaagacacccactctaccaaaaacatcaacaggcattggaagtagtaaataataatgaggaaaaagccaaaataatgttggacaacatgaggaaactggagaaagaactattcagagagatggaatcaatccttcaaaacaagcatcttgatgtggagaaaattgttaatctctttcctcagtgtacaaaagatgaaattcaaatttatcagtcaaatttatcagtcaaagttagttcttagtgatcatatggtcagctaatattagttcttagtgatcagtggtcagtaatcttcaaagtcagaatctatcaccttggtaaattatataaacctaacttgagcagatctgattattcttggatagtattcaagtggtatcttgactattaaactacgtatagtgttgctgaaatagaaagaaaacagcattggaattggattcatgtatcgtgggatacaggtgttatttcaggtgatgtacttgcattattttctttagccatagtaactttttgtcacaataactaagtattcaattatatataaagagtgaaacattaaaatgacgcatggatttatatttattataattatgtagtaccctcaaatcattttgtcagttacatcaagaaagcagatttttctttagtcatgaaaaatatctcaagtggtaagttgtttgtgctttaggcaaacattaaccagctctaacaagaaaaatgtctagatttacacattgtcaatacagtatattagttctgcaaatgcacttttgttaaactcaaacatgctctttgtcaagacttggctaaccagtgagcttgtagctctgattatctagcatttttagggtcattctccttaataggcttttatgttaataagatatatttttagaagagcttgtttgggagattagagaataagataaaagaaccaaaaccttaggatatactgtttctgggtctgaaatctctctcattgtttacttctgttcactcagtgaaaacagaaacaagaatgaggtagtggcaatgaaatagaattattagtatattatgaacattataacattttgaacactataatgcattatatattatgaacttttatgaactttatacatgagtaatagcttcctaaagtttataaaacattgtttaggttacataaagattaccaagtaagactcaaaattgcaaatataaacaaaagaaaaatccaactgaaaataacactaagtatttttgagttcctagaatgtccattttggtatttggttacattatcatatttactagtcactatcagcacaattaggttaataaagaagtgggtcattat

SEQ ID NO: 321768 - DNA, 2943 bp, Homo sapiens
gtgacagcttccggcaactgatgcctccactggccactcctccctccgtccacctgtcacttcgggtagctgggaggccaggtgaggggcgcgcacgggggaggggcgtgcatagttgagacagaaacccggaagacccaactgtggcgcggcactgcttgaccgaggggctccggagcccagctgcaccggctgcggtttgagcgcccagggccggggtgcggggtggaccgcggcggcccttcgaccaaaggtgcttgaagctcgagcccattactttctgtggactctgactcgagctgcaaaagcttttctgcactgtttttctcatctatgttatgaagataataattccggccctaaccgtagtatgcttgcgagaatccaacaatatgatgtttctgaaagcgccggctgaactaagagcgcgtgaaatagaatgacagacagctctgcaagaacggaggccctgtctattttgtacccagctgtacggtactggcgccgaaagacgttcaataaatacttattgaatgacgaatacgcgttaggagtttaaaaaaaatggaacctttttcctgtgacactttcgtggcattacctccagcaacagtcgataacaggattatttttggaaaaaattcagatagactctatgatgaagtacaagaggtggtttattttcctgctgtagttcatgataacctgggagaacgtcttaagtgtacatatatagaaattgatcaagttcctgaaacatatgctgttgtcctgagtcgcccagcgtggttgtggggggcagaaatgggagccaatgagcatggagtttgcattgggaatgaagctgtatggggaagagaagaagtttgtgatgaagaagcactattaggaatggaccttgtcagacttggccttgaaagagctgatacagctgaaaaagccctcaatgtcattgttgacttactagaaaaatatggccagggtggaaattgcacagagggtagaatggtatttagctatcacaacagtttcctgatagctgataggaatgaagcctggattctggagactgcagggaagtactgggcagcagaaaaagtacaagagggagttcgtaatatttctaatcaactttccataacaaccaagattgcccgggaacacccagacatgagaaactatgctaagcggaaaggttggtgggatggtaaaaaggagtttgattttgctgcagcatattcctatcttgacacagccaagatgatgacttcatcaggcagatactgtgagggctacaagcttctaaataagcacaaaggaaatataacttttgaaacaatgatggaaattcttcgagataaaccaagtggcattaatatggagggagaattcctgaccactgcaagcatggtttctattttacctcaagactccagccttccttgcattcacttctttacagggactcctgatcctgagagatctgtttttaagcctttcatatttgtgccacatatttcacaactattggataccagttcaccaacatttgaacttgaagatctagttaaaaagaaatcacattttaagcctgacagaagacacccactctaccaaaaacatcaacaggcattggaagtagtaaataataatgaggaaaaagccaaaataatgttggacaacatgaggaaactggagaaagaactattcagagagatggaatcaatccttcaaaacaagcatcttgatgtggagaaaattgttaatctctttcctcagtgtacaaaagatgaaattcaaatttatcagtcaaatttatcagtcaaagttagttcttagtgatcatatggtcagctaatattagttcttagtgatcagtggtcagtaatcttcaaagtcagaatctatcaccttggtaaattatataaacctaacttgagcagatctgattattcttggatagtattcaagtggtatcttgactattaaactacgtatagtgttgctgaaatagaaagaaaacagcattggaattggattcatgtatcgtgggatacaggtgttatttcaggtgatgtacttgcattattttctttagccatagtaactttttgtcacaataactaagtattcaattatatataaagagtgaaacattaaaatgacgcatggatttatatttattataattatgtagtaccctcaaatcattttgtcagttacatcaagaaagcagatttttctttagtcatgaaaaatatctcaagtggtaagttgtttgtgctttaggcaaacattaaccagctctaacaagaaaaatgtctagatttacacattgtcaatacagtatattagttctgcaaatgcacttttgttaaactcaaacatgctctttgtcaagacttggctaaccagtgagcttgtagctctgattatctagcatttttagggtcattctccttaataggcttttatgttaataagatatatttttagaagagcttgtttgggagattagagaataagataaaagaaccaaaaccttaggatatactgtttctgggtctgaaatctctctcattgtttacttctgttcactcagtgaaaacagaaacaagaatgaggtagtggcaatgaaatagaattattagtatattatgaacattataacattttgaacactataatgcattatatattatgaacttttatgaactttatacatgagtaatagcttcctaaagtttataaaacattgtttaggttacataaagattaccaagtaagactcaaaattgcaaatataaacaaaagaaaaatccaactgaaaataacactaagtatttttgagttcctagaatgtccattttggtatttggttacattatcatatttactagtcactatcagcacaattaggttaataaagaagtgggtcattat

SEQ ID NO: 321769 - DNA, 4905 bp, Homo sapiens
aaaaaacaaaaaacgaataagcctttatgagaaattttctctcctaccaaataataacaataacagctttcatgtgagtatctactatgttctatgcactgtgcaaaacactttacgtgttgccttattaagttctcataacagcccatcaaatagtgtcttatttttctgatgaggcagaaggcataggtaagagagagattaaatagtctgccaaagttatatagtgatagaactaactataaaacacaaatagaaggagatccaggacataagagttgaaatacagaaagaaaataacagaagccatcaagacatcagacttctcgtcactgaggagaagaggaaaacccttaagagtttcagtctgaagtttttatttagtcattttcttttctttttaaggaaacatttattatatttaaattttgtttttaagttgctagcatctgcctgtgtaaagccattttaaggttttgccattattaaaggaaagaaggaaactctgtaaaacaatgtgtctgttctggcagcaaaataaggacctttaggtgttctattataagtgaagatctaagattttccaagttacaactgaagaggtaatctagatattaaagtatataattgcgatttataaattaaatatgtgaactttctcctagaaatatcagcaatttggaattatattgacatatttttgtctgaatcaatgagtctgtttcaaaatttcagtctcatcagaattataatgtgtattatttcccagctcaaataagaccccttcttccttcctttgaggaagtactgggcacgtaagatttttttccataagacaagttccagcaaagagaatataaagattagtaagacatactcccagccctcaaggatctcattgtccagtaaagggatttatatatacacgaatgtaatggaatctagcctttacaacaatagagctaggtacacggattcccaaatatggaaatggtgaaacgaaattcagggaagactttaggagagaaaggtcttagagaataaatgtgaactatacagtagaagaaggtagttctcattgccattttcttactgagttgtagtaccagattgagtcccaagtcatattcttactgatttttaggctgtagtatacaaaatttaaaactttaatgaacagccaagcacggtcactcatgcctgtaatcccagggctttgggaggcagaagggggaggatctcctgagcccaggagttccaggctgcagtaagccctgatcatacaactgcactccagcctgggtgaaagagctagaccttgtctccaaaaaataaaaataaaaaaatcaaagctttaatgaacatccttaattagatatggcaataatatcctttggtcattgagtaaaactctttatttttatatacttaaaagtgttctttttattttaaaacatctgtataatttttagttaaaaaaaatggaacctttttcctgtgacactttcgtggcattacctccagcaacagtcgataacaggattatttttggaaaaaattcagatagactctatgatgaagtacaagaggtggtttattttcctgctgtagttcatgataacctgggagaacgtcttaagtgtacatatatagaaattgatcaagttcctgaaacatatgctgttgtcctgagtcgcccagcgtggttgtggggggcagaaatgggagccaatgagcatggagtttgcattgggaatgaagctgtatggggaagagaagaagtttgtgatgaagaagcactattaggaatggaccttgtcagacttggccttgaaagagctgatacagctgaaaaagccctcaatgtcattgttgacttactagaaaaatatggccagggtggaaattgcacagagggtagaatggtatttagctatcacaacagtttcctgatagctgataggaatgaagcctggattctggagactgcagggaagtactgggcagcagaaaaagtacaagagggagttcgtaatatttctaatcaactttccataacaaccaagattgcccgggaacacccagacatgagaaactatgctaagcggaaaggttggtgggatggtaaaaaggagtttgattttgctgcagcatattcctatcttgacacagccaagatgatgacttcatcaggcagatactgtgagggctacaagcttctaaataagcacaaaggaaatataacttttgaaacaatgatggaaattcttcgagataaaccaagtggcattaatatggagggagaattcctgaccactgcaagcatggtttctattttacctcaagactccagccttccttgcattcacttctttacagggactcctgatcctgagagatctgtttttaagcctttcatatttgtgccacatatttcacaactattggataccagttcaccaacatttgaacttgaagatctagttaaaaagaaatcacattttaagcctgacagaagacacccactctaccaaaaacatcaacaggcattggaagtagtaaataataatgaggaaaaagccaaaataatgttggacaacatgaggaaactggagaaagaactattcagagagatggaatcaatccttcaaaacaagcatcttgatgtggagaaaattgttaatctctttcctcagtgtacaaaagatgaaattcaaatttatcagtcaaatttatcagtcaaagttagttcttagtgatcatatggtcagctaatattagttcttagtgatcagtggtcagtaatcttcaaagtcagaatctatcaccttggtaaattatataaacctaacttgagcagatctgattattcttggatagtattcaagtggtatcttgactattaaactacgtatagtgttgctgaaatagaaagaaaacagcattggaattggattcatgtatcgtgggatacaggtgttatttcaggtgatgtacttgcattattttctttagccatagtaactttttgtcacaataactaagtattcaattatatataaagagtgaaacattaaaatgacgcatggatttatatttattataattatgtagtaccctcaaatcattttgtcagttacatcaagaaagcagatttttctttagtcatgaaaaatatctcaagtggtaagttgtttgtgctttaggcaaacattaaccagctctaacaagaaaaatgtctagatttacacattgtcaatacagtatattagttctgcaaatgcacttttgttaaactcaaacatgctctttgtcaagacttggctaaccagtgagcttgtagctctgattatctagcatttttagggtcattctccttaataggcttttatgttaataagatatatttttagaagagcttgtttgggagattagagaataagataaaagaaccaaaaccttaggatatactgtttctgggtctgaaatctctctcattgtttacttctgttcactcagtgaaaacagaaacaagaatgaggtagtggcaatgaaatagaattattagtatattatgaacattataacattttgaacactataatgcattatatattatgaacttttatgaactttatacatgagtaatagcttcctaaagtttataaaacattgtttaggttacataaagattaccaagtaagactcaaaattgcaaatataaacaaaagaaaaatccaactgaaaataacactaagtatttttgagttcctagaatgtccattttggtatttggttacattatcatatttactagtcactatcagcacaattaggttaataaagaagtgggtcattatattcaaagagtgctcaggaagttatgtgttcaaagttctctcataaataccatcgtctgcctgatactgctcttgtctaatagagggttgacattacaaaagaaaagatgtctgactcaagaactcagttgattctgtttgccttaagtttggttcagtgataggctgtcttctaacccctatactcctcttctctcctttaatagatgaggaaactaagggcaaacagttcgttacacttacgggaatcttatttccctctctaggggcagcatgttttcaccttctcctttgctgccaccttggcctaaactagcaccgtcttttagctagaccattgcgttaactgttctcctacacccatttttgttctttatttccacccacatgagtcactgcagccaatctattacaaatttaaatctgattatgaattcccctcctaaaactcttttttaaaagagactttattttttggagcagttttaggttcacagcaaaattgaacagaaagtacagagttccaatacagcccctatcagcatacatgcatagcctcccccactatcaacatcccagcaccagaatggtacatttgttagaatcaatggccctacattgacacattatcacccaaaggccatggttcaagttagagatcactcttgatgtagtacatcctatgggctttgataattataaaatgacatgtatccaccattatagtattatacagagtagtttcactgccctaaaaatcttctgtgttctgcctatttatcccaccctccctccaacccctggcaaccactgatctttttactgtctccatagttttgccttttccatatgtcatatcattggaatcatacagtatgtgacctcttaagattgtcttctttaacttacttagtaatatccatttaaggttcctgcatgtcttttcatgacttgatagctcatttcttttagtgctaagtaatattcgattgtctgaatatactactactgaaggacatcttggttgcttccaagttttgaaaat

SEQ ID NO: 321770 - DNA, 2924 bp, Homo sapiens
actcggaaagggaactccctgaccccttgcgcttcccaggtgaggcaatgcctcgccctgcttcggctcgcgcacggtgcgcgctcccactggcctgcgcccactgtctggcactccctagtgagatgaacccggtacctcagatggaaatgcagaaatcacccctcttctgcgtcgctcacgctgggagctgtagaccagagctgttcctattcggccatcttggctcctccagaataaacctattttttgaggaaatataacttttgaaacaatgatggaaattcttcgagataaaccaagtggcattaatatggagggagaattcctgaccactgcaagcatggtttctattttacctcaagactccagccttccttgcattcacttctttacagggactcctgatcctgagagatctgtttttaagcctttcatatttgtgccacatatttcacaactattggataccagttcaccaacatttgaacttgaagatctagttaaaaagaaatcacattttaagcctgacagaagacacccactctaccaaaaacatcaacaggcattggaagtagtaaataataatgaggaaaaagccaaaataatgttggacaacatgaggaaactggagaaagaactattcagagagatggaatcaatccttcaaaacaagcatcttgatgtggagaaaattgttaatctctttcctcagtgtacaaaagatgaaattcaaatttatcagtcaaatttatcagtcaaagttagttcttagtgatcatatggtcagctaatattagttcttagtgatcagtggtcagtaatcttcaaagtcagaatctatcaccttggtaaattatataaacctaacttgagcagatctgattattcttggatagtattcaagtggtatcttgactattaaactacgtatagtgttgctgaaatagaaagaaaacagcattggaattggattcatgtatcgtgggatacaggtgttatttcaggtgatgtacttgcattattttctttagccatagtaactttttgtcacaataactaagtattcaattatatataaagagtgaaacattaaaatgacgcatggatttatatttattataattatgtagtaccctcaaatcattttgtcagttacatcaagaaagcagatttttctttagtcatgaaaaatatctcaagtggtaagttgtttgtgctttaggcaaacattaaccagctctaacaagaaaaatgtctagatttacacattgtcaatacagtatattagttctgcaaatgcacttttgttaaactcaaacatgctctttgtcaagacttggctaaccagtgagcttgtagctctgattatctagcatttttagggtcattctccttaataggcttttatgttaataagatatatttttagaagagcttgtttgggagattagagaataagataaaagaaccaaaaccttaggatatactgtttctgggtctgaaatctctctcattgtttacttctgttcactcagtgaaaacagaaacaagaatgaggtagtggcaatgaaatagaattattagtatattatgaacattataacattttgaacactataatgcattatatattatgaacttttatgaactttatacatgagtaatagcttcctaaagtttataaaacattgtttaggttacataaagattaccaagtaagactcaaaattgcaaatataaacaaaagaaaaatccaactgaaaataacactaagtatttttgagttcctagaatgtccattttggtatttggttacattatcatatttactagtcactatcagcacaattaggttaataaagaagtgggtcattatattcaaagagtgctcaggaagttatgtgttcaaagttctctcataaataccatcgtctgcctgatactgctcttgtctaatagagggttgacattacaaaagaaaagatgtctgactcaagaactcagttgattctgtttgccttaagtttggttcagtgataggctgtcttctaacccctatactcctcttctctcctttaatagatgaggaaactaagggcaaacagttcgttacacttacgggaatcttatttccctctctaggggcagcatgttttcaccttctcctttgctgccaccttggcctaaactagcaccgtcttttagctagaccattgcgttaactgttctcctacacccatttttgttctttatttccacccacatgagtcactgcagccaatctattacaaatttaaatctgattatgaattcccctcctaaaactcttttttaaaagagactttattttttggagcagttttaggttcacagcaaaattgaacagaaagtacagagttccaatacagcccctatcagcatacatgcatagcctcccccactatcaacatcccagcaccagaatggtacatttgttagaatcaatggccctacattgacacattatcacccaaaggccatggttcaagttagagatcactcttgatgtagtacatcctatgggctttgataattataaaatgacatgtatccaccattatagtattatacagagtagtttcactgccctaaaaatcttctgtgttctgcctatttatcccaccctccctccaacccctggcaaccactgatctttttactgtctccatagttttgccttttccatatgtcatatcattggaatcatacagtatgtgacctcttaagattgtcttctttaacttacttagtaatatccatttaaggttcctgcatgtcttttcatgacttgatagctcatttcttttagtgctaagtaatattcgattgtctgaatatactactactgaaggacatcttggttgcttccaagttttgaaaat

SEQ ID NO: 321771 - DNA, 3076 bp, Homo sapiens
aaaaaacaaaaaacgaataagcctttatgagaaattttctctcctaccaaataataacaataacagctttcatgtgagtatctactatgttctatgcactgtgcaaaacactttacgtgttgccttattaagttctcataacagcccatcaaatagtgtcttatttttctgatgaggcagaaggcataggtaagagagagattaaatagtctgccaaagttatatagtgatagaactaactataaaacacaaatagaaggagatccaggacataagagttgaaatacagaaagaaaataacagaagccatcaagacatcagacttctcgtcactgaggagaagaggaaaacccttaagagtttcagtctgaagtttttatttagtcattttcttttctttttaaggaaacatttattatatttaaattttgtttttaagttgctagcatctgcctgtgtaaagccattttaaggttttgccattattaaaggaaagaaggaaactctgtaaaacaatgtgtctgttctggcagcaaaataaggacctttaggtgttctattataagtgaagatctaagattttccaagttacaactgaagaggtaatctagatattaaagtatataattgcgatttataaattaaatatgtgaactttctcctagaaatatcagcaatttggaattatattgacatatttttgtctgaatcaatgagtctgtttcaaaatttcagtctcatcagaattataatgtgtattatttcccagctcaaataagaccccttcttccttcctttgaggaagtactgggcacgtaagatttttttccataagacaagttccagcaaagagaatataaagattagtaagacatactcccagccctcaaggatctcattgtccagtaaagggatttatatatacacgaatgtaatggaatctagcctttacaacaatagagctaggtacacggattcccaaatatggaaatggtgaaacgaaattcagggaagactttaggagagaaaggtcttagagaataaatgtgaactatacagtagaagaaggtagttctcattgccattttcttactgagttgtagtaccagattgagtcccaagtcatattcttactgatttttaggctgtagtatacaaaatttaaaactttaatgaacagccaagcacggtcactcatgcctgtaatcccagggctttgggaggcagaagggggaggatctcctgagcccaggagttccaggctgcagtaagccctgatcatacaactgcactccagcctgggtgaaagagctagaccttgtctccaaaaaataaaaataaaaaaatcaaagctttaatgaacatccttaattagatatggcaataatatcctttggtcattgagtaaaactctttatttttatatacttaaaagtgttctttttattttaaaacatctgtataatttttagttaaaaaaaatggaacctttttcctgtgacactttcgtggcattacctccagcaacagtcgataacaggattatttttggaaaaaattcagatagactctatgatgaagtacaagaggtggtttattttcctgctgtagttcatgataacctgggagaacgtcttaagtgtacatatatagaaattgatcaagttcctgaaacatatgctgttgtcctgagtcgcccagcgtggttgtggggggcagaaatgggagccaatgagcatggagtttgcattgggaatgaagctgtatggggaagagaagaagtttgtgatgaagaagcactattaggaatggaccttgtcagacttggccttgaaagagctgatacagctgaaaaagccctcaatgtcattgttgacttactagaaaaatatggccagggtggaaattgcacagagggtagaatggtatttagctatcacaacagtttcctgatagctgataggaatgaagcctggattctggagactgcagggaagtactgggcagcagaaaaagtacaagagggagttcgtaatatttctaatcaactttccataacaaccaagattgcccgggaacacccagacatgagaaactatgctaagcggaaaggttggtgggatggtaaaaaggagtttgattttgctgcagcatattcctatcttgacacagccaagatgatgacttcatcaggcagatactgtgagggctacaagcttctaaataagcacaaaggaaatataacttttgaaacaatgatggaaattcttcgagataaaccaagtggcattaatatggagggagaattcctgaccactgcaagcatggtttctattttacctcaagactccagccttccttgcattcacttctttacagggactcctgatcctgagagatctgtttttaagcctttcatatttgtgccacatatttcacaactattggataccagttcaccaacatttgaacttgaagatctagttaaaaagaaatcacattttaagcctgacagaagacacccactctaccaaaaacatcaacaggcattggaagtagtaaataataatgaggaaaaagccaaaataatgttggacaacatgaggaaactggagaaagaactattcagagagatggaatcaatccttcaaaacaagcatcttgatgtggagaaaattgttaatctctttcctcagtgtacaaaagatgaaattcaaatttatcagtcaaatttatcagtcaaagttagttcttagtgatcatatggtcagctaatattagttcttagtgatcagtggtcagtaatcttcaaagtcagaatctatcaccttggtaaattatataaacctaacttgagcagatctgattattcttggatagtattcaagtggtatcttgactattaaactacgtatagtgttgctgaaatagaaagaaaacagcattggaattggattcatgtatcgtgggatacaggtgttatttcaggtgatgtacttgcattattttctttagccatagtaactttttgtcacaataactaagtattcaattatatataaagagtgaaacatta

SEQ ID NO: 321772 - DNA, 4891 bp, Homo sapiens
aaaaaacaaaaaacgaataagcctttatgagaaattttctctcctaccaaataataacaataacagctttcatgtgagtatctactatgttctatgcactgtgcaaaacactttacgtgttgccttattaagttctcataacagcccatcaaatagtgtcttatttttctgatgaggcagaaggcataggtaagagagagattaaatagtctgccaaagttatatagtgatagaactaactataaaacacaaatagaaggagatccaggacataagagttgaaatacagaaagaaaataacagaagccatcaagacatcagacttctcgtcactgaggagaagaggaaaacccttaagagtttcagtctgaagtttttatttagtcattttcttttctttttaaggaaacatttattatatttaaattttgtttttaagttgctagcatctgcctgtgtaaagccattttaaggttttgccattattaaaggaaagaaggaaactctgtaaaacaatgtgtctgttctggcagcaaaataaggacctttaggtgttctattataagtgaagatctaagattttccaagttacaactgaagaggtaatctagatattaaagtatataattgcgatttataaattaaatatgtgaactttctcctagaaatatcagcaatttggaattatattgacatatttttgtctgaatcaatgagtctgtttcaaaatttcagtctcatcagaattataatgtgtattatttcccagctcaaataagaccccttcttccttcctttgaggaagtactgggcacgtaagatttttttccataagacaagttccagcaaagagaatataaagattagtaagacatactcccagccctcaaggatctcattgtccagtaaagggatttatatatacacgaatgtaatggaatctagcctttacaacaatagagctaggtacacggattcccaaatatggaaatggtgaaacgaaattcagggaagactttaggagagaaaggtcttagagaataaatgtgaactatacagtagaagaaggtagttctcattgccattttcttactgagttgtagtaccagattgagtcccaagtcatattcttactgatttttaggctgtagtatacaaaatttaaaactttaatgaacagccaagcacggtcactcatgcctgtaatcccagggctttgggaggcagaagggggaggatctcctgagcccaggagttccaggctgcagtaagccctgatcatacaactgcactccagcctgggtgaaagagctagaccttgtctccaaaaaataaaaataaaaaaatcaaagctttaatgaacatccttaattagatatggcaataatatcctttggtcattgagtaaaactctttatttttatatacttaaaagtgttctttttattttaaaacatctgtataatttttagttaaaaaaaatggaacctttttcctgtgacactttcgtggcattacctccagcaacagtcgataacaggattatttttggaaaaaattcagatagactctatgatgaagtacaagaggtggtttattttcctgctgtagttcatgataacctgggagaacgtcttaagtgtacatatatagaaattgatcaagttcctgaaacatatgctgttgtcctgagtcgcccagcgtggttgtggggggcagaaatgggagccaatgagcatggagtttgcattgggaatgaagctgtatggggaagagaagaagtttgtgatgaagaagcactattaggaatggaccttgtcagacttggccttgaaagagctgatacagctgaaaaagccctcaatgtcattgttgacttactagaaaaatatggccagggtggaaattgcacagagggtagaatggtatttagctatcacaacagtttcctgatagctgataggaatgaagcctggattctggagactgcagggaagtactgggcagcagaaaaagtacaagagggagttcgtaatatttctaatcaactttccataacaaccaagattgcccgggaacacccagacatgagaaactatgctaagcggaaaggttggtgggatggtaaaaaggagtttgattttgctgcagcatattcctatcttgacacagccaagatgatgacttcatcaggcagatactgtgagggctacaagcttctaaataagcacaaaggaaatataacttttgaaacaatgatggaaattcttcgagataaaccaagtggcattaatatggagggagaattcctgaccactgcaagcatggtttctattttacctcaagactccagccttccttgcattcacttctttacagggactcctgatcctgagagatctgtttttaagcctttcatatttgtgccacatatttcacaactattggataccagttcaccaacatttgaacttgaagatctagttaaaaagaaatcacattttaagcctgacagaagacacccactctaccaaaaacatcaacaggcattggaagtagtaaataataatgaggaaaaagccaaaataatgttggacaacatgaggaaactggagaaagaactattcagagagatggaatcaatccttcaaaacaagcatcttgatgtggagaaaattgttaatctctttcctcagtgtacaaaagatgaaattcaaatttatcatcaaagttagttcttagtgatcatatggtcagctaatattagttcttagtgatcagtggtcagtaatcttcaaagtcagaatctatcaccttggtaaattatataaacctaacttgagcagatctgattattcttggatagtattcaagtggtatcttgactattaaactacgtatagtgttgctgaaatagaaagaaaacagcattggaattggattcatgtatcgtgggatacaggtgttatttcaggtgatgtacttgcattattttctttagccatagtaactttttgtcacaataactaagtattcaattatatataaagagtgaaacattaaaatgacgcatggatttatatttattataattatgtagtaccctcaaatcattttgtcagttacatcaagaaagcagatttttctttagtcatgaaaaatatctcaagtggtaagttgtttgtgctttaggcaaacattaaccagctctaacaagaaaaatgtctagatttacacattgtcaatacagtatattagttctgcaaatgcacttttgttaaactcaaacatgctctttgtcaagacttggctaaccagtgagcttgtagctctgattatctagcatttttagggtcattctccttaataggcttttatgttaataagatatatttttagaagagcttgtttgggagattagagaataagataaaagaaccaaaaccttaggatatactgtttctgggtctgaaatctctctcattgtttacttctgttcactcagtgaaaacagaaacaagaatgaggtagtggcaatgaaatagaattattagtatattatgaacattataacattttgaacactataatgcattatatattatgaacttttatgaactttatacatgagtaatagcttcctaaagtttataaaacattgtttaggttacataaagattaccaagtaagactcaaaattgcaaatataaacaaaagaaaaatccaactgaaaataacactaagtatttttgagttcctagaatgtccattttggtatttggttacattatcatatttactagtcactatcagcacaattaggttaataaagaagtgggtcattatattcaaagagtgctcaggaagttatgtgttcaaagttctctcataaataccatcgtctgcctgatactgctcttgtctaatagagggttgacattacaaaagaaaagatgtctgactcaagaactcagttgattctgtttgccttaagtttggttcagtgataggctgtcttctaacccctatactcctcttctctcctttaatagatgaggaaactaagggcaaacagttcgttacacttacgggaatcttatttccctctctaggggcagcatgttttcaccttctcctttgctgccaccttggcctaaactagcaccgtcttttagctagaccattgcgttaactgttctcctacacccatttttgttctttatttccacccacatgagtcactgcagccaatctattacaaatttaaatctgattatgaattcccctcctaaaactcttttttaaaagagactttattttttggagcagttttaggttcacagcaaaattgaacagaaagtacagagttccaatacagcccctatcagcatacatgcatagcctcccccactatcaacatcccagcaccagaatggtacatttgttagaatcaatggccctacattgacacattatcacccaaaggccatggttcaagttagagatcactcttgatgtagtacatcctatgggctttgataattataaaatgacatgtatccaccattatagtattatacagagtagtttcactgccctaaaaatcttctgtgttctgcctatttatcccaccctccctccaacccctggcaaccactgatctttttactgtctccatagttttgccttttccatatgtcatatcattggaatcatacagtatgtgacctcttaagattgtcttctttaacttacttagtaatatccatttaaggttcctgcatgtcttttcatgacttgatagctcatttcttttagtgctaagtaatattcgattgtctgaatatactactactgaaggacatcttggttgcttccaagttttgaaaat

SEQ ID NO: 321773 - DNA, 2761 bp, Homo sapiens
actcggaaagggaactccctgaccccttgcgcttcccaggtgaggcaatgcctcgccctgcttcggctcgcgcacggtgcgcgctcccactggcctgcgcccactgtctggcactccctagtgagatgaacccggtacctcagatggaaatgcagaaatcacccctcttctgcgtcgctcacgctgggagctgtagaccagagctgttcctattcggccatcttggctcctccagaataaacctattttttgagatctgtttttaagcctttcatatttgtgccacatatttcacaactattggataccagttcaccaacatttgaacttgaagatctagttaaaaagaaatcacattttaagcctgacagaagacacccactctaccaaaaacatcaacaggcattggaagtagtaaataataatgaggaaaaagccaaaataatgttggacaacatgaggaaactggagaaagaactattcagagagatggaatcaatccttcaaaacaagcatcttgatgtggagaaaattgttaatctctttcctcagtgtacaaaagatgaaattcaaatttatcagtcaaatttatcagtcaaagttagttcttagtgatcatatggtcagctaatattagttcttagtgatcagtggtcagtaatcttcaaagtcagaatctatcaccttggtaaattatataaacctaacttgagcagatctgattattcttggatagtattcaagtggtatcttgactattaaactacgtatagtgttgctgaaatagaaagaaaacagcattggaattggattcatgtatcgtgggatacaggtgttatttcaggtgatgtacttgcattattttctttagccatagtaactttttgtcacaataactaagtattcaattatatataaagagtgaaacattaaaatgacgcatggatttatatttattataattatgtagtaccctcaaatcattttgtcagttacatcaagaaagcagatttttctttagtcatgaaaaatatctcaagtggtaagttgtttgtgctttaggcaaacattaaccagctctaacaagaaaaatgtctagatttacacattgtcaatacagtatattagttctgcaaatgcacttttgttaaactcaaacatgctctttgtcaagacttggctaaccagtgagcttgtagctctgattatctagcatttttagggtcattctccttaataggcttttatgttaataagatatatttttagaagagcttgtttgggagattagagaataagataaaagaaccaaaaccttaggatatactgtttctgggtctgaaatctctctcattgtttacttctgttcactcagtgaaaacagaaacaagaatgaggtagtggcaatgaaatagaattattagtatattatgaacattataacattttgaacactataatgcattatatattatgaacttttatgaactttatacatgagtaatagcttcctaaagtttataaaacattgtttaggttacataaagattaccaagtaagactcaaaattgcaaatataaacaaaagaaaaatccaactgaaaataacactaagtatttttgagttcctagaatgtccattttggtatttggttacattatcatatttactagtcactatcagcacaattaggttaataaagaagtgggtcattatattcaaagagtgctcaggaagttatgtgttcaaagttctctcataaataccatcgtctgcctgatactgctcttgtctaatagagggttgacattacaaaagaaaagatgtctgactcaagaactcagttgattctgtttgccttaagtttggttcagtgataggctgtcttctaacccctatactcctcttctctcctttaatagatgaggaaactaagggcaaacagttcgttacacttacgggaatcttatttccctctctaggggcagcatgttttcaccttctcctttgctgccaccttggcctaaactagcaccgtcttttagctagaccattgcgttaactgttctcctacacccatttttgttctttatttccacccacatgagtcactgcagccaatctattacaaatttaaatctgattatgaattcccctcctaaaactcttttttaaaagagactttattttttggagcagttttaggttcacagcaaaattgaacagaaagtacagagttccaatacagcccctatcagcatacatgcatagcctcccccactatcaacatcccagcaccagaatggtacatttgttagaatcaatggccctacattgacacattatcacccaaaggccatggttcaagttagagatcactcttgatgtagtacatcctatgggctttgataattataaaatgacatgtatccaccattatagtattatacagagtagtttcactgccctaaaaatcttctgtgttctgcctatttatcccaccctccctccaacccctggcaaccactgatctttttactgtctccatagttttgccttttccatatgtcatatcattggaatcatacagtatgtgacctcttaagattgtcttctttaacttacttagtaatatccatttaaggttcctgcatgtcttttcatgacttgatagctcatttcttttagtgctaagtaatattcgattgtctgaatatactactactgaaggacatcttggttgcttccaagttttgaaaat

SEQ ID NO: 321774 - DNA, 2782 bp, Homo sapiens
ggcaatggcgggtgcccgtcccccagcctcgctgccgccttgcagtttgatctcagaccgctgtgctagcaatcagcgagattccgtgggcgtaggaccctccgagccaggtgaaatataacttttgaaacaatgatggaaattcttcgagataaaccaagtggcattaatatggagggagaattcctgaccactgcaagcatggtttctattttacctcaagactccagccttccttgcattcacttctttacagggactcctgatcctgagagatctgtttttaagcctttcatatttgtgccacatatttcacaactattggataccagttcaccaacatttgaacttgaagatctagttaaaaagaaatcacattttaagcctgacagaagacacccactctaccaaaaacatcaacaggcattggaagtagtaaataataatgaggaaaaagccaaaataatgttggacaacatgaggaaactggagaaagaactattcagagagatggaatcaatccttcaaaacaagcatcttgatgtggagaaaattgttaatctctttcctcagtgtacaaaagatgaaattcaaatttatcagtcaaatttatcagtcaaagttagttcttagtgatcatatggtcagctaatattagttcttagtgatcagtggtcagtaatcttcaaagtcagaatctatcaccttggtaaattatataaacctaacttgagcagatctgattattcttggatagtattcaagtggtatcttgactattaaactacgtatagtgttgctgaaatagaaagaaaacagcattggaattggattcatgtatcgtgggatacaggtgttatttcaggtgatgtacttgcattattttctttagccatagtaactttttgtcacaataactaagtattcaattatatataaagagtgaaacattaaaatgacgcatggatttatatttattataattatgtagtaccctcaaatcattttgtcagttacatcaagaaagcagatttttctttagtcatgaaaaatatctcaagtggtaagttgtttgtgctttaggcaaacattaaccagctctaacaagaaaaatgtctagatttacacattgtcaatacagtatattagttctgcaaatgcacttttgttaaactcaaacatgctctttgtcaagacttggctaaccagtgagcttgtagctctgattatctagcatttttagggtcattctccttaataggcttttatgttaataagatatatttttagaagagcttgtttgggagattagagaataagataaaagaaccaaaaccttaggatatactgtttctgggtctgaaatctctctcattgtttacttctgttcactcagtgaaaacagaaacaagaatgaggtagtggcaatgaaatagaattattagtatattatgaacattataacattttgaacactataatgcattatatattatgaacttttatgaactttatacatgagtaatagcttcctaaagtttataaaacattgtttaggttacataaagattaccaagtaagactcaaaattgcaaatataaacaaaagaaaaatccaactgaaaataacactaagtatttttgagttcctagaatgtccattttggtatttggttacattatcatatttactagtcactatcagcacaattaggttaataaagaagtgggtcattatattcaaagagtgctcaggaagttatgtgttcaaagttctctcataaataccatcgtctgcctgatactgctcttgtctaatagagggttgacattacaaaagaaaagatgtctgactcaagaactcagttgattctgtttgccttaagtttggttcagtgataggctgtcttctaacccctatactcctcttctctcctttaatagatgaggaaactaagggcaaacagttcgttacacttacgggaatcttatttccctctctaggggcagcatgttttcaccttctcctttgctgccaccttggcctaaactagcaccgtcttttagctagaccattgcgttaactgttctcctacacccatttttgttctttatttccacccacatgagtcactgcagccaatctattacaaatttaaatctgattatgaattcccctcctaaaactcttttttaaaagagactttattttttggagcagttttaggttcacagcaaaattgaacagaaagtacagagttccaatacagcccctatcagcatacatgcatagcctcccccactatcaacatcccagcaccagaatggtacatttgttagaatcaatggccctacattgacacattatcacccaaaggccatggttcaagttagagatcactcttgatgtagtacatcctatgggctttgataattataaaatgacatgtatccaccattatagtattatacagagtagtttcactgccctaaaaatcttctgtgttctgcctatttatcccaccctccctccaacccctggcaaccactgatctttttactgtctccatagttttgccttttccatatgtcatatcattggaatcatacagtatgtgacctcttaagattgtcttctttaacttacttagtaatatccatttaaggttcctgcatgtcttttcatgacttgatagctcatttcttttagtgctaagtaatattcgattgtctgaatatactactactgaaggacatcttggttgcttccaagttttgaaaat

SEQ ID NO: 321775 - DNA, 2925 bp, Homo sapiens
aaaaaacaaaaaacgaataagcctttatgagaaattttctctcctaccaaataataacaataacagctttcatgtgagtatctactatgttctatgcactgtgcaaaacactttacgtgttgccttattaagttctcataacagcccatcaaatagtgtcttatttttctgatgaggcagaaggcataggtaagagagagattaaatagtctgccaaagttatatagtgatagaactaactataaaacacaaatagaaggagatccaggacataagagttgaaatacagaaagaaaataacagaagccatcaagacatcagacttctcgtcactgaggagaagaggaaaacccttaagagtttcagtctgaagtttttatttagtcattttcttttctttttaaggaaacatttattatatttaaattttgtttttaagttgctagcatctgcctgtgtaaagccattttaaggttttgccattattaaaggaaagaaggaaactctgtaaaacaatgtgtctgttctggcagcaaaataaggacctttaggtgttctattataagtgaagatctaagattttccaagttacaactgaagaggtaatctagatattaaagtatataattgcgatttataaattaaatatgtgaactttctcctagaaatatcagcaatttggaattatattgacatatttttgtctgaatcaatgagtctgtttcaaaatttcagtctcatcagaattataatgtgtattatttcccagctcaaataagaccccttcttccttcctttgaggaagtactgggcacgtaagatttttttccataagacaagttccagcaaagagaatataaagattagtaagacatactcccagccctcaaggatctcattgtccagtaaagggatttatatatacacgaatgtaatggaatctagcctttacaacaatagagctaggtacacggattcccaaatatggaaatggtgaaacgaaattcagggaagactttaggagagaaaggtcttagagaataaatgtgaactatacagtagaagaaggtagttctcattgccattttcttactgagttgtagtaccagattgagtcccaagtcatattcttactgatttttaggctgtagtatacaaaatttaaaactttaatgaacagccaagcacggtcactcatgcctgtaatcccagggctttgggaggcagaagggggaggatctcctgagcccaggagttccaggctgcagtaagccctgatcatacaactgcactccagcctgggtgaaagagctagaccttgtctccaaaaaataaaaataaaaaaatcaaagctttaatgaacatccttaattagatatggcaataatatcctttggtcattgagtaaaactctttatttttatatacttaaaagtgttctttttattttaaaacatctgtataatttttagttaaaaaaaatggaacctttttcctgtgacactttcgtggcattacctccagcaacagtcgataacaggattatttttggaaaaaattcagatagactctatgatgaagtacaagaggtggtttattttcctgctgtagttcatgataacctgggagaacgtcttaagtgtacatatatagaaattgatcaagttcctgaaacatatgctgttgtcctgagtcgcccagcgtggttgtggggggcagaaatgggagccaatgagcatggagtttgcattgggaatgaagctgtatggggaagagaagaagtttgtgatgaagaagcactattaggaatggaccttgtcagacttggccttgaaagagctgatacagctgaaaaagccctcaatgtcattgttgacttactagaaaaatatggccagggtggaaattgcacagagggtagaatggtatttagctatcacaacagtttcctgatagctgataggaatgaagcctggattctggagactgcagggaagtactgggcagcagaaaaagtacaagagggagttcgtaatatttctaatcaactttccataacaaccaagattgcccgggaacacccagacatgagaaactatgctaagcggaaaggttggtgggatggtaaaaaggagtttgattttgctgcagcatattcctatcttgacacagccaagatgatgacttcatcaggcagatactgtgagggctacaagcttctaaataagcacaaaggaaatataacttttgaaacaatgatggaaattcttcgagataaaccaagtggcattaatatggagggagaattcctgaccactgcaagcatggtttctattttacctcaagactccagccttccttgcattcacttctttacagggactcctgatcctgagagatctgtttttaagcctttcatatttgtgccacatatttcacaactattggataccagttcaccaacatttgaacttgaagatctagttaaaaagaaatcacattttaagcctgacagaagacacccactctaccaaaaacatcaacaggcattggaagtagtaaataataatgagacgccaaattccagcgaaacagctgatgccagccagcttgaagacccctgccacagaagaagggaatcagcatgagaatacagcttcttcatctcgctgtcccatgacttcgccctgtactcttcagccaattaatgatctccacacttgggaccactctaaaacccttaagaacctgagactcaaagtcctcctggagacgaatttgaggtttcctcctatctgtgtttggtggccctatgattaaacctctttctcttctgcaacctggtgtcccagtgtattaacttgccatgggcatcagacaacaaacctatatatagtatcccaaatatggtgctccactttgaaa

SEQ ID NO: 321776 - DNA, 2731 bp, Homo sapiens
  misc_feature (2688)..(2688): n is a, c, g, or t
  misc_feature (2697)..(2697): n is a, c, g, or t
  misc_feature (2699)..(2699): n is a, c, g, or t
aaaaaacaaaaaacgaataagcctttatgagaaattttctctcctaccaaataataacaataacagctttcatgtgagtatctactatgttctatgcactgtgcaaaacactttacgtgttgccttattaagttctcataacagcccatcaaatagtgtcttatttttctgatgaggcagaaggcataggtaagagagagattaaatagtctgccaaagttatatagtgatagaactaactataaaacacaaatagaaggagatccaggacataagagttgaaatacagaaagaaaataacagaagccatcaagacatcagacttctcgtcactgaggagaagaggaaaacccttaagagtttcagtctgaagtttttatttagtcattttcttttctttttaaggaaacatttattatatttaaattttgtttttaagttgctagcatctgcctgtgtaaagccattttaaggttttgccattattaaaggaaagaaggaaactctgtaaaacaatgtgtctgttctggcagcaaaataaggacctttaggtgttctattataagtgaagatctaagattttccaagttacaactgaagaggtaatctagatattaaagtatataattgcgatttataaattaaatatgtgaactttctcctagaaatatcagcaatttggaattatattgacatatttttgtctgaatcaatgagtctgtttcaaaatttcagtctcatcagaattataatgtgtattatttcccagctcaaataagaccccttcttccttcctttgaggaagtactgggcacgtaagatttttttccataagacaagttccagcaaagagaatataaagattagtaagacatactcccagccctcaaggatctcattgtccagtaaagggatttatatatacacgaatgtaatggaatctagcctttacaacaatagagctaggtacacggattcccaaatatggaaatggtgaaacgaaattcagggaagactttaggagagaaaggtcttagagaataaatgtgaactatacagtagaagaaggtagttctcattgccattttcttactgagttgtagtaccagattgagtcccaagtcatattcttactgatttttaggctgtagtatacaaaatttaaaactttaatgaacagccaagcacggtcactcatgcctgtaatcccagggctttgggaggcagaagggggaggatctcctgagcccaggagttccaggctgcagtaagccctgatcatacaactgcactccagcctgggtgaaagagctagaccttgtctccaaaaaataaaaataaaaaaatcaaagctttaatgaacatccttaattagatatggcaataatatcctttggtcattgagtaaaactctttatttttatatacttaaaagtgttctttttattttaaaacatctgtataatttttagttaaaaaaaatggaacctttttcctgtgacactttcgtggcattacctccagcaacagtcgataacaggattatttttggaaaaaattcagatagactctatgatgaagtacaagaggtggtttattttcctgctgtagttcatgataacctgggagaacgtcttaagtgtacatatatagaaattgatcaagttcctgaaacatatgctgttgtcctgagtcgcccagcgtggttgtggggggcagaaatgggagccaatgagcatggagtttgcattgggaatgaagctgtatggggaagagaagaagtttgtgatgaagaagcactattaggaatggaccttgtcagacttggccttgaaagagctgatacagctgaaaaagccctcaatgtcattgttgacttactagaaaaatatggccagggtggaaattgcacagagggtagaatggtatttagctatcacaacagtttcctgatagctgataggaatgaagcctggattctggagactgcagggaagtactgggcagcagaaaaagtacaagagggagttcgtaatatttctaatcaactttccataacaaccaagattgcccgggaacacccagacatgagaaactatgctaagcggaaaggttggtgggatggtaaaaaggagtttgattttgctgcagcatattcctatcttgacacagccaagatgatgacttcatcaggcagatactgtgagggctacaagcttctaaataagcacaaaggaaatataacttttgaaacaatgatggaaattcttcgagataaaccaagtggcattaatatggagggagaattcctgaccactgcaagcatggtttctattttacctcaagactccagccttccttgcattcacttctttacagggactcctgatcctgagagatctgtttttaagcctttcatatttgtgccacatatttcacaactattggataccagttcaccaacatttgaacttgaagatctagttaaaaagaaatcacattttaagcctgacagaagacacccactctaccaaaaacatcaacaggcattggaagtagtaaataataatgaggaaaaagccaaaataatgttggacaacatgaggaaactggagacggacccccccccccccccctaccccccgccccgcccccccccgccccaaagttggcaatttctttcctcanccccccccnanaactccccccccccccccctcagtagaattag

SEQ ID NO: 321777 - DNA, 2498 bp, Homo sapiens
aaaaaacaaaaaacgaataagcctttatgagaaattttctctcctaccaaataataacaataacagctttcatgtgagtatctactatgttctatgcactgtgcaaaacactttacgtgttgccttattaagttctcataacagcccatcaaatagtgtcttatttttctgatgaggcagaaggcataggtaagagagagattaaatagtctgccaaagttatatagtgatagaactaactataaaacacaaatagaaggagatccaggacataagagttgaaatacagaaagaaaataacagaagccatcaagacatcagacttctcgtcactgaggagaagaggaaaacccttaagagtttcagtctgaagtttttatttagtcattttcttttctttttaaggaaacatttattatatttaaattttgtttttaagttgctagcatctgcctgtgtaaagccattttaaggttttgccattattaaaggaaagaaggaaactctgtaaaacaatgtgtctgttctggcagcaaaataaggacctttaggtgttctattataagtgaagatctaagattttccaagttacaactgaagaggtaatctagatattaaagtatataattgcgatttataaattaaatatgtgaactttctcctagaaatatcagcaatttggaattatattgacatatttttgtctgaatcaatgagtctgtttcaaaatttcagtctcatcagaattataatgtgtattatttcccagctcaaataagaccccttcttccttcctttgaggaagtactgggcacgtaagatttttttccataagacaagttccagcaaagagaatataaagattagtaagacatactcccagccctcaaggatctcattgtccagtaaagggatttatatatacacgaatgtaatggaatctagcctttacaacaatagagctaggtacacggattcccaaatatggaaatggtgaaacgaaattcagggaagactttaggagagaaaggtcttagagaataaatgtgaactatacagtagaagaaggtagttctcattgccattttcttactgagttgtagtaccagattgagtcccaagtcatattcttactgatttttaggctgtagtatacaaaatttaaaactttaatgaacagccaagcacggtcactcatgcctgtaatcccagggctttgggaggcagaagggggaggatctcctgagcccaggagttccaggctgcagtaagccctgatcatacaactgcactccagcctgggtgaaagagctagaccttgtctccaaaaaataaaaataaaaaaatcaaagctttaatgaacatccttaattagatatggcaataatatcctttggtcattgagtaaaactctttatttttatatacttaaaagtgttctttttattttaaaacatctgtataatttttagttaaaaaaaatggaacctttttcctgtgacactttcgtggcattacctccagcaacagtcgataacaggattatttttggaaaaaattcagatagactctatgatgaagtacaagaggtggtttattttcctgctgtagttcatgataacctgggagaacgtcttaagtgtacatatatagaaattgatcaagttcctgaaacatatgctgttgtcctgagtcgcccagcgtggttgtggggggcagaaatgggagccaatgagcatggagtttgcattgggaatgaagctgtatggggaagagaagaagtttgtgatgaagaagcactattaggaatggaccttgtcagacttggccttgaaagagctgatacagctgaaaaagccctcaatgtcattgttgacttactagaaaaatatggccagggtggaaattgcacagagggtagaatggtatttagctatcacaacagtttcctgatagctgataggaatgaagcctggattctggagactgcagggaagtactgggcagcagaaaaagtacaagagggagttcgtaatatttctaatcaactttccataacaaccaagattgcccgggaacacccagacatgagaaactatgctaagcggaaaggttggtgggatggtaaaaaggagtttgattttgctgcagcatattcctatcttgacacagccaagatgatgacttcatcaggcagatactgtgagggctacaagcttctaaataagcacaaagacgccaaattccagcgaaacagctgatgccagccagcttgaagacccctgccacagaagaagggaatcagcatgagaatacagcttcttcatctcgctgtcccatgacttcgccctgtactcttcagccaattaatgatctccacacttgggaccactctaaaacccttaagaacctgagactcaaagtcctcctggagacgaatttgaggtttcctcctatctgtgtttggtggccctatgattaaacctctttctcttctg

SEQ ID NO: 321778 - DNA, 2301 bp, Homo sapiens
gtgacagcttccggcaactgatgcctccactggccactcctccctccgtccacctgtcacttcgggtagctgggaggccagtgtacatatatagaaattgatcaagttcctgaaacatatgctgttgtcctgagtcgcccagcgtggttgtggggggcagaaatgggagccaatgagcatggagtttgcattgggaatgaagctgtatggggaagagaagaagtttgtgatgaagaagcactattaggaatggaccttgtcagacttggccttgaaagagctgatacagctgaaaaagccctcaatgtcattgttgacttactagaaaaatatggccagggtggaaattgcacagagggtagaatggtatttagctatcacaacagtttcctgatagctgataggaatgaagcctggattctggagactgcagggaagtactgggcagcagaaaaagtacaagagggagttcgtaatatttctaatcaactttccataacaaccaagattgcccgggaacacccagacatgagaaactatgctaagcggaaaggttggtgggatggtaaaaaggagtttgattttgctgcagcatattcctatcttgacacagccaagatgatgacttcatcaggcagatactgtgagggctacaagcttctaaataagcacaaaggaaatataacttttgaaacaatgatggaaattcttcgagataaaccaagtggcattaatatggagggagaattcctgaccactgcaagcatggtttctattttacctcaagactccagccttccttgcattcacttctttacagggactcctgatcctgagagatctgtttttaagcctttcatatttgtgccacatatttcacaactattggataccagttcaccaacatttgaacttgaagatctagttaaaaagaaatcacattttaagcctgacagaagacacccactctaccaaaaacatcaacaggcattggaagtagtaaataataatgaggaaaaagccaaaataatgttggacaacatgaggaaactggagaaagaactattcagagagatggaatcaatccttcaaaacaagcatcttgatgtggagaaaattgttaatctctttcctcagtgtacaaaagatgaaattcaaatttatcagtcaaatttatcagtcaaagttagttcttagtgatcatatggtcagctaatattagttcttagtgatcagtggtcagtaatcttcaaagtcagaatctatcaccttggtaaattatataaacctaacttgagcagatctgattattcttggatagtattcaagtggtatcttgactattaaactacgtatagtgttgctgaaatagaaagaaaacagcattggaattggattcatgtatcgtgggatacaggtgttatttcaggtgatgtacttgcattattttctttagccatagtaactttttgtcacaataactaagtattcaattatatataaagagtgaaacattaaaatgacgcatggatttatatttattataattatgtagtaccctcaaatcattttgtcagttacatcaagaaagcagatttttctttagtcatgaaaaatatctcaagtggtaagttgtttgtgctttaggcaaacattaaccagctctaacaagaaaaatgtctagatttacacattgtcaatacagtatattagttctgcaaatgcacttttgttaaactcaaacatgctctttgtcaagacttggctaaccagtgagcttgtagctctgattatctagcatttttagggtcattctccttaataggcttttatgttaataagatatatttttagaagagcttgtttgggagattagagaataagataaaagaaccaaaaccttaggatatactgtttctgggtctgaaatctctctcattgtttacttctgttcactcagtgaaaacagaaacaagaatgaggtagtggcaatgaaatagaattattagtatattatgaacattataacattttgaacactataatgcattatatattatgaacttttatgaactttatacatgagtaatagcttcctaaagtttataaaacattgtttaggttacataaagattaccaagtaagactcaaaattgcaaatataaacaaaagaaaaatccaactgaaaataacactaagtatttttgagttcctagaatgtccattttggtatttggttacattatcatatttactagtcactatcagcacaattaggttaataaagaagtgggtcattat

SEQ ID NO: 321779 - DNA, 2865 bp, Homo sapiens
ggcaatggcgggtgcccgtcccccagcctcgctgccgccttgcagtttgatctcagaccgctgtgctagcaatcagcgagattccgtgggcgtaggaccctccgagccaggtgtgggatatagtctcgtggtgcgccgttttttaagccggtctgaaaagcgcaatattcgggtgggagtgacccgattttccaggaaatataacttttgaaacaatgatggaaattcttcgagataaaccaagtggcattaatatggagggagaattcctgaccactgcaagcatggtttctattttacctcaagactccagccttccttgcattcacttctttacagggactcctgatcctgagagatctgtttttaagcctttcatatttgtgccacatatttcacaactattggataccagttcaccaacatttgaacttgaagatctagttaaaaagaaatcacattttaagcctgacagaagacacccactctaccaaaaacatcaacaggcattggaagtagtaaataataatgaggaaaaagccaaaataatgttggacaacatgaggaaactggagaaagaactattcagagagatggaatcaatccttcaaaacaagcatcttgatgtggagaaaattgttaatctctttcctcagtgtacaaaagatgaaattcaaatttatcagtcaaatttatcagtcaaagttagttcttagtgatcatatggtcagctaatattagttcttagtgatcagtggtcagtaatcttcaaagtcagaatctatcaccttggtaaattatataaacctaacttgagcagatctgattattcttggatagtattcaagtggtatcttgactattaaactacgtatagtgttgctgaaatagaaagaaaacagcattggaattggattcatgtatcgtgggatacaggtgttatttcaggtgatgtacttgcattattttctttagccatagtaactttttgtcacaataactaagtattcaattatatataaagagtgaaacattaaaatgacgcatggatttatatttattataattatgtagtaccctcaaatcattttgtcagttacatcaagaaagcagatttttctttagtcatgaaaaatatctcaagtggtaagttgtttgtgctttaggcaaacattaaccagctctaacaagaaaaatgtctagatttacacattgtcaatacagtatattagttctgcaaatgcacttttgttaaactcaaacatgctctttgtcaagacttggctaaccagtgagcttgtagctctgattatctagcatttttagggtcattctccttaataggcttttatgttaataagatatatttttagaagagcttgtttgggagattagagaataagataaaagaaccaaaaccttaggatatactgtttctgggtctgaaatctctctcattgtttacttctgttcactcagtgaaaacagaaacaagaatgaggtagtggcaatgaaatagaattattagtatattatgaacattataacattttgaacactataatgcattatatattatgaacttttatgaactttatacatgagtaatagcttcctaaagtttataaaacattgtttaggttacataaagattaccaagtaagactcaaaattgcaaatataaacaaaagaaaaatccaactgaaaataacactaagtatttttgagttcctagaatgtccattttggtatttggttacattatcatatttactagtcactatcagcacaattaggttaataaagaagtgggtcattatattcaaagagtgctcaggaagttatgtgttcaaagttctctcataaataccatcgtctgcctgatactgctcttgtctaatagagggttgacattacaaaagaaaagatgtctgactcaagaactcagttgattctgtttgccttaagtttggttcagtgataggctgtcttctaacccctatactcctcttctctcctttaatagatgaggaaactaagggcaaacagttcgttacacttacgggaatcttatttccctctctaggggcagcatgttttcaccttctcctttgctgccaccttggcctaaactagcaccgtcttttagctagaccattgcgttaactgttctcctacacccatttttgttctttatttccacccacatgagtcactgcagccaatctattacaaatttaaatctgattatgaattcccctcctaaaactcttttttaaaagagactttattttttggagcagttttaggttcacagcaaaattgaacagaaagtacagagttccaatacagcccctatcagcatacatgcatagcctcccccactatcaacatcccagcaccagaatggtacatttgttagaatcaatggccctacattgacacattatcacccaaaggccatggttcaagttagagatcactcttgatgtagtacatcctatgggctttgataattataaaatgacatgtatccaccattatagtattatacagagtagtttcactgccctaaaaatcttctgtgttctgcctatttatcccaccctccctccaacccctggcaaccactgatctttttactgtctccatagttttgccttttccatatgtcatatcattggaatcatacagtatgtgacctcttaagattgtcttctttaacttacttagtaatatccatttaaggttcctgcatgtcttttcatgacttgatagctcatttcttttagtgctaagtaatattcgattgtctgaatatactactactgaaggacatcttggttgcttccaagttttgaaaat

SEQ ID NO: 321780 - DNA, 3131 bp, Homo sapiens
cggtggtacgtgggaagtgtgctgcaatcatgagcataggagctgggcaccccatgtcgtgcaggtgcgcttttcatgcatggcttgaaagctgtggttgttatccctgcagagaaggtatatggcctgggggagttttgagttctgtgctcagatggcctggaacttagggtcgttgctgctagtagaaagctgtgggtgtgagatctgccttgccaagtgtgtgggagctgggtgggacttaccactgcctgctactccacatttcctgcagtacttttctgttcaacagaggcagctatgctcctctttggaacattaccccagggtccagagaactgtctcctgactcccacaggggctgctgcttgctctgcacatggagagtcagaccaaagacctgcctaactcagcccccacctggctttgcccctctacctgcctggtatcttaacacaaaggaaatataacttttgaaacaatgatggaaattcttcgagataaaccaagtggcattaatatggagggagaattcctgaccactgcaagcatggtttctattttacctcaagactccagccttccttgcattcacttctttacagggactcctgatcctgagagatctgtttttaagcctttcatatttgtgccacatatttcacaactattggataccagttcaccaacatttgaacttgaagatctagttaaaaagaaatcacattttaagcctgacagaagacacccactctaccaaaaacatcaacaggcattggaagtagtaaataataatgaggaaaaagccaaaataatgttggacaacatgaggaaactggagaaagaactattcagagagatggaatcaatccttcaaaacaagcatcttgatgtggagaaaattgttaatctctttcctcagtgtacaaaagatgaaattcaaatttatcagtcaaatttatcagtcaaagttagttcttagtgatcatatggtcagctaatattagttcttagtgatcagtggtcagtaatcttcaaagtcagaatctatcaccttggtaaattatataaacctaacttgagcagatctgattattcttggatagtattcaagtggtatcttgactattaaactacgtatagtgttgctgaaatagaaagaaaacagcattggaattggattcatgtatcgtgggatacaggtgttatttcaggtgatgtacttgcattattttctttagccatagtaactttttgtcacaataactaagtattcaattatatataaagagtgaaacattaaaatgacgcatggatttatatttattataattatgtagtaccctcaaatcattttgtcagttacatcaagaaagcagatttttctttagtcatgaaaaatatctcaagtggtaagttgtttgtgctttaggcaaacattaaccagctctaacaagaaaaatgtctagatttacacattgtcaatacagtatattagttctgcaaatgcacttttgttaaactcaaacatgctctttgtcaagacttggctaaccagtgagcttgtagctctgattatctagcatttttagggtcattctccttaataggcttttatgttaataagatatatttttagaagagcttgtttgggagattagagaataagataaaagaaccaaaaccttaggatatactgtttctgggtctgaaatctctctcattgtttacttctgttcactcagtgaaaacagaaacaagaatgaggtagtggcaatgaaatagaattattagtatattatgaacattataacattttgaacactataatgcattatatattatgaacttttatgaactttatacatgagtaatagcttcctaaagtttataaaacattgtttaggttacataaagattaccaagtaagactcaaaattgcaaatataaacaaaagaaaaatccaactgaaaataacactaagtatttttgagttcctagaatgtccattttggtatttggttacattatcatatttactagtcactatcagcacaattaggttaataaagaagtgggtcattatattcaaagagtgctcaggaagttatgtgttcaaagttctctcataaataccatcgtctgcctgatactgctcttgtctaatagagggttgacattacaaaagaaaagatgtctgactcaagaactcagttgattctgtttgccttaagtttggttcagtgataggctgtcttctaacccctatactcctcttctctcctttaatagatgaggaaactaagggcaaacagttcgttacacttacgggaatcttatttccctctctaggggcagcatgttttcaccttctcctttgctgccaccttggcctaaactagcaccgtcttttagctagaccattgcgttaactgttctcctacacccatttttgttctttatttccacccacatgagtcactgcagccaatctattacaaatttaaatctgattatgaattcccctcctaaaactcttttttaaaagagactttattttttggagcagttttaggttcacagcaaaattgaacagaaagtacagagttccaatacagcccctatcagcatacatgcatagcctcccccactatcaacatcccagcaccagaatggtacatttgttagaatcaatggccctacattgacacattatcacccaaaggccatggttcaagttagagatcactcttgatgtagtacatcctatgggctttgataattataaaatgacatgtatccaccattatagtattatacagagtagtttcactgccctaaaaatcttctgtgttctgcctatttatcccaccctccctccaacccctggcaaccactgatctttttactgtctccatagttttgccttttccatatgtcatatcattggaatcatacagtatgtgacctcttaagattgtcttctttaacttacttagtaatatccatttaaggttcctgcatgtcttttcatgacttgatagctcatttcttttagtgctaagtaatattcgattgtctgaatatactactactgaaggacatcttggttgcttccaagttttgaaaat

SEQ ID NO: 321781 - DNA, 2294 bp, Homo sapiens
ccgcccgccctcgctccctccactcctctcccctcccctccccggcactgcagcaccagccgtctgcagctccggccgccacttgcgcctctccagcctccgcaggcccaaccgccgccagcaccatggccagcaccatttccgcctacaaggagaagatgaaggagctgtcggtgctgtcgctcatctgctcctgcttctacacacagccgcaccccaataccgtctaccagtacggggacatggaggtgaagcagctggacaagcgggcctcaggccagagcttcgaggtcatcctcaagtccccttctgacctgtccccagagagccctatgctctcctccccacccaagaagaaggacacctccctggaggagctgcaaaagcggctggaggcagccgaggagcggaggaagacgcaggaggcgcaggtgctgaagcagctggcggagcggcgcgagcacgagcgcgaggtgctgcacaaggcgctggaggagaataacaacttcagccgccaggcggaggagaagctcaactacaagatggagctcagcaaggagatccgcgaggcacacctggccgcactgcgcgagcggctgcgcgagaaggagctgcacgcggccgaggtgcgcaggaacaaggagcagcgagaagagatgtcgggctaagggcccgggacgggcggcgcccatcctgcgacagaacacgttcgggttttggttttgtttcgttcacctctgtctagatgcaacttttgttcctcctcccccacccccgcccccagcttcatgcttctcttccgcactcagccgccctgccctgtcctcgtggtgagtcgctgaccacggcttcccctgcaggagccgccgggcgtgagacgcggtccctcggtgcagacaccaggccgggcgcggctgggtcccccgggggccctgtgagagaggtggcggtgaccgtggtaaacccagggcggtggcgtgggatcacgggtccttacgctgggctgtctggtcagcacgtgcaggtcagggcaggtcctctgagccggcgcccctggccagcaggcgaggctacagtacctgctgtctttccagggggaaggggctccccatgagggaggggcgacgggggaggggggtgatggtgcctgggagcctgcgtgtgcagccggtgcttgttgaactggcaggcgggtgggtgggggctgcagctttccttaatgtggttgcacaggggtcctctgagaccacctggcgtgaggtggacaccctgggccttcctggaagcctgcagttgggggcctgccctgagtctgctggggagtgggcattctctgccagggacccatgagcaggctgcatggtctagaggttgtgggcagcatggacagtcccccactcagaagtgcaagagttccaaagagcctctggcccaggcccctccccaccagggctttgcagatgtccttgaaagacccaccctagagccctttggagtgctggcccctcctgtgccctctgccctggtggaagcggcagccacaagtcctcctcagggagccccaagggggattttgtgggaccgctgcccacagatccaggtgttggaagggcagcgggtaaggttcccaagccagccccaacacccttcccacttggcacccagagggggctgtgggtggaggcctgactccaggcctctcctgcccacaccctctgggctgagttccttctttcccttggacgcccagtgctggccttggaggacggtcagctggaggatggcggtgggggaggctgtctttgtaccactgcagcatcccccacttctccacggaagccccatcccaaagctgctgcctggccccttgctgtaaagtgtgaagggggcggctgagttctcttaggacccagagccagggccctcaacttccatcctgcgggaggccttggccgggcactgccagtgtcttccagagtcacacccagggaccacgggaggatcctgacccctgcagggctcaggggtcagcagggacccactgccccatctccctctccccaccaagacagccccagaaggagcagccagctgggatgggaacccaaggctgtccacatctggcttttgtgggactcagaaagggaagcagaactgagggctgggatattcctcatggtggcagcgctcatagcgaaagcctactgtaatatgcacccatctcatccacgtagtaaagtgaacttaaaaattcaatcaaatgaacaattaaataaacacctgtgtgtttaaga

SEQ ID NO: 321782 - DNA, 2242 bp, Homo sapiens
acaaatatgtcagtaggccggcaccgtgtggttaattcagccaccggcctgcgctgtcgttgacagtgccttgggctggccgatcgtcctgacctacaaggagaagatgaaggagctgtcggtgctgtcgctcatctgctcctgcttctacacacagccgcaccccaataccgtctaccagtacggggacatggaggtgaagcagctggacaagcgggcctcaggccagagcttcgaggtcatcctcaagtccccttctgacctgtccccagagagccctatgctctcctccccacccaagaagaaggacacctccctggaggagctgcaaaagcggctggaggcagccgaggagcggaggaagacgcaggaggcgcaggtgctgaagcagctggcggagcggcgcgagcacgagcgcgaggtgctgcacaaggcgctggaggagaataacaacttcagccgccaggcggaggagaagctcaactacaagatggagctcagcaaggagatccgcgaggcacacctggccgcactgcgcgagcggctgcgcgagaaggagctgcacgcggccgaggtgcgcaggaacaaggagcagcgagaagagatgtcgggctaagggcccgggacgggcggcgcccatcctgcgacagaacacgttcgggttttggttttgtttcgttcacctctgtctagatgcaacttttgttcctcctcccccacccccgcccccagcttcatgcttctcttccgcactcagccgccctgccctgtcctcgtggtgagtcgctgaccacggcttcccctgcaggagccgccgggcgtgagacgcggtccctcggtgcagacaccaggccgggcgcggctgggtcccccgggggccctgtgagagaggtggcggtgaccgtggtaaacccagggcggtggcgtgggatcacgggtccttacgctgggctgtctggtcagcacgtgcaggtcagggcaggtcctctgagccggcgcccctggccagcaggcgaggctacagtacctgctgtctttccagggggaaggggctccccatgagggaggggcgacgggggaggggggtgatggtgcctgggagcctgcgtgtgcagccggtgcttgttgaactggcaggcgggtgggtgggggctgcagctttccttaatgtggttgcacaggggtcctctgagaccacctggcgtgaggtggacaccctgggccttcctggaagcctgcagttgggggcctgccctgagtctgctggggagtgggcattctctgccagggacccatgagcaggctgcatggtctagaggttgtgggcagcatggacagtcccccactcagaagtgcaagagttccaaagagcctctggcccaggcccctccccaccagggctttgcagatgtccttgaaagacccaccctagagccctttggagtgctggcccctcctgtgccctctgccctggtggaagcggcagccacaagtcctcctcagggagccccaagggggattttgtgggaccgctgcccacagatccaggtgttggaagggcagcgggtaaggttcccaagccagccccaacacccttcccacttggcacccagagggggctgtgggtggaggcctgactccaggcctctcctgcccacaccctctgggctgagttccttctttcccttggacgcccagtgctggccttggaggacggtcagctggaggatggcggtgggggaggctgtctttgtaccactgcagcatcccccacttctccacggaagccccatcccaaagctgctgcctggccccttgctgtaaagtgtgaagggggcggctgagttctcttaggacccagagccagggccctcaacttccatcctgcgggaggccttggccgggcactgccagtgtcttccagagtcacacccagggaccacgggaggatcctgacccctgcagggctcaggggtcagcagggacccactgccccatctccctctccccaccaagacagccccagaaggagcagccagctgggatgggaacccaaggctgtccacatctggcttttgtgggactcagaaagggaagcagaactgagggctgggatattcctcatggtggcagcgctcatagcgaaagcctactgtaatatgcacccatctcatccacgtagtaaagtgaacttaaaaattcaatcaaatgaacaattaaataaacacctgtgtgtttaaga

SEQ ID NO: 321783 - DNA, 1870 bp, Homo sapiens
ccgcccgccctcgctccctccactcctctcccctcccctccccggcactgcagcaccagccgtctgcagctccggccgccacttgcgcctctccagcctccgcaggcccaaccgccgccagcaccatggccagcaccatttccgcctacaaggagaagatgaaggagctgtcggtgctgtcgctcatctgctcctgcttctacacacagccgcaccccaataccgtctaccagtacggggacatggaggtgaagcagctggacaagcgggcctcaggccagagcttcgaggtcatcctcaagtccccttctgacctgtccccagagagccctatgctctcctccccacccccgcccccagcttcatgcttctcttccgcactcagccgccctgccctgtcctcgtggtgagtcgctgaccacggcttcccctgcaggagccgccgggcgtgagacgcggtccctcggtgcagacaccaggccgggcgcggctgggtcccccgggggccctgtgagagaggtggcggtgaccgtggtaaacccagggcggtggcgtgggatcacgggtccttacgctgggctgtctggtcagcacgtgcaggtcagggcaggtcctctgagccggcgcccctggccagcaggcgaggctacagtacctgctgtctttccagggggaaggggctccccatgagggaggggcgacgggggaggggggtgatggtgcctgggagcctgcgtgtgcagccggtgcttgttgaactggcaggcgggtgggtgggggctgcagctttccttaatgtggttgcacaggggtcctctgagaccacctggcgtgaggtggacaccctgggccttcctggaagcctgcagttgggggcctgccctgagtctgctggggagtgggcattctctgccagggacccatgagcaggctgcatggtctagaggttgtgggcagcatggacagtcccccactcagaagtgcaagagttccaaagagcctctggcccaggcccctccccaccagggctttgcagatgtccttgaaagacccaccctagagccctttggagtgctggcccctcctgtgccctctgccctggtggaagcggcagccacaagtcctcctcagggagccccaagggggattttgtgggaccgctgcccacagatccaggtgttggaagggcagcgggtaaggttcccaagccagccccaacacccttcccacttggcacccagagggggctgtgggtggaggcctgactccaggcctctcctgcccacaccctctgggctgagttccttctttcccttggacgcccagtgctggccttggaggacggtcagctggaggatggcggtgggggaggctgtctttgtaccactgcagcatcccccacttctccacggaagccccatcccaaagctgctgcctggccccttgctgtaaagtgtgaagggggcggctgagttctcttaggacccagagccagggccctcaacttccatcctgcgggaggccttggccgggcactgccagtgtcttccagagtcacacccagggaccacgggaggatcctgacccctgcagggctcaggggtcagcagggacccactgccccatctccctctccccaccaagacagccccagaaggagcagccagctgggatgggaacccaaggctgtccacatctggcttttgtgggactcagaaagggaagcagaactgagggctgggatattcctcatggtggcagcgctcatagcgaaagcctactgtaatatgcacccatctcatccacgtagtaaagtgaacttaaaaattcaatcaaatgaacaattaaataaacacctgtgtgtttaaga

SEQ ID NO: 321784 - DNA, 415 bp, Homo sapiens
agcaggcaggagaaggatggagaaacaagtcagtgtggaagatgagacagacattaatgccgagagagaggaaaagcggggagaggcagagggcgagagagacagaaggcaggggacacaccacggagacagtgccgacgtctggaagcgagagagctggagagacgaaggggccggcggtgtggagacacacaagagagcgtgctgggcagctccgtgtctcacagagacatgatagaggcagccatggggagggaaaacgggggcccaggtgggcaggccccagtggtgcttgctcagcccagccttgtgcccacagcctacaaggagaagatgaaggagctgtcggtgctgtcgctcatctgctcctgcttctacacacagccgcaccccaataccgtctaccagtacgggg

SEQ ID NO: 321785 - DNA, 2839 bp, Homo sapiens
ccgcccgccctcgctccctccactcctctcccctcccctccccggcactgcagcaccagccgtctgcagctccggccgccacttgcgcctctccagcctccgcaggcccaaccgccgccagcaccatggccagcaccatttccgcctacaaggagaagatgaaggagctgtcggtgctgtcgctcatctgctcctgcttctacacacagccgcaccccaataccgtctaccagtacggggacatggaggtgaagcagctggacaagcgggcctcaggccagagcttcgaggtcatcctcaagtccccttctgacctgtccccagagagccctatgctctcctccccacccaagaagaaggacacctccctggaggagctgcaaaagcggctggaggcagccgaggagcggaggaagacgcaggaggcgcaggtgctgaagcagctggcggagcggcgcgagcacgagcgcgaggtgctgcacaaggcgctggaggagaataacaacttcagccgccaggcggaggagaagctcaactacaagatggagctcagcaaggagatccgcgaggcacacctggccgcactgcgcgagcggctgcgcgagaaggagctgcacgcggccgaggtgcgcaggaacaaggagcagcgagaagagatgtcgggctaagggcccgggacgggcggcgcccatcctgcgacagaacacgttcgggttttggttttgtttcgttcacctctgtctagatgcaacttttgttcctcctcccccacccccgcccccagcttcatgcttctcttccgcactcagccgccctgccctgtcctcgtggtgagtcgctgaccacggcttcccctgcaggagccgccgggcgtgagacgcggtccctcggtgcagacaccaggccgggcgcggctgggtcccccgggggccctgtgagagaggtggcggtgaccgtggtaaacccagggcggtggcgtgggatcacgggtccttacgctgggctgtctggtcagcacgtgcaggtcagggcaggtcctctgagccggcgcccctggccagcaggcgaggctacagtacctgctgtctttccagggggaaggggctccccatgagggaggggcgacgggggaggggggtgatggtgcctgggagcctgcgtgtgcagccggtgcttgttgaactggcaggcgggtgggtgggggctgcagctttccttaatgtggttgcacaggggtcctctgagaccacctggcgtgaggtggacaccctgggccttcctggaagcctgcagttgggggcctgccctgagtctgctggggagtgggcattctctgccagggacccatgagcaggctgcatggtctagaggttgtgggcagcatggacagtcccccactcagaagtgcaagagttccaaagagcctctggcccaggcccctccccaccagggctttgcagatgtccttgaaagacccaccctagagccctttggagtgctggcccctcctgtgccctctgccctggtggaagcggcagccacaagtcctcctcagggagccccaagggggattttgtgggaccgctgcccacagatccaggtgttggaagggcagcgggtaaggttcccaagccagccccaacacccttcccacttggcacccagagggggctgtgggtggaggcctgactccaggcctctcctgcccacaccctctgggctgagttccttctttcccttggacgcccagtgctggccttggaggacggtcagctggaggatggcggtgggggaggctgtctttgtaccactgcagcatcccccacttctccacggaagccccatcccaaagctgctgcctggccccttgctgtaaagtgtgaagggggcggctgagttctcttaggacccagagccagggccctcaacttccatcctgcgggaggccttggccgggcactgccagtgtcttccagagtcacacccagggaccacgggaggatcctgacccctgcagggctcaggggtcagcagggacccactgccccatctccctctccccaccaagacagccccagaaggagcagccagctgggatgggaacccaaggctgtccacatctggcttttgtgggactcagaaagggaagcagaactgagggctgggatattcctcatggtggcagcgctcatagcgaaagcctactgtaatatgcacccatctcatccacgtagtaaagtgaacttaaaaattcaatcaaatgaacaattaaataaacacctgtgtgtttaagaaaaaaaaaaaaaaaaaaaaaacaaaaaaaaaaaaagggggggggggcaaaaattctccccgggggggcccaatttgggcggttcaccgagattttttgtggtgtaacgagagggggggccccatatatagggggggaagccgtattattaaaaagagcctaaggacaggggagacggtggtttttaaacaaaggttccgtggacgggggaaatgagctggctcagctcggggagcaatcttgggggggaaaggggaaacacctctaatttatgcgggggggggggagagccacatctgttgggggcgcaaataattcaccctctacagaggaaagatttttataagcgcgcctccataaggggggcaaatattctttacaacttttcaacaacgcggtcgatacatacgtcggggtgtgttaaaaccaccacgcgcgcgagatatattggcgtagcggcgtgtataagaaaaaggttttcgggcctcacaacggggcggactttatcgttttttctcggaagcacattttttttttccgcagggt

SEQ ID NO: 321786 - DNA, 2126 bp, Homo sapiens
cggagctcggaggggcgcagagcggggccggggactccgaggcgctgagctggggtgggggtcgggggctcctcccgtgtttactgggcgtccccagcagcgcacgaggcaggtccagagtctggtcctggcgggacagtaactagccgcagtaatagatggctaaattcattatattgaaagtgccctgaaggaagctcggctccggtacgagctagaagcggggcccagccagctcccaggaaacccgtccttggtccctggccttgctctgcgcctccccggtgctcccgccccctcaactcagtcagggtcctgccgaaggccagcccggatgaggccgggcgggtgccagggcgccacggcctgcgcgcctgggggttcccggagtcgccccaagccacccccgccctcaggccctcccgccccctgtcctgcaggagctgcacgcggccgaggtgcgcaggaacaaggagcagcgagaagagatgtcgggctaagggcccgggacgggcggcgcccatcctgcgacagaacacgttcgggttttggttttgtttcgttcacctctgtctagatgcaacttttgttcctcctcccccacccccgcccccagcttcatgcttctcttccgcactcagccgccctgccctgtcctcgtggtgagtcgctgaccacggcttcccctgcaggagccgccgggcgtgagacgcggtccctcggtgcagacaccaggccgggcgcggctgggtcccccgggggccctgtgagagaggtggcggtgaccgtggtaaacccagggcggtggcgtgggatcacgggtccttacgctgggctgtctggtcagcacgtgcaggtcagggcaggtcctctgagccggcgcccctggccagcaggcgaggctacagtacctgctgtctttccagggggaaggggctccccatgagggaggggcgacgggggaggggggtgatggtgcctgggagcctgcgtgtgcagccggtgcttgttgaactggcaggcgggtgggtgggggctgcagctttccttaatgtggttgcacaggggtcctctgagaccacctggcgtgaggtggacaccctgggccttcctggaagcctgcagttgggggcctgccctgagtctgctggggagtgggcattctctgccagggacccatgagcaggctgcatggtctagaggttgtgggcagcatggacagtcccccactcagaagtgcaagagttccaaagagcctctggcccaggcccctccccaccagggctttgcagatgtccttgaaagacccaccctagagccctttggagtgctggcccctcctgtgccctctgccctggtggaagcggcagccacaagtcctcctcagggagccccaagggggattttgtgggaccgctgcccacagatccaggtgttggaagggcagcgggtaaggttcccaagccagccccaacacccttcccacttggcacccagagggggctgtgggtggaggcctgactccaggcctctcctgcccacaccctctgggctgagttccttctttcccttggacgcccagtgctggccttggaggacggtcagctggaggatggcggtgggggaggctgtctttgtaccactgcagcatcccccacttctccacggaagccccatcccaaagctgctgcctggccccttgctgtaaagtgtgaagggggcggctgagttctcttaggacccagagccagggccctcaacttccatcctgcgggaggccttggccgggcactgccagtgtcttccagagtcacacccagggaccacgggaggatcctgacccctgcagggctcaggggtcagcagggacccactgccccatctccctctccccaccaagacagccccagaaggagcagccagctgggatgggaacccaaggctgtccacatctggcttttgtgggactcagaaagggaagcagaactgagggctgggatattcctcatggtggcagcgctcatagcgaaagcctactgtaatatgcacccatctcatccacgtagtaaagtgaacttaaaaattcaatcaaatgaacaattaaataaacacctgtgtgtttaaga

SEQ ID NO: 321787 - DNA, 1613 bp, Homo sapiens
tccgcagccaggcgcttgctcctctctctcttcctccctcccttcctccctccctccttcccccgcccccgcagtctctctctctctctctccccgcccccagcttcatgcttctcttccgcactcagccgccctgccctgtcctcgtggtgagtcgctgaccacggcttcccctgcaggagccgccgggcgtgagacgcggtccctcggtgcagacaccaggccgggcgcggctgggtcccccgggggccctgtgagagaggtggcggtgaccgtggtaaacccagggcggtggcgtgggatcacgggtccttacgctgggctgtctggtcagcacgtgcaggtcagggcaggtcctctgagccggcgcccctggccagcaggcgaggctacagtacctgctgtctttccagggggaaggggctccccatgagggaggggcgacgggggaggggggtgatggtgcctgggagcctgcgtgtgcagccggtgcttgttgaactggcaggcgggtgggtgggggctgcagctttccttaatgtggttgcacaggggtcctctgagaccacctggcgtgaggtggacaccctgggccttcctggaagcctgcagttgggggcctgccctgagtctgctggggagtgggcattctctgccagggacccatgagcaggctgcatggtctagaggttgtgggcagcatggacagtcccccactcagaagtgcaagagttccaaagagcctctggcccaggcccctccccaccagggctttgcagatgtccttgaaagacccaccctagagccctttggagtgctggcccctcctgtgccctctgccctggtggaagcggcagccacaagtcctcctcagggagccccaagggggattttgtgggaccgctgcccacagatccaggtgttggaagggcagcgggtaaggttcccaagccagccccaacacccttcccacttggcacccagagggggctgtgggtggaggcctgactccaggcctctcctgcccacaccctctgggctgagttccttctttcccttggacgcccagtgctggccttggaggacggtcagctggaggatggcggtgggggaggctgtctttgtaccactgcagcatcccccacttctccacggaagccccatcccaaagctgctgcctggccccttgctgtaaagtgtgaagggggcggctgagttctcttaggacccagagccagggccctcaacttccatcctgcgggaggccttggccgggcactgccagtgtcttccagagtcacacccagggaccacgggaggatcctgacccctgcagggctcaggggtcagcagggacccactgccccatctccctctccccaccaagacagccccagaaggagcagccagctgggatgggaacccaaggctgtccacatctggcttttgtgggactcagaaagggaagcagaactgagggctgggatattcctcatggtggcagcgctcatagcgaaagcctactgtaatatgcacccatctcatccacgtagtaaagtgaacttaaaaattcaatcaaatgaacaattaaataaacacctgtgtgtttaaga

SEQ ID NO: 321788 - DNA, 269 bp, Homo sapiens
tagtacctgattgtggttttgatttgcattctctaaagacttatgtttagcatcttttcatatgcttgttggccatttccgtaccttctttagagaaatgtctactcaaggcctttacccatttttgaaatgggtggtttgtccttttgtggctgggttgtaggagctcctggcatgttctgagtaccaggctcttgtgagagatgtgatgtgcagatgtcttctcttgttctatgggttgtcgttatttacattcctcataattaatg

SEQ ID NO: 321789 - DNA, 195 bp, Homo sapiens
cccaaaacatgaacatcccctacaaggtaggcagtggtccactgcatttccctctaccttcttatgattcaagaactaatacgatgtgggaaccaagattgtctcttttgggtgaatggctccttgattcccatgcatctccctgattttgttgtgtatgagttatatactggacatgtccatctgaggtcaccg

SEQ ID NO: 321790 - DNA, 1061 bp, Homo sapiens
agcggaggacgcctgcgcgttgtgtcgccgacgttgtgtagtctcccctgggaaaggagggtcaggcgagtccacgtgagggaagcccccgctgtgcgcggagccctctgctgggcggagggggagtgccagcccccaggagctaatccccggctgatggcgcagggcgcggggcttggccgtctagtgtgatgaaggaggcgacccccaaggtgggaaggcgcacgggttggggtttgagggtggatgattggtgacggagggtgtatcttcaggaggaggttcgagtgaagatcaaagacttgaatgaacacattgtttgctgcctatgcgccggctacttcgtggatgccaccaccatcacagagtgtcttcatactttctgcaagagttgtattgtgaagtacctccaaactagcaagtactgccccatgtgcaacattaagatccacgagacacagccactgctcaacctcaaactggaccgggtcatgcaggacatcgtgtataagctggtgcctggcttgcaagacagtgaagagaaacggattcgggaattctaccagtcccgaggtttggaccgggtcacccagcccactggggaagagccagcactgagcaacctcggcctccccttcagcagctttgaccactctaaagcccactactatcgctatgatgagcagttgaacctgtgcctggagcggctgagttctggcaaagacaagaataaaagcgtcctgcagaacaagtatgtccgatgttctgttagagctgaggtacgccatctccggagggtcctgtgtcaccgcttgatgctaaaccctcagcatgtgcagctcctttttgacaatgaagttctccctgatcacatgacaatgaagcagatatggctctcccgctggttcggcaagccatcccctttgcttttacaatacagtgtgaaagagaagaggaggtagggccaagcccccaccccatcccactccccttccctccccagatatttatgtgaaatgaactgcagctttattttttgaaataaaaacttttaaaaagca

SEQ ID NO: 321791 - DNA, 910 bp, Homo sapiens
cggaagtggccggctgggatcagcctttaagatggcgtctcctcaggggggccagattgcgatcgcgatgaggcttcggaaccagctccagtcagtgtacaagatggacccgctacggaacgaggaggaggttcgagtgaagatcaaagacttgaatgaacacattgtttgctgcctatgcgccggctacttcgtggatgccaccaccatcacagagtgtcttcatactttctgcaagagttgtattgtgaagtacctccaaactagcaagtactgccccatgtgcaacattaagatccacgagacacagccactgctcaacctcaaactggaccgggtcatgcaggacatcgtgtataagctggtgcctggcttgcaagacagtgaagagaaacggattcgggaattctaccagtcccgaggtttggaccgggtcacccagcccactggggaagagccagcactgagcaacctcggcctccccttcagcagctttgaccactctaaagcccactactatcgctatgatgagcagttgaacctgtgcctggagcggctgagttctggcaaagacaagaataaaagcgtcctgcagaacaagtatgtccgatgttctgttagagctgaggtacgccatctccggagggtcctgtgtcaccgcttgatgctaaaccctcagcatgtgcagctcctttttgacaatgaagttctccctgatcacatgacaatgaagcagatatggctctcccgctggttcggcaagccatcccctttgcttttacaatacagtgtgaaagagaagaggaggtagggccaagcccccaccccatcccactccccttccctccccagatatttatgtgaaatgaactgcagctttattttttgaaataaaaacttttaaaaagca

SEQ ID NO: 321792 - DNA, 1953 bp, Homo sapiens
gctgcgcctactactaccagacacggcccgccggctgccgctactacttcgtggatgccaccaccatcacagagtgtcttcatacttgtgagtgccttggagactgcctagttcttccagtccctagtcttcaccaagctgactgccagcttctgtgcggcctgcctcacgcatccaggcaccccacccagcccatgaatccagtttccagagggcctgagaatctgcttttcttttcctgcagtctgcaagagttgtattgtgaagtacctccaaactagcaagtactgccccatgtgcaacattaagatccacgagacacagccactgctcaacctcaaactggaccgggtcatgcaggacatcgtgtataagctggtgcctggcttgcaagacagtgagtcaccaacctgactttgagaggcctcttgaggactaattgctgagtggcagcttgaggtgacgggtttggtaggactcacgtaggcagaaggccaaagatgagggaaggacaaaaagtgaggaagggctaatactttattcttttttttctttttttgagacggagtcttgcccaggctggagtgcagtggcgcaatctcagctcactggaagctccacctcctggattcatgccattctcctgcctcagcctcctgagtagctgggactacaggcgcccaccaccatgcccagctaattttttatattttttagtagagacggggtttcaccatgttagccaggatggcctcaatctcctgacttcatgatctgcccacctctgcctcccaaagtgctgggattacaggcgtgagccaccgcgcccggccccgaagggctaatactttattctcatacttcaccttcttctaggtgaagagaaacggattcgggaattctaccagtcccgaggtttggaccgggtcacccagcccactggggaaggtatgtccttggccgcgggacagtaaagaccccagagcattcttcttgcccagttttgctctctggggaaagaggagtatggaatgtgtgccaccagccacctcactaccctatctttctcagagccagcactgagcaacctcggcctccccttcagcagctttgaccactctaaagcccactactatcgctatgatgagcagttgaacctgtgcctggagcggctgaggtgaggagaaggtcaggggttgcaggaggtgacagtgccaatgacccagagccagggagggtctaggggagaggctgagcagtgagtgagtgcctatccccttgaagagagtatatcatggctctgggtggggaagaggaggaaagataggattccctaacctgtgtctatttccccccagttctggcaaagacaagaataaaagcgtcctgcaggtgagaagggctgaggggagggcctctctaaggagactcacctcccatggtccttccctcacacaccttgccctcttccctcccctccctgctcccagaacaagtatgtccgatgttctgttagagctgaggtacgccatctccggagggtcctgtgtcaccgcttgatgctaaaccctcagcatgtgcagctcctttttgacaatgaagttctccctgatcacatgacaatgaagcagatatggctctcccgctggttcggcaaggtaagccaggccaccctccctgggatcacacccccttcagactccccccaaccatcctacagtcctcaggggaagggtgggctgaggggccctttgaataatataagaacattccccactgactactacttcctcattctctccttagccatcccctttgcttttacaatacagtgtgaaagagaagaggaggtagggccaagcccccaccccatcccactccccttccctccccagatatttatgtgaaatgaactgcagctttattttttgaaataaaaacttttaaaaagca

SEQ ID NO: 321793 - DNA, 2090 bp, Homo sapiens
agcggaggacgcctgcgcgttgtgtcgccgacgttgtgtagtctcccctgggaaaggagggtcaggcgagtccacgtgagggaagcccccgctgtgcgcggagccctctgctgggcggagggggagtgccagcccccaggagctaatccccggctgatggcgcagggcgcggggcttggccgtctagtgtgatgaaggaggcgacccccaaggtgggaaggcgcacgggttggggtttgagggtggatgattggtgacggagggtgtatcttcaggaggaggttcgagtgaagatcaaagacttgaatgaacacattgtttgctgcctatgcgccggctacttcgtggatgccaccaccatcacagagtgtcttcatactttctgcaagagttgtattgtgaagtacctccaaactagcaagtactgccccatgtgcaacattaagatccacgagacacagccactgctcaacctcaaactggaccgggtcatgcaggacatcgtgtataagctggtgcctggcttgcaagacagtgagtcaccaacctgactttgagaggcctcttgaggactaattgctgagtggcagcttgaggtgacgggtttggtaggactcacgtaggcagaaggccaaagatgagggaaggacaaaaagtgaggaagggctaatactttattcttttttttctttttttgagacggagtcttgcccaggctggagtgcagtggcgcaatctcagctcactggaagctccacctcctggattcatgccattctcctgcctcagcctcctgagtagctgggactacaggcgcccaccaccatgcccagctaattttttatattttttagtagagacggggtttcaccatgttagccaggatggcctcaatctcctgacttcatgatctgcccacctctgcctcccaaagtgctgggattacaggcgtgagccaccgcgcccggccccgaagggctaatactttattctcatacttcaccttcttctaggtgaagagaaacggattcgggaattctaccagtcccgaggtttggaccgggtcacccagcccactggggaaggtatgtccttggccgcgggacagtaaagaccccagagcattcttcttgcccagttttgctctctggggaaagaggagtatggaatgtgtgccaccagccacctcactaccctatctttctcagagccagcactgagcaacctcggcctccccttcagcagctttgaccactctaaagcccactactatcgctatgatgagcagttgaacctgtgcctggagcggctgaggtgaggagaaggtcaggggttgcaggaggtgacagtgccaatgacccagagccagggagggtctaggggagaggctgagcagtgagtgagtgcctatccccttgaagagagtatatcatggctctgggtggggaagaggaggaaagataggattccctaacctgtgtctatttccccccagttctggcaaagacaagaataaaagcgtcctgcaggtgagaagggctgaggggagggcctctctaaggagactcacctcccatggtccttccctcacacaccttgccctcttccctcccctccctgctcccagaacaagtatgtccgatgttctgttagagctgaggtacgccatctccggagggtcctgtgtcaccgcttgatgctaaaccctcagcatgtgcagctcctttttgacaatgaagttctccctgatcacatgacaatgaagcagatatggctctcccgctggttcggcaaggtaagccaggccaccctccctgggatcacacccccttcagactccccccaaccatcctacagtcctcaggggaagggtgggctgaggggccctttgaataatataagaacattccccactgactactacttcctcattctctccttagccatcccctttgcttttacaatacagtgtgaaagagaagaggaggtagggccaagcccccaccccatcccactccccttccctccccagatatttatgtgaaatgaactgcagctttattttttgaaataaaaacttttaaaaagca

SEQ ID NO: 321794 - DNA, 1218 bp, Homo sapiens
agcggaggacgcctgcgcgttgtgtcgccgacgttgtgtagtctcccctgggaaaggagggtcaggcgagtccacgtgagggaagcccccgctgtgcgcggagccctctgctgggcggagggggagtgccagcccccaggagctaatccccggctgatggcgcagggcgcggggcttggccgtctagtgtgatgaaggaggcgacccccaaggtgggaaggcgcacgggttggggtttgagggtggatgattggtgacggagggtgtatcttcaggaggaggttcgagtgaagatcaaagacttgaatgaacacattgtttgctgcctatgcgccggctacttcgtggatgccaccaccatcacagagtgtcttcatacttgtgagtgccttggagactgcctagttcttccagtccctagtcttcaccaagctgactgccagcttctgtgcggcctgcctcacgcatccaggcaccccacccagcccatgaatccagtttccagagggcctgagaatctgcttttcttttcctgcagtctgcaagagttgtattgtgaagtacctccaaactagcaagtactgccccatgtgcaacattaagatccacgagacacagccactgctcaacctcaaactggaccgggtcatgcaggacatcgtgtataagctggtgcctggcttgcaagacagtgaagagaaacggattcgggaattctaccagtcccgaggtttggaccgggtcacccagcccactggggaagagccagcactgagcaacctcggcctccccttcagcagctttgaccactctaaagcccactactatcgctatgatgagcagttgaacctgtgcctggagcggctgagttctggcaaagacaagaataaaagcgtcctgcagaacaagtatgtccgatgttctgttagagctgaggtacgccatctccggagggtcctgtgtcaccgcttgatgctaaaccctcagcatgtgcagctcctttttgacaatgaagttctccctgatcacatgacaatgaagcagatatggctctcccgctggttcggcaagccatcccctttgcttttacaatacagtgtgaaagagaagaggaggtagggccaagcccccaccccatcccactccccttccctccccagatatttatgtgaaatgaactgcagctttattttttgaaataaaaacttttaaaaagca

SEQ ID NO: 321795 - DNA, 852 bp, Homo sapiens
cggaagtggccggctgggatcagcctttaagatggcgtctcctcaggggggccagattgcgatcgcgatgaggcttcggaaccagctccagtcagtgtacaagatggacccgctacggaacgaggaggaggttcgagtgaagatcaaagacttgaatgaacacattgtttgctgcctatgcgccggctacttcgtggatgccaccaccatcacagagtgtcttcatactttctgcaagagttgtattgtgaagtacctccaaactagcaagtactgccccatgtgcaacattaagatccacgagacacagccactgctcaacctcaaactggaccgggtcatgcaggacatcgtgtataagctggtgcctggcttgcaagacagtgaagagaaacggattcgggaattctaccagtcccgaggtttggaccgggtcacccagcccactggggaagagccagcactgagcaacctcggcctccccttcagcagctttgaccactctaaagcccactactatcgctatgatgagcagttgaacctgtgcctggagcggctgagttctggcaaagacaagaataaaagcgtcctgcagaacaagtatgtccgatgttctgttagagctgaggtacgccatctccggagggtcctgtgtcaccgcttgatgctaaaccctcagcatgtgcagctcctttttgacaatgaagttctccctgatcacatgacaatgaagcagatatggctctcccgctggttcggcaagccatccctgggttaatcaggggtaaggggggaacacacacaagaccgctccctttgtcccacccatggagactacagccctacccgggg

SEQ ID NO: 321796 - DNA, 851 bp, Homo sapiens
agcggaggacgcctgcgcgttgtgtcgccgacgttgtgtagtctcccctgggaaaggagggtcaggaggaggttcgagtgaagatcaaagacttgaatgaacacattgtttgctgcctatgcgccggctacttcgtggatgccaccaccatcacagagtgtcttcatactttctgcaagagttgtattgtgaagtacctccaaactagcaagtactgccccatgtgcaacattaagatccacgagacacagccactgctcaacctcaaactggaccgggtcatgcaggacatcgtgtataagctggtgcctggcttgcaagacagtgaagagaaacggattcgggaattctaccagtcccgaggtttggaccgggtcacccagcccactggggaagagccagcactgagcaacctcggcctccccttcagcagctttgaccactctaaagcccactactatcgctatgatgagcagttgaacctgtgcctggagcggctgagttctggcaaagacaagaataaaagcgtcctgcagaacaagtatgtccgatgttctgttagagctgaggtacgccatctccggagggtcctgtgtcaccgcttgatgctaaaccctcagcatgtgcagctcctttttgacaatgaagttctccctgatcacatgacaatgaagcagatatggctctcccgctggttcggcaagccatcccctttgcttttacaatacagtgtgaaagagaagaggaggtagggccaagcccccaccccatcccactccccttccctccccagatatttatgtgaaatgaactgcagctttattttttgaaataaaaacttttaaaaagca

SEQ ID NO: 321797 - DNA, 974 bp, Homo sapiens
agcggaggacgcctgcgcgttgtgtcgccgacgttgtgtagtctcccctgggaaaggagggtcaggcgagtccacgtgagggaagcccccgctgtgcgcggagccctctgctgggcggagggggagtgccagcccccaggagctaatccccggctgatggcgcagggcgcggggcttggccgtctagtgtgatgaaggaggcgacccccaaggtgggaaggcgcacgggttggggtttgagggtggatgattggtgacggagggtgtatcttcaggaggaggttcgagtgaagatcaaagacttgaatgaacacattgtttgctgcctatgcgccggctacttcgtggatgccaccaccatcacagagtgtcttcatactttctgcaagagttgtattgtgaagtacctccaaactagcaagtactgccccatgtgcaacattaagatccacgagacacagccactgctcaacctcaaactggaccgggtcatgcaggacatcgtgtataagctggtgcctggcttgcaagacagtgaagagaaacggattcgggaattctaccagtcccgaggtttggaccgggtcacccagcccactggggaagagccagcactgagcaacctcggcctccccttcagcagctttgaccactctaaagcccactactatcgctatgatgagcagttgaacctgtgcctggagcggctgagttctggcaaagacaagaataaaagcgtcctgcagaacaagtatgtccgatgttctgttagagctgaggtacgccatctccggagggtcctgtgtcaccgcttgatgctaaaccctcagcatggtgcaagctccttttttgacaactgaaagttctcccttgaatcacatgaccaatgaaagcaggatatggggtcctcccggctgggttcgggcagagccattcccctttgctttttacaatccaggtgtgcaaacgaacag

SEQ ID NO: 321798 - DNA, 825 bp, Homo sapiens
agcggaggacgcctgcgcgttgtgtcgccgacgttgtgtagtctcccctgggaaaggagggtcaggaggaggttcgagtgaagatcaaagacttgaatgaacacattgtttgctgcctatgcgccggctacttcgtggatgccaccaccatcacagagtgtcttcatactttctgcaagagttgtattgtgaagtacctccaaactagcaagtactgccccatgtgcaacattaagatccacgagacacagccactgctcaacctcaaactggaccgggtcatgcaggacatcgtgtataagctggtgcctggcttgcaagacagtgaagagaaacggattcgggaattctaccagtcccgaggtttggaccgggtcacccagcccactggggaagagccagcactgagcaacctcggcctccccttcagcagctttgaccactctaaagcccactactatcgctatgatgagcagttgaacctgtgcctggagcggctgagttctggcaaagacaagaataaaagcgtcctgcagagctgaggtacgccatctccggagggtcctgtgtcaccgcttgatgctaaaccctcagcatgtgcagctcctttttgacaatgaagttctccctgatcacatgacaatgaagcagatatggctctcccgctggttcggcaagccatcccctttgcttttacaatacagtgtgaaagagaagaggaggtagggccaagcccccaccccatcccactccccttccctccccagatatttatgtgaaatgaactgcagctttattttttgaaataaaaacttttaaaaagca

SEQ ID NO: 321799 - DNA, 2638 bp, Homo sapiens
ggcagtgggcgtggcggtgctgcccaggtgagccaccgctgcttctgcccagacacggtcgcctccacatccaggtctttgtgctcctcgcttgcctgttccttttccacgcattttccaggataactgtgactccaggcccgcaatggatgccctgcaactagcaaattcggcttttgccgttgatctgttcaaacaactatgtgaaaaggagccactgggcaatgtcctcttctctccaatctgtctctccacctctctgtcacttgctcaagtgggtgctaaaggtgacactgcaaatgaaattggacaggttcttcattttgaaaatgtcaaagatgtaccctttggatttcaaacagtaacatcggatgtaaacaaacttagttccttttactcactgaaactaatcaagcggctctacgtagacaaatctctgaatctttctacagagttcatcagctctacgaagagaccctatgcaaaggaattggaaactgttgacttcaaagataaattggaagaaacgaaaggtcagatcaacaactcaattaaggatctcacagatggccactttgagaacattttagctgacaacagtgtgaacgaccagaccaaaatccttgtggttaatgctgcctactttgttggcaagtggatgaagaaatttcctgaatcagaaacaaaagaatgtcctttcagagtcaacaagacagacaccaaaccagtgcagatgatgaacatggaggccacgttctgtatgggaaacattgacagtatcaattgtaagatcatagagcttccttttcaaaataagcatctcagcatgttcatcctactacccaaggatgtggaggatgagtccacaggcttggagaagattgaaaaacaactcaactcagagtcactgtcacagtggactaatcccagcaccatggccaatgccaaggtcaaactctccattccaaaatttaaggtggaaaagatgattgatcccaaggcttgtctggaaaatctagggctgaaacatatcttcagcgaagacacatctgatttctctggaatgtcagagaccaagggagtggccctatcaaatgttatccacaaagtgtgcttagaaataactgaagatggtggggattccatagaggtgccaggagcacggatcctgcagcacaaggatgaattgaatgctgaccatccctttatttacatcatcaggcacaacaaaactcgaaacatcattttctttggcaaattctgttctccttaagtggcatagcccatgttaagtcctccctgacttttctgtggatgccgatttctgtaaactctgcatccagagattcattttctagatacaataaattgctaatgttgctggatcaggaagccgccagtacttgtcatatgtagccttcacacagatagaccttttttttttttccaattctatctttggtttccttttttcccataagacaatgacatacgcttttaatgaaaaggaatcacgttagaggaaaaatatttattcattatttggtcaaattgtccggggtagttggcagaaatacagtcttccacaaagaaaattcctataaggaagatttggaagctcttcttcccagcactatgctttccttctttgggatagagaatgttccagacattctcgcttccctgaaagactgaagaaagtgtagtgcatgggacccacgaaactgccctggctccagtgaaacttgggcacatgctcaggctactataggtccagaagtccttatgttaagccctggcaggcaggtgtttattaaaattctgaattttggggattttcaaaagataatattttacatacactgtatgttatagaacttcatggatcagatctggggcagcaccctataaatcaccaccttaatatgctgcaacaaaatgtagaatattcagacaaaatggatacataaagactaagtagcccataaggggtcaaattttgctgccaaatgcgtatgccaccaacttacaaaaacacttcgttcgcagagcttttcagattgtggaatgttggataaggaattatagacctctagtagctgaaatgcaagaccccaagaggaagttcagatcttaatataaattcactttcatttttgatagctgtcccatctggtcatttggttggcactagactggtggcaggggcttctagctgactcgcacagggattctcacaatagccgatatcagaatttgtgttgaaggaacttgtctcttcatctaatatgatagcgggaaaaggagaggaaactactgcctttagaaaatataagtaaagtgattaaagtgctcacgttaccttgacacatagtttttcagtctatgggtttagttactttagatggcaagcatgtaacttatattaatagtaatttgtaaagttggttggataagctatccatgttgcaggttcatggattacttctctataaaaaatatgtatttaccaaaaaattttgtgacattccttctcccatctcttccttgacatgcattgtaaataggttcttcttgttctgagattcaatattgaatttctcctatgctattgacaataaaatattattgaactaca

SEQ ID NO: 321800 - DNA, 512 bp, Homo sapiens
ctgaagtgggaggggccgcatctttcatttttgatagctgtcccatctggtcatttggttggcactagactggtggcaggggcttctagctgactcgcacagggattctcacaatagccgatatcagaatttgtgttgaaggaacttgtctcttcatctaatatgatagcgggaaaaggagaggaaactactgcctttagaaaatataagtaaagtgattaaagtgctcacgttaccttgacacatagtttttcagtctatgggtttagttactttagatggcaagcatgtaacttatattaatagtaatttgtaaagttggttggataagctatccatgttgcaggttcatggattacttctctataaaaaatatgtatttaccaaaaaattttgtgacattccttctcccatctcttccttgacatgcattgtaaataggttcttcttgttctgagattcaatattgaatttctcctatgctattgacaataaaatattattgaactaca

SEQ ID NO: 321801 - DNA, 525 bp, Homo sapiens
ggcagtgggcgtggcggtgctgcccaggtgagccaccgctgcttctgcccagacacggtcgcctccacatccaggtctttgtgctcctcgcttgcctgttccttttccacgcattttccaggataactgtgactccaggtaagcaaggtggggtagcagggctggtgacttccttttttcagggaaattcataaatatcgttatttgagctgatttgagatggtgaacaaaatggacttaggtccattttggggctgttttcaaagacgggctgttgggttgagtactgtcgcctctcatcccccatgttggcagtatttccagctcccaaccctttgagcaccaggaacactgcagagggagtaaaatcacttaaccatacaaggtaagaatatgaagaagtcacgtggctcggaggttttggtggtagaggggtgcaaccgtgattcacggaggagaaaatacttctgaggacattttcaggcctactttggaactcagaatgaattttgcaatgctagtttc

SEQ ID NO: 321802 - DNA, 2906 bp, Homo sapiens
gctaaagcacccagagggactagacagactctggctagaggcacttgtcctgaaatctgattcctgcctgatgatggtgtctcttgtatcaatctctctctctggtctttgaattggatagaaattataacccagcttcatcgttctccaagtttggaaatccttctgtgtgagtattaagggcatcactttgaagaaaggacaaatgttctcgatggttgatttggaagagtacctttatggtagtgtttctcagtggggacaatttgtcctccccttcccactctgggataatctggcaatgtctggagacattctgggttctcacaaataggaggaggatgccactggcatctagtaggtcagcgatgctgctaagcatcctgcagtgcccaggacagccccacaaagactcatccagcctgaatgtcaatagtgctgaggtcgaggagccttactttacgggaactaggcaggaggagtctgtatgcccaaggacgttggtcattatcacgtgtccacttcagtacagcactactcagaggcaatgctttttgggtaacggatttttctcttaacaggttcttcattttgaaaatgtcaaagatgtaccctttggatttcaaacagtaacatcggatgtaaacaaacttagttccttttactcactgaaactaatcaagcggctctacgtagacaaatctctgaatctttctacagagttcatcagctctacgaagagaccctatgcaaaggaattggaaactgttgacttcaaagataaattggaagaaacgaaaggtcagatcaacaactcaattaaggatctcacagatggccactttgagaacattttagctgacaacagtgtgaacgaccagaccaaaatccttgtggttaatgctgcctactttgttggcaagtggatgaagaaatttcctgaatcagaaacaaaagaatgtcctttcagagtcaacaagacagacaccaaaccagtgcagatgatgaacatggaggccacgttctgtatgggaaacattgacagtatcaattgtaagatcatagagcttccttttcaaaataagcatctcagcatgttcatcctactacccaaggatgtggaggatgagtccacaggcttggagaagattgaaaaacaactcaactcagagtcactgtcacagtggactaatcccagcaccatggccaatgccaaggtcaaactctccattccaaaatttaaggtggaaaagatgattgatcccaaggcttgtctggaaaatctagggctgaaacatatcttcagcgaagacacatctgatttctctggaatgtcagagaccaagggagtggccctatcaaatgttatccacaaagtgtgcttagaaataactgaagatggtggggattccatagaggtgccaggagcacggatcctgcagcacaaggatgaattgaatgctgaccatccctttatttacatcatcaggcacaacaaaactcgaaacatcattttctttggcaaattctgttctccttaagtggcatagcccatgttaagtcctccctgacttttctgtggatgccgatttctgtaaactctgcatccagagattcattttctagatacaataaattgctaatgttgctggatcaggaagccgccagtacttgtcatatgtagccttcacacagatagaccttttttttttttccaattctatctttggtttccttttttcccataagacaatgacatacgcttttaatgaaaaggaatcacgttagaggaaaaatatttattcattatttggtcaaattgtccggggtagttggcagaaatacagtcttccacaaagaaaattcctataaggaagatttggaagctcttcttcccagcactatgctttccttctttgggatagagaatgttccagacattctcgcttccctgaaagactgaagaaagtgtagtgcatgggacccacgaaactgccctggctccagtgaaacttgggcacatgctcaggctactataggtccagaagtccttatgttaagccctggcaggcaggtgtttattaaaattctgaattttggggattttcaaaagataatattttacatacactgtatgttatagaacttcatggatcagatctggggcagcaccctataaatcaccaccttaatatgctgcaacaaaatgtagaatattcagacaaaatggatacataaagactaagtagcccataaggggtcaaattttgctgccaaatgcgtatgccaccaacttacaaaaacacttcgttcgcagagcttttcagattgtggaatgttggataaggaattatagacctctagtagctgaaatgcaagaccccaagaggaagttcagatcttaatataaattcactttcatttttgatagctgtcccatctggtcatttggttggcactagactggtggcaggggcttctagctgactcgcacagggattctcacaatagccgatatcagaatttgtgttgaaggaacttgtctcttcatctaatatgatagcgggaaaaggagaggaaactactgcctttagaaaatataagtaaagtgattaaagtgctcacgttaccttgacacatagtttttcagtctatgggtttagttactttagatggcaagcatgtaacttatattaatagtaatttgtaaagttggttggataagctatccatgttgcaggttcatggattacttctctataaaaaatatgtatttaccaaaaaattttgtgacattccttctcccatctcttccttgacatgcattgtaaataggttcttcttgttctgagattcaatattgaatttctcctatgctattgacaataaaatattattgaactaca

SEQ ID NO: 321803 - DNA, 795 bp, Homo sapiens
  misc_feature (769)..(769): n is a, c, g, or t
ggcagtgggcgtggcggtgctgcccaggtgagccaccgctgcttctgcccagacacggtcgcctccacatccaggtctttgtgctcctcgcttgcctgttccttttccacgcattttccaggataactgtgactccaggcccgcaatggatgccctgcaactagcaaattcggcttttgccgttgatctgttcaaacaactatgtgaaaaggagccactgggcaatgtcctcttctctccaatctgtctctccacctctctgtcacttgctcaagtgggtgctaaaggtgacactgcaaatgaaattggacaggttcttcattttgaaaatgtcaaagatgtaccctttggatttcaaacagtaacatcggatgtaaacaaacttagttccttttactcactgaaactaatcaagcggctctacgtagacaaatctctgaatctttctacagagttcatcagctctacgaagagaccctatgcaaaggaattggaaactgttgacttcaaagataaattggaagaaacgaaaggtcagatcaacaactcaattaaggatctcacagatggccactttgagaacattttagctgacaacagtgtgaacgaccagaccaaaatccttgtggttaatgctgcctactttgttggcaagtggatgaagaaaatgaaaggactgtcaattatcttcaacatcgcttctttggcttgtcttgcctactcgatgattgagaagggtatgccgagaaacgatgaatggggggaaccnagttatgtataccgggatcctctaaa

SEQ ID NO: 321804 - DNA, 2983 bp, Homo sapiens
acacaattcaacccattacacttactaaatattaaactgaacaatgcaaaactgctgcaattcgactgtttttgttttataaaagttttaactttgtagtttaactgaaatcctaatggaaacaatatgtgataaataaaaccaactgatgttgattagtgctgtcaacttttctgacatatgctggagaagagatgtgaccactgggctcccgacaatggccactgtggctgagcaggcccaagactgcagagtctaggcagagctggacacacagaggacctcacatgccttcagacatttgcctggaagtttcttcacaactgatcttacttttgaatttacagaaagttccttgtttcttctgagatcaattactttgtttaaatagaattcttatagtgttggcagaatgcagttgagaagacgttaaagatgctttagaaactaactgctcccttgtccttgcttccaggcccgcaagcccgcaatggatgccctgcaactagcaaattcggcttttgccgttgatctgttcaaacaactatgtgaaaaggagccactgggcaatgtcctcttctctccaatctgtctctccacctctctgtcacttgctcaagtgggtgctaaaggtgacactgcaaatgaaattggacaggttcttcattttgaaaatgtcaaagatgtaccctttggatttcaaacagtaacatcggatgtaaacaaacttagttccttttactcactgaaactaatcaagcggctctacgtagacaaatctctgaatctttctacagagttcatcagctctacgaagagaccctatgcaaaggaattggaaactgttgacttcaaagataaattggaagaaacgaaaggtcagatcaacaactcaattaaggatctcacagatggccactttgagaacattttagctgacaacagtgtgaacgaccagaccaaaatccttgtggttaatgctgcctactttgttggcaagtggatgaagaaatttcctgaatcagaaacaaaagaatgtcctttcagagtcaacaagacagacaccaaaccagtgcagatgatgaacatggaggccacgttctgtatgggaaacattgacagtatcaattgtaagatcatagagcttccttttcaaaataagcatctcagcatgttcatcctactacccaaggatgtggaggatgagtccacaggcttggagaagattgaaaaacaactcaactcagagtcactgtcacagtggactaatcccagcaccatggccaatgccaaggtcaaactctccattccaaaatttaaggtggaaaagatgattgatcccaaggcttgtctggaaaatctagggctgaaacatatcttcagcgaagacacatctgatttctctggaatgtcagagaccaagggagtggccctatcaaatgttatccacaaagtgtgcttagaaataactgaagatggtggggattccatagaggtgccaggagcacggatcctgcagcacaaggatgaattgaatgctgaccatccctttatttacatcatcaggcacaacaaaactcgaaacatcattttctttggcaaattctgttctccttaagtggcatagcccatgttaagtcctccctgacttttctgtggatgccgatttctgtaaactctgcatccagagattcattttctagatacaataaattgctaatgttgctggatcaggaagccgccagtacttgtcatatgtagccttcacacagatagaccttttttttttttccaattctatctttggtttccttttttcccataagacaatgacatacgcttttaatgaaaaggaatcacgttagaggaaaaatatttattcattatttggtcaaattgtccggggtagttggcagaaatacagtcttccacaaagaaaattcctataaggaagatttggaagctcttcttcccagcactatgctttccttctttgggatagagaatgttccagacattctcgcttccctgaaagactgaagaaagtgtagtgcatgggacccacgaaactgccctggctccagtgaaacttgggcacatgctcaggctactataggtccagaagtccttatgttaagccctggcaggcaggtgtttattaaaattctgaattttggggattttcaaaagataatattttacatacactgtatgttatagaacttcatggatcagatctggggcagcaccctataaatcaccaccttaatatgctgcaacaaaatgtagaatattcagacaaaatggatacataaagactaagtagcccataaggggtcaaattttgctgccaaatgcgtatgccaccaacttacaaaaacacttcgttcgcagagcttttcagattgtggaatgttggataaggaattatagacctctagtagctgaaatgcaagaccccaagaggaagttcagatcttaatataaattcactttcatttttgatagctgtcccatctggtcatttggttggcactagactggtggcaggggcttctagctgactcgcacagggattctcacaatagccgatatcagaatttgtgttgaaggaacttgtctcttcatctaatatgatagcgggaaaaggagaggaaactactgcctttagaaaatataagtaaagtgattaaagtgctcacgttaccttgacacatagtttttcagtctatgggtttagttactttagatggcaagcatgtaacttatattaatagtaatttgtaaagttggttggataagctatccatgttgcaggttcatggattacttctctataaaaaatatgtatttaccaaaaaattttgtgacattccttctcccatctcttccttgacatgcattgtaaataggttcttcttgttctgagattcaatattgaatttctcctatgctattgacaataaaatattattgaactaca

SEQ ID NO: 321805 - DNA, 7672 bp, Homo sapiens
ctggagttcaagatttctgatgaggaggcagatgatgcagatgctgctgggagggattccccctccaacacctcccagtcagaacagcaggaatctgttgatgcagaaggcccagtggtagaaaaaattatgagcagtcgttcagtaaaaaagcagaaggaatctggagaggaggtagaaattgaggaattctatgtgaaatacaaaaacttctcttatcttcattgtcagtgggcatctatagaagatctggaaaaagataagagaattcagcaaaaaattaaacgatttaaggcaaagcagggccagaacaagttcctttcagagattgaggatgagctttttaatccagattatgtggaggttgaccggataatggactttgcacgtagcacagatgaccggggagagcctgtgactcactatctggtgaagtggtgttcacttccttatgaagacagcacgtgggagcggaggcaggacatagatcaagcaaagatcgaggagtttgagaaactaatgtccagggagccggaaacagagcgtgtggagcgacctcctgctgatgattggaagaaatcggagagttccagggagtataaaaacaataacaaactcagggaataccagttggagggagtaaactggctacttttcaattggtacaacatgcgaaactgcattttagcagatgaaatgggtttgggaaaaactatccagtccattacatttctctatgagatatatttgaaaggaatccatggcccttttttagtaattgccccattgtccacaatccccaactgggaaagggaattccgaacctggacagagttgaacgtggttgtgtatcatgggagtcaagctagtcgtcggaccattcagttgtatgaaatgtacttcaaagatccccagggtcgagtgataaaggggtcctataagtttcatgccatcatcactacatttgagatgattttgactgattgtcctgagctgcggaatattccatggcgctgtgtagtcattgatgaagcccacaggctgaagaacaggaactgcaagctgttggagggactcaagatgatggacttggaacacaaagtgctgctgacgggaaccccactccagaacactgtggaagaactcttcagcttgcttcatttcttggaaccaagtcgcttcccttcagaaaccacatttatgcaagaatttggtgatctaaaaacagaagagcaggtgcaaaaacttcaagctattctaaagccaatgatgttgagacgtctcaaagaggatgtagaaaagaacttggcccccaaagaagaaactattattgaagttgagctaacaaacattcagaagaaatattaccgagccatccttgagaagaatttcacatttctttccaaaggcggtggtcaagctaacgtacctaacctattaaacactatgatggaattgcggaagtgctgcaatcatccgtaccttatcaatggtgctgaagagaaaattttggaagagtttaaagaaacacacaatgcagagtctccagattttcagctccaggcaatgatccaggctgctggcaagctagtgctgattgacaagctgctgccaaaactgaaggctggtggccacagggtgcttatcttttcccagatggtgcgctgcttggacatactggaagactacctcattcaaagacggtacccatatgaaaggatcgacggccgagtaagaggcaacctccgccaggcagctatcgacagattctccaaacctgattctgataggtttgttttcctcctgtgtacaagggcaggaggtttaggcattaacctcactgctgctgatacctgcatcatctttgattcagactggaatccccaaaatgacctccaggctcaggctagatgtcatagaataggacagagcaaatctgtgaaaatctacaggctgattacaagaaattcctatgaaagggaaatgttcgacaaggctagtttgaaactgggcctggataaagctgtgctacagtctatgagtggaagagaaaatgctaccaatggggtacaacagctttccaagaaagaaatagaggatcttctacgaaaaggggcctatggtgcactcatggatgaggaggatgaagggtctaaattctgtgaagaagatattgatcagatcctcctacgtcgaacccacaccattaccattgagtcagaagggaaaggttccacatttgctaaggccagttttgttgcatctggaaataggacagatatttccttggatgatccaaatttctggcaaaagtgggctaagaaggctgaattggatattgatgccttaaatgggaggaacaacctggttattgatactccaagagtgagaaagcagaccaggctctacagtgcagtgaaggaagatgagctgatggagttctcagacttggaaagtgattctgaagaaaagccctgtgcaaagccacggcgtccccaggataagtcacagggctatgcaaggagtgaatgtttcagggtggagaagaatctgcttgtctatggttggggacggtggacagacattctttcccacggacgctataaacgccaactcactgagcaagatgtagaaaccatctgcagaaccatcctggtgtactgtcttaatcattacaaaggggatgagaatatcaaaagcttcatctgggatctgatcacacccacagcggatggccagactcgagccttggtcaaccattccggtttgtcagctcctgtgccaaggggaaggaagggaaagaaggtgaaagcccagagcacacagccggtggtgcaggatgccgactggctggccagctgcaacccagatgccctgttccaggaggacagctacaagaaacacctgaagcatcactgtaacaaggtcctgctgcgtgtccgcatgctgtactacctaagacaagaagtgataggagaccaggcggataagatcttagagggtgctgactcaagtgaagccgatgtgtggatccctgaacctttccatgctgaagttcctgcagattggtgggataaggaagcagacaaatccctcttaattggagtgttcaaacatggctatgagaagtacaactccatgcgagctgaccccgcgctgtgctttctggaacgagtcggtatgcctgatgccaaggccatagctgccgagcaaagaggaacagacatgctagcagatggtggtgacgggggagaatttgatagagaagatgaagacccagaatataaaccaaccagaacaccgttcaaagatgaaatagatgaatttgcaaattctccttcagaggataaggaagaatccatggaaatacatgccacaggcaagcacagtgagagtaatgctgagttaggccaactttactggcctaacacttcaaccctgactacacgtctgcgccggctcattactgcctatcagcgcagctataaaaggcaacagatgaggcaagaggccctaatgaagactgaccggcgcagacggcggcctcgagaggaagtgagagctctggaagcggaaagggaagctattatatctgagaagcggcaaaagtggacaagaagagaagaggctgatttttaccgtgtggtatccacctttggggttatttttgaccctgtgaaacagcaatttgactggaaccaatttagagcctttgccaggcttgacaaaaaatctgatgagagtttggagaaatacttcagttgttttgtggccatgtgtaggcgagtatgtcgaatgcccgtcaagccagatgatgaaccgcccgacctctcctccataattgagccgatcacagaggagcgagcctctcgaactctgtaccgcattgagctgctacggaagatccgcgagcaggttctccatcacccccagctgggagagaggcttaagctctgccagccaagcttggatctgccagagtggtgggagtgtggacggcatgaccgagacttgctggttggtgctgctaaacacggggtcagtcggacggattatcacatcctcaatgaccctgagttatccttcttggatgcacataaaaactttgctcaaaacagaggggcaggtaatacatcttccttgaacccactggcagttggatttgtccagactcctccagtcatctcatctgctcatattcaagatgagagggtactggaacaagccgaaggcaaagtggaggagcctgaaaacccagctgccaaggagaaatgtgagggcaaagaagaggaagaagaaaccgatggcagcgggaaggagagcaagcaggaatgtgaggcagaggccagctctgtgaaaaatgaactgaaaggtgttgaggtcggcgcagacactgggtccaaatctatttcagagaaaggttccgaagaggatgaagaggaaaagctggaggatgacgataagtcggaagagtcttcccagcccgaagcaggagctgtctctagagggaagaattttgatgaagaaagcaatgcttccatgagcactgctagagatgaaacccgagatggattctacatggaggacggagatccttcagtagctcagctccttcatgaaagaacatttgccttctcgttttggcctaaggatagagtaatgataaaccgcttagacaacatctgtgaagcagtgttgaaaggcaaatggccagtaaataggcgccagatgtttgatttccaaggcctcatcccaggttacacacccaccacagtggacagccccttgcagaagaggagctttgctgagctctccatggtcggccaagccagcattagtgggagtgaggacatcactacgtctcctcagttgtcaaaggaagatgccctcaacctctctgtccctcgccagcggaggaggaggaggagaaaaatcgaaattgaggccgaaagagctgccaagaggcgaaatctcatggagatggttgcccagcttcgagagtctcaggtggtctcagaaaatggacaagaaaaagttgtagatttatcaaaggcctcaagagaggcaacaagctctacctcaaatttttcatctctttcttcaaagtttatcttgcctaatgtctcaacaccagtgtctgatgcctttaagactcaaatggaactgctccaagcaggcctttcgcgcacacccacaaggcatctccttaatggctccctagtggatggagagcctcccatgaagaggaggcggggaaggaggaaaaatgtggagggacttgatctgcttttcatgagccacaaacggacgtcattgagtgcagaggatgctgaggtgaccaaagcttttgaagaagatatagagaccccaccaacaagaaacattccttctcccggacagctggacccagacacacggatccctgttatcaatcttgaagatgggactaggctggtgggggaagatgctcctaaaaataaggatttagttgaatggctgaagctgcaccctacttacactgttgatatgccaagttatgtaccaaagaatgcagatgtgctgttttcctcatttcagaaaccgaaacagaaacgacatagatgtcgaaaccctaataaattggatataaacactttgacaggagaagaaagggtgcctgttgtcaataaacgaaatgggaagaagatgggtggagctatggcgcctccaatgaaggatctacccaggtggctggaagaaaatcctgaatttgcagttgctccagactggactgatatagttaagcagtctggttttgttcctgagtcgatgtttgaccgccttctcactgggcctgtagtgcggggagagggagcgagcagaagaggaagaaggcccaaaagtgagatcgccagagcagccgcggccgccgctgctgtggcctccacgtcagggatcaaccctttgctggtgaacagcctgtttgctggaatggacctgacgagccttcagaatctccagaatctccagtcgctccagctggcaggcctcatgggcttccctccaggactggcaacagctgccaccgccggaggcgatgcgaagaaccctgctgctgtgctgcccctgatgctgccaggaatggcgggcctgcccaacgtgtttggcttgggcgggctgttgaataaccctctgtcagctgctactggaaacaccactactgcttctagtcaaggagaaccggaagacagcacttcaaaaggagaggagaaaggaaatgagaatgaagacgagaacaaagactctgagaaaagcacagatgctgtttcggctgctgactctgcgaatggatctgttggtgctgctactgccccggctggattgccctcaaacccgctagccttcaaccctttcctcctgtccacaatggccccgggcctcttctacccatccatgtttctacctccaggactggggggattgacgctgcctgggttcccagcattggcaggacttcagaatgccgtgggctccagcgaagaaaaggctgctgacaaggctgagggaggaccctttaaagatggagagacccttgaaggcagcgatgccgaggagagcctggataagactgcagagtcctccctcttagaagacgaaatagcacagggtgaagagctagactcacttgatgggggggatgaaatagaaaacaatgaaaatgatgaataaccagtaccagttccagttcaagtgtttaaaacttttgacaagtggtagtcctactgtttacactcacagttaatgttcatacctagttttataagctgttctgtaacatagtgtagcaaaaaaaaaagttcaagtcatgttatacaggtgtgtcaaaaggtatcttggtcattaagtattgtgcagtgcattatttattatccctaggagagatgaaatttgagaggtgatcatgtctttttaaggaaacttacataatgctctgctttttttttttctcttggtaccattggtattataataaagagcaatttgtaactgagtggcactaatggaagaaagtgctgctcaaaggaagtatgaagttatatatttaattttttaattttaatttttaatttttttgctgtgaaggtcaagctgaaatttaccatacatatcatacttgctcatttgtttccctttttgactgtatgggggttcccacactcgtgcatacacacacatccatacactctgacaatctccacgctagtgtgaacgcctctgtcccgaggcgcagcaataataaggcagctgttgaatgtgaagggtccctttggaaaattaacctactgggagggttcttgccagacagaactacagttccattgtctcgtggtcttgtaatgcactggtaaaaacaaaataaatagatgaataaataaagagtgagagaagagagaatcaggtaccttttttaaattaaaggactttgttactttagccacaaagctaaaacagcattacctcagctctaaactagccttgaagtttacagacatgactttgtaaatgtattgtttttctttgttgtgatgtccttttatttttttctttgaaaactgctatcatgtaagataaaatgtaaattgctgccaactgtagtaatgatgcttttaataaaagtgacccatgatatgca

SEQ ID NO: 321806 - DNA, 4062 bp, Homo sapiens
cggcggcggcggcggcggcgcgggggttgagtcgtggtggtgcggacgcgctcgtgctcgggaactatcggattaaacttgaatcgagtgaaattacacaaaggagcgccgcggaggaggcggcccggggacccggacaccctgaaactcaccagagacccgttcgcccccggccaactccgtgcccgtggattcagccccctggccgcagctgccgagccaactccggagcccgctctgcgttttgttttcccctcggcactaggcagcggaggagcccgaccgacccggacctatatccagactttgcctgacactgcagggtccaagagaattaaagaaatatggaatgacatgaagaagattagttaaggattataggctttgagggcaaacacctcagtgaagtgaagcacaggcaagctcctgagctgtggtttggaggagccgtgtgttggaagaagatggcagatccaggaatgatgagtctttttggcgaggatgggaatattttcagtgaaggtcttgaaggcctcggagaatgtggttacccggaaaatccagtaaatcctatgggtcagcaaatgccaatagaccaaggctttgcctctttacagccatcccttcatcatccttcaactaatcaaaatcaaacaaagctgacacattttgatcactataatcagtatgaacaacaaaagatgcatctgatggatcagccgaacagaatgatgagcaacacccctgggaacggactcgcgtctccgcactcgcagtatcacacccctcccgttcctcaggtgccccatggtggcagtggtggcggtcagatgggtgtctaccctggcatgcagaatgagaggcatgggcaatcctttgtggacagcagctccatgtggggccccagggctgttcaggtaccagaccagatacgagccccctaccagcagcagcagccacagccgcagccaccgcagccggctccgtcggggccccctgcacagggccaccctcagcacatgcagcagatgggcagctatatggcacgtggggatttttccatgcagcagcatggtcagccacagcagaggatgagccagttttcccaaggccaagagggcctcaatcagggaaatccttttattgccacctcaggacctggccacttgtcccacgtgccccagcagagtcccagcatggcaccttccttgcgtcactcggtgcagcagttccatcaccacccctctactgctctccatggagaatccgttgcccacagtcccagattctccccgaatcctccccaacaaggggctgttaggccgcaaacccttaactttagttctcggagccagacagtcccctctcctactataaacaactcagggcagtattctcgatatccttacagtaacctaaatcagggattagttaacaatacagggatgaatcaaaatttaggccttacaaataatactccaatgaatcagtccgtaccaagataccccaatgctgtaggattcccatcaaacagtggtcaaggactaatgcaccagcagcccatccaccccagtggctcacttaaccaaatgaacacacaaactatgcatccttcacagcctcagggaacttatgcctctccacctcccatgtcacccatgaaagcaatgagtaatccagcaggcactcctcctccacaagtcaggccgggaagtgctgggataccaatggaagttggcagttatccaaatatgccccatcctcagccatctcaccagccccctggtgccatgggaatcggacagaggaatatgggccccagaaacatgcagcagtctcgtccatttataggcatgtcctcggcaccaagggaattgactgggcacatgaggccaaatggttgtcctggtgttggccttggagacccacaagcaatccaggaacgactgatacctggccaacaacatcctggtcaacagccatcttttcagcagttgccaacctgtcctccactgcagcctcacccgggcttgcaccaccagtcttcacctccacaccctcatcaccagccttggatgggtggagctatggcgcctccaatgaaggatctacccaggtggctggaagaaaatcctgaatttgcagttgctccagactggactgatatagttaagcagtctggttttgttcctgagtcgatgtttgaccgccttctcactgggcctgtagtgcggggagagggagcgagcagaagaggaagaaggcccaaaagtgagatcgccagagcagccgcggccgccgctgctgtggcctccacgtcagggatcaaccctttgctggtgaacagcctgtttgctggaatggacctgacgagccttcagaatctccagaatctccagtcgctccagctggcaggcctcatgggcttccctccaggactggcaacagctgccaccgccggaggcgatgcgaagaaccctgctgctgtgctgcccctgatgctgccaggaatggcgggcctgcccaacgtgtttggcttgggcgggctgttgaataaccctctgtcagctgctactggaaacaccactactgcttctagtcaaggagaaccggaagacagcacttcaaaaggagaggagaaaggaaatgagaatgaagacgagaacaaagactctgagaaaagcacagatgctgtttcggctgctgactctgcgaatggatctgttggtgctgctactgccccggctggattgccctcaaacccgctagccttcaaccctttcctcctgtccacaatggccccgggcctcttctacccatccatgtttctacctccaggactggggggattgacgctgcctgggttcccagcattggcaggacttcagaatgccgtgggctccagcgaagaaaaggctgctgacaaggctgagggaggaccctttaaagatggagagacccttgaaggcagcgatgccgaggagagcctggataagactgcagagtcctccctcttagaagacgaaatagcacagggtgaagagctagactcacttgatgggggggatgaaatagaaaacaatgaaaatgatgaataaccagtaccagttccagttcaagtgtttaaaacttttgacaagtggtagtcctactgtttacactcacagttaatgttcatacctagttttataagctgttctgtaacatagtgtagcaaaaaaaaaagttcaagtcatgttatacaggtgtgtcaaaaggtatcttggtcattaagtattgtgcagtgcattatttattatccctaggagagatgaaatttgagaggtgatcatgtctttttaaggaaacttacataatgctctgctttttttttttctcttggtaccattggtattataataaagagcaatttgtaactgagtggcactaatggaagaaagtgctgctcaaaggaagtatgaagttatatatttaattttttaattttaatttttaatttttttgctgtgaaggtcaagctgaaatttaccatacatatcatacttgctcatttgtttccctttttgactgtatgggggttcccacactcgtgcatacacacacatccatacactctgacaatctccacgctagtgtgaacgcctctgtcccgaggcgcagcaataataaggcagctgttgaatgtgaagggtccctttggaaaattaacctactgggagggttcttgccagacagaactacagttccattgtctcgtggtcttgtaatgcactggtaaaaacaaaataaatagatgaataaataaagagtgagagaagagagaatcaggtaccttttttaaattaaaggactttgttactttagccacaaagctaaaacagcattacctcagctctaaactagccttgaagtttacagacatgactttgtaaatgtattgtttttctttgttgtgatgtccttttatttttttctttgaaaactgctatcatgtaagataaaatgtaaattgctgccaactgtagtaatgatgcttttaataaaagtgacccatgatatgca

SEQ ID NO: 321807 - DNA, 4142 bp, Homo sapiens
cggcggcggcggcggcggcgcgggggttgagtcgtggtggtgcggacgcgctcgtgctcgggaactatcggattaaacttgaatcgagtgaaattacacaaaggagcgccgcggaggaggcggcccggggacccggacaccctgaaactcaccagagacccgttcgcccccggccaactccgtgcccgtggattcagccccctggccgcagctgccgagccaactccggagcccgctctgcgttttgttttcccctcggcactaggcagcggaggagcccgaccgacccggacctatatccagactttgcctgacactgcagggtccaagagaattaaagaaatatggaatgacatgaagaagattagttaaggattataggctttgagggcaaacacctcagtgaagtgaagcacaggcaagctcctgagctgtggtttggaggagccgtgtgttggaagaagatggcagatccaggaatgatgagtctttttggcgaggatgggaatattttcagtgaaggtcttgaaggcctcggagaatgtggttacccggaaaatccagtaaatcctatgggtcagcaaatgccaatagaccaaggctttgcctctttacagccatcccttcatcatccttcaactaatcaaaatcaaacaaagctgacacattttgatcactataatcagtatgaacaacaaaagatgcatctgatggatcagccgaacagaatgatgagcaacacccctgggaacggactcgcgtctccgcactcgcagtatcacacccctcccgttcctcaggtgccccatggtggcagtggtggcggtcagatgggtgtctaccctggcatgcagaatgagaggcatgggcaatcctttgtggacagcagctccatgtggggccccagggctgttcaggtaccagaccagatacgagccccctaccagcagcagcagccacagccgcagccaccgcagccggctccgtcggggccccctgcacagggccaccctcagcacatgcagcagatgggcagctatatggcacgtggggatttttccatgcagcagcatggtcagccacagcagaggatgagccagttttcccaaggccaagagggcctcaatcagggaaatccttttattgccacctcaggacctggccacttgtcccacgtgccccagcagagtcccagcatggcaccttccttgcgtcactcggtgcagcagttccatcaccacccctctactgctctccatggagaatccgttgcccacagtcccagattctccccgaatcctccccaacaaggggctgttaggccgcaaacccttaactttagttctcggagccagacagtcccctctcctactataaacaactcagggcagtattctcgatatccttacagtaacctaaatcagggattagttaacaatacagggatgaatcaaaatttaggccttacaaataatactccaatgaatcagtccgtaccaagataccccaatgctgtaggattcccatcaaacagtggtcaaggactaatgcaccagcagcccatccaccccagtggctcacttaaccaaatgaacacacaaactatgcatccttcacagcctcagggaacttatgcctctccacctcccatgtcacccatgaaagcaatgagtaatccagcaggcactcctcctccacaagtcaggccgggaagtgctgggataccaatggaagttggcagttatccaaatatgccccatcctcagccatctcaccagccccctggtgccatgggaatcggacagaggaatatgggccccagaaacatgcagcagtctcgtccatttataggcatgtcctcggcaccaagggaattgactgggcacatgaggccaaatggttgtcctggtgttggccttggagacccacaagcaatccaggaacgactgatacctggccaacaacatcctggtcaacagccatcttttcagcagttgccaacctgtcctccactgcagcctcacccgggcttgcaccaccagtcttcacctccacaccctcatcaccagccttggatgggtggagctatggcgcctccaatgaaggatctacccaggtggctggaagaaaatcctgaatttgcagttgctccagactggactgatatagttaagcagtctgttcaccacagaggctcacattgagatcaagttgtcttcgacagcctttatagccactgtttgcctcccctgtactccagggttttgttcctgagtcgatgtttgaccgccttctcactgggcctgtagtgcggggagagggagcgagcagaagaggaagaaggcccaaaagtgagatcgccagagcagccgcggccgccgctgctgtggcctccacgtcagggatcaaccctttgctggtgaacagcctgtttgctggaatggacctgacgagccttcagaatctccagaatctccagtcgctccagctggcaggcctcatgggcttccctccaggactggcaacagctgccaccgccggaggcgatgcgaagaaccctgctgctgtgctgcccctgatgctgccaggaatggcgggcctgcccaacgtgtttggcttgggcgggctgttgaataaccctctgtcagctgctactggaaacaccactactgcttctagtcaaggagaaccggaagacagcacttcaaaaggagaggagaaaggaaatgagaatgaagacgagaacaaagactctgagaaaagcacagatgctgtttcggctgctgactctgcgaatggatctgttggtgctgctactgccccggctggattgccctcaaacccgctagccttcaaccctttcctcctgtccacaatggccccgggcctcttctacccatccatgtttctacctccaggactggggggattgacgctgcctgggttcccagcattggcaggacttcagaatgccgtgggctccagcgaagaaaaggctgctgacaaggctgagggaggaccctttaaagatggagagacccttgaaggcagcgatgccgaggagagcctggataagactgcagagtcctccctcttagaagacgaaatagcacagggtgaagagctagactcacttgatgggggggatgaaatagaaaacaatgaaaatgatgaataaccagtaccagttccagttcaagtgtttaaaacttttgacaagtggtagtcctactgtttacactcacagttaatgttcatacctagttttataagctgttctgtaacatagtgtagcaaaaaaaaaagttcaagtcatgttatacaggtgtgtcaaaaggtatcttggtcattaagtattgtgcagtgcattatttattatccctaggagagatgaaatttgagaggtgatcatgtctttttaaggaaacttacataatgctctgctttttttttttctcttggtaccattggtattataataaagagcaatttgtaactgagtggcactaatggaagaaagtgctgctcaaaggaagtatgaagttatatatttaattttttaattttaatttttaatttttttgctgtgaaggtcaagctgaaatttaccatacatatcatacttgctcatttgtttccctttttgactgtatgggggttcccacactcgtgcatacacacacatccatacactctgacaatctccacgctagtgtgaacgcctctgtcccgaggcgcagcaataataaggcagctgttgaatgtgaagggtccctttggaaaattaacctactgggagggttcttgccagacagaactacagttccattgtctcgtggtcttgtaatgcactggtaaaaacaaaataaatagatgaataaataaagagtgagagaagagagaatcaggtaccttttttaaattaaaggactttgttactttagccacaaagctaaaacagcattacctcagctctaaactagccttgaagtttacagacatgactttgtaaatgtattgtttttctttgttgtgatgtccttttatttttttctttgaaaactgctatcatgtaagataaaatgtaaattgctgccaactgtagtaatgatgcttttaataaaagtgacccatgatatgca

SEQ ID NO: 321808 - DNA, 3848 bp, Homo sapiens
cggccgccaacgtttttattttttgttcctcccggcgcggcggcgccagcccgcgcggggaccgccaccgagcgaggacctatatccagactttgcctgacactgcagggtccaagagaattaaagaaatatggaatgacatgaagaagattagttaaggattataggctttgagggcaaacacctcagtgaagtgaagcacaggcaagctcctgagctgtggtttggaggagccgtgtgttggaagaagatggcagatccaggaatgatgagtctttttggcgaggatgggaatattttcagtgaaggtcttgaaggcctcggagaatgtggttacccggaaaatccagtaaatcctatgggtcagcaaatgccaatagaccaaggctttgcctctttacagccatcccttcatcatccttcaactaatcaaaatcaaacaaagctgacacattttgatcactataatcagtatgaacaacaaaagatgcatctgatggatcagccgaacagaatgatgagcaacacccctgggaacggactcgcgtctccgcactcgcagtatcacacccctcccgttcctcaggtgccccatggtggcagtggtggcggtcagatgggtgtctaccctggcatgcagaatgagaggcatgggcaatcctttgtggacagcagctccatgtggggccccagggctgttcaggtaccagaccagatacgagccccctaccagcagcagcagccacagccgcagccaccgcagccggctccgtcggggccccctgcacagggccaccctcagcacatgcagcagatgggcagctatatggcacgtggggatttttccatgcagcagcatggtcagccacagcagaggatgagccagttttcccaaggccaagagggcctcaatcagggaaatccttttattgccacctcaggacctggccacttgtcccacgtgccccagcagagtcccagcatggcaccttccttgcgtcactcggtgcagcagttccatcaccacccctctactgctctccatggagaatccgttgcccacagtcccagattctccccgaatcctccccaacaaggggctgttaggccgcaaacccttaactttagttctcggagccagacagtcccctctcctactataaacaactcagggcagtattctcgatatccttacagtaacctaaatcagggattagttaacaatacagggatgaatcaaaatttaggccttacaaataatactccaatgaatcagtccgtaccaagataccccaatgctgtaggattcccatcaaacagtggtcaaggactaatgcaccagcagcccatccaccccagtggctcacttaaccaaatgaacacacaaactatgcatccttcacagcctcagggaacttatgcctctccacctcccatgtcacccatgaaagcaatgagtaatccagcaggcactcctcctccacaagtcaggccgggaagtgctgggataccaatggaagttggcagttatccaaatatgccccatcctcagccatctcaccagccccctggtgccatgggaatcggacagaggaatatgggccccagaaacatgcagcagtctcgtccatttataggcatgtcctcggcaccaagggaattgactgggcacatgaggccaaatggttgtcctggtgttggccttggagacccacaagcaatccaggaacgactgatacctggccaacaacatcctggtcaacagccatcttttcagcagttgccaacctgtcctccactgcagcctcacccgggcttgcaccaccagtcttcacctccacaccctcatcaccagccttggatgggtggagctatggcgcctccaatgaaggatctacccaggtggctggaagaaaatcctgaatttgcagttgctccagactggactgatatagttaagcagtctggttttgttcctgagtcgatgtttgaccgccttctcactgggcctgtagtgcggggagagggagcgagcagaagaggaagaaggcccaaaagtgagatcgccagagcagccgcggccgccgctgctgtggcctccacgtcagggatcaaccctttgctggtgaacagcctgtttgctggaatggacctgacgagccttcagaatctccagaatctccagtcgctccagctggcaggcctcatgggcttccctccaggactggcaacagctgccaccgccggaggcgatgcgaagaaccctgctgctgtgctgcccctgatgctgccaggaatggcgggcctgcccaacgtgtttggcttgggcgggctgttgaataaccctctgtcagctgctactggaaacaccactactgcttctagtcaaggagaaccggaagacagcacttcaaaaggagaggagaaaggaaatgagaatgaagacgagaacaaagactctgagaaaagcacagatgctgtttcggctgctgactctgcgaatggatctgttggtgctgctactgccccggctggattgccctcaaacccgctagccttcaaccctttcctcctgtccacaatggccccgggcctcttctacccatccatgtttctacctccaggactggggggattgacgctgcctgggttcccagcattggcaggacttcagaatgccgtgggctccagcgaagaaaaggctgctgacaaggctgagggaggaccctttaaagatggagagacccttgaaggcagcgatgccgaggagagcctggataagactgcagagtcctccctcttagaagacgaaatagcacagggtgaagagctagactcacttgatgggggggatgaaatagaaaacaatgaaaatgatgaataaccagtaccagttccagttcaagtgtttaaaacttttgacaagtggtagtcctactgtttacactcacagttaatgttcatacctagttttataagctgttctgtaacatagtgtagcaaaaaaaaaagttcaagtcatgttatacaggtgtgtcaaaaggtatcttggtcattaagtattgtgcagtgcattatttattatccctaggagagatgaaatttgagaggtgatcatgtctttttaaggaaacttacataatgctctgctttttttttttctcttggtaccattggtattataataaagagcaatttgtaactgagtggcactaatggaagaaagtgctgctcaaaggaagtatgaagttatatatttaattttttaattttaatttttaatttttttgctgtgaaggtcaagctgaaatttaccatacatatcatacttgctcatttgtttccctttttgactgtatgggggttcccacactcgtgcatacacacacatccatacactctgacaatctccacgctagtgtgaacgcctctgtcccgaggcgcagcaataataaggcagctgttgaatgtgaagggtccctttggaaaattaacctactgggagggttcttgccagacagaactacagttccattgtctcgtggtcttgtaatgcactggtaaaaacaaaataaatagatgaataaataaagagtgagagaagagagaatcaggtaccttttttaaattaaaggactttgttactttagccacaaagctaaaacagcattacctcagctctaaactagccttgaagtttacagacatgactttgtaaatgtattgtttttctttgttgtgatgtccttttatttttttctttgaaaactgctatcatgtaagataaaatgtaaattgctgccaactgtagtaatgatgcttttaataaaagtgacccatgatatgca

SEQ ID NO: 321809 - DNA, 1451 bp, Homo sapiens
cggcggcggcggcggcggcgcgggggttgagtcgtggtggtgcggacgcgctcgtgctcgggaactatcggattaaacttgaatcgagtgaaattacacaaaggagcgccgcggaggaggcggcccggggacccggacaccctgaaactcaccagagacccgttcgcccccggccaactccgtgcccgtggattcagccccctggccgcagctgccgagccaactccggagcccgctctgcgttttgttttcccctcggcactaggcagcggaggagcccgaccgacccggacctatatccagactttgcctgacactgcagggtccaagagaattaaagaaatatggaatgacatgaagaagattagttaaggattataggctttgagggcaaacacctcagtgaagtgaagcacaggcaagctcctgagctgtggtttggaggagccgtgtgttggaagaagatggcagatccaggaatgatgagtctttttggcgaggatgggaatattttcagtgaaggtcttgaaggcctcggagaatgtggttacccggaaaatccagtaaatcctatgggtcagcaaatgccaatagaccaaggctttgcctctttacagccatcccttcatcatccttcaactaatcaaaatcaaacaaagctgacacattttgatcactataatcagtatgaacaacaaaagatgcatctgatggatcagccgaacagaatgatgagcaacacccctgggaacggactcgcgtctccgcactcgcagtatcacacccctcccgttcctcaggtgccccatggtggcagtggtggcggtcagatgggtgtctaccctggcatgcagaatgagaggcatgggcaatcctttgtggacagcagctccatgtggggccccagggctgttcaggcatgtcctcggcaccaagggaattgactgggcacatgaggccaaatggttgtcctggtgttggccttggagacccacaagcaatccaggaacgactgatacctggccaacaacatcctggtcaacagccatcttttcagcagttgccaacctgtcctccactgcagcctcacccgggcttgcaccaccagtcttcacctccacaccctcatcaccagccttgggcacagctccacccatcaccccagaacaccccgcagaaagtgcctgtgcatcagcattccccgtcggagccctttctagagaaaccagtgccggatatgactcaggttagtggaccgaatgctcagctagtgaagagtgatgattacctgccatcaatagaacagcagccacaacaaaagaagaagaaaaagaaaaacaaccacattgtagcagaggatcccagtaaaggttttggtaaagatgacttccctggtggggtagataaccaagaactaaataggaactcactggatgggtcccaagaagaaa

SEQ ID NO: 321810 - DNA, 5799 bp, Homo sapiens
ctggagttcaagatttctgatgaggaggcagatgatgcagatgctgctgggagggattccccctccaacacctcccagtcagaacagcaggaatctgttgatgcagaaggcccagtggtagaaaaaattatgagcagtcgttcagtaaaaaagcagaaggaatctggagaggaggtagaaattgaggaattctatgtgaaatacaaaaacttctcttatcttcattgtcagtgggcatctatagaagatctggaaaaagataagagaattcagcaaaaaattaaacgatttaaggcaaagcagggccagaacaagttcctttcagagattgaggatgagctttttaatccagattatgtggaggttgaccggataatggactttgcacgtagcacagatgaccggggagagcctgtgactcactatctggtgaagtggtgttcacttccttatgaagacagcacgtgggagcggaggcaggacatagatcaagcaaagatcgaggagtttgagaaactaatgtccagggagccggaaacagagcgtgtggagcgacctcctgctgatgattggaagaaatcggagagttccagggagtataaaaacaataacaaactcagggaataccagttggagggagtaaactggctacttttcaattggtacaacatgcgaaactgcattttagcagatgaaatgggtttgggaaaaactatccagtccattacatttctctatgagatatatttgaaaggaatccatggcccttttttagtaattgccccattgtccacaatccccaactgggaaagggaattccgaacctggacagagttgaacgtggttgtgtatcatgggagtcaagctagtcgtcggaccattcagttgtatgaaatgtacttcaaagatccccagggtcgagtgataaaggggtcctataagtttcatgccatcatcactacatttgagatgattttgactgattgtcctgagctgcggaatattccatggcgctgtgtagtcattgatgaagcccacaggctgaagaacaggaactgcaagctgttggagggactcaagatgatggacttggaacacaaagtgctgctgacgggaaccccactccagaacactgtggaagaactcttcagcttgcttcatttcttggaaccaagtcgcttcccttcagaaaccacatttatgcaagaatttggtgatctaaaaacagaagagcaggtgcaaaaacttcaagctattctaaagccaatgatgttgagacgtctcaaagaggatgtagaaaagaacttggcccccaaagaagaaactattattgaagttgagctaacaaacattcagaagaaatattaccgagccatccttgagaagaatttcacatttctttccaaaggcggtggtcaagctaacgtacctaacctattaaacactatgatggaattgcggaagtgctgcaatcatccgtaccttatcaatggtgctgaagagaaaattttggaagagtttaaagaaacacacaatgcagagtctccagattttcagctccaggcaatgatccaggctgctggcaagctagtgctgattgacaagctgctgccaaaactgaaggctggtggccacagggtgcttatcttttcccagatggtgcgctgcttggacatactggaagactacctcattcaaagacggtacccatatgaaaggatcgacggccgagtaagaggcaacctccgccaggcagctatcgacagattctccaaacctgattctgataggtttgttttcctcctgtgtacaagggcaggaggtttaggcattaacctcactgctgctgatacctgcatcatctttgattcagactggaatccccaaaatgacctccaggctcaggctagatgtcatagaataggacagagcaaatctgtgaaaatctacaggctgattacaagaaattcctatgaaagggaaatgttcgacaaggctagtttgaaactgggcctggataaagctgtgctacagtctatgagtggaagagaaaatgctaccaatggggtacaacagctttccaagaaagaaatagaggatcttctacgaaaaggggcctatggtgcactcatggatgaggaggatgaagggtctaaattctgtgaagaagatattgatcagatcctcctacgtcgaacccacaccattaccattgagtcagaagggaaaggttccacatttgctaaggccagttttgttgcatctggaaataggacagatatttccttggatgatccaaatttctggcaaaagtgggctaagaaggctgaattggatattgatgccttaaatgggaggaacaacctggttattgatactccaagagtgagaaagcagaccaggctctacagtgcagtgaaggaagatgagctgatggagttctcagacttggaaagtgattctgaagaaaagccctgtgcaaagccacggcgtccccaggataagtcacagggctatgcaaggagtgaatgtttcagggtggagaagaatctgcttgtctatggttggggacggtggacagacattctttcccacggacgctataaacgccaactcactgagcaagatgtagaaaccatctgcagaaccatcctggtgtactgtcttaatcattacaaaggggatgagaatatcaaaagcttcatctgggatctgatcacacccacagcggatggccagactcgagccttggtcaaccattccggtttgtcagctcctgtgccaaggggaaggaagggaaagaaggtgaaagcccagagcacacagccggtggtgcaggatgccgactggctggccagctgcaacccagatgccctgttccaggaggacagctacaagaaacacctgaagcatcactgtaacaaggtcctgctgcgtgtccgcatgctgtactacctaagacaagaagtgataggagaccaggcggataagatcttagagggtgctgactcaagtgaagccgatgtgtggatccctgaacctttccatgctgaagttcctgcagattggtgggataaggaagcagacaaatccctcttaattggagtgttcaaacatggctatgagaagtacaactccatgcgagctgaccccgcgctgtgctttctggaacgagtcggtatgcctgatgccaaggccatagctgccgagcaaagaggaacagacatgctagcagatggtggtgacgggggagaatttgatagagaagatgaagacccagaatataaaccaaccagaacaccgttcaaagatgaaatagatgaatttgcaaattctccttcagaggataaggaagaatccatggaaatacatgccacaggcaagcacagtgagagtaatgctgagttaggccaactttactggcctaacacttcaaccctgactacacgtctgcgccggctcattactgcctatcagcgcagctataaaaggcaacagatgaggcaagaggccctaatgaagactgaccggcgcagacggcggcctcgagaggaagtgagagctctggaagcggaaagggaagctattatatctgagaagcggcaaaagtggacaagaagagaagaggctgatttttaccgtgtggtatccacctttggggttatttttgaccctgtgaaacagcaatttgactggaaccaatttagagcctttgccaggcttgacaaaaaatctgatgagagtttggagaaatacttcagttgttttgtggccatgtgtaggcgagtatgtcgaatgcccgtcaagccagatgatgaaccgcccgacctctcctccataattgagccgatcacagaggagcgagcctctcgaactctgtaccgcattgagctgctacggaagatccgcgagcaggttctccatcacccccagctgggagagaggcttaagctctgccagccaagcttggatctgccagagtggtgggagtgtggacggcatgaccgagacttgctggttggtgctgctaaacacggggtcagtcggacggattatcacatcctcaatgaccctgagttatccttcttggatgcacataaaaactttgctcaaaacagaggggcaggtaatacatcttccttgaacccactggcagttggatttgtccagactcctccagtcatctcatctgctcatattcaagatgagagggtactggaacaagccgaaggcaaagtggaggagcctgaaaacccagctgccaaggagaaatgtgagggcaaagaagaggaagaagaaaccgatggcagcgggaaggagagcaagcaggaatgtgaggcagaggccagctctgtgaaaaatgaactgaaaggtgttgaggtcggcgcagacactgggtccaaatctatttcagagaaaggttccgaagaggatgaagaggaaaagctggaggatgacgataagtcggaagagtcttcccagcccgaagcaggagctgtctctagagggaagaattttgatgaagaaagcaatgcttccatgagcactgctagagatgaaacccgagatggattctacatggaggacggagatccttcagtagctcagctccttcatgaaagaacatttgccttctcgttttggcctaaggatagagtaatgataaaccgcttagacaacatctgtgaagcagtgttgaaaggcaaatggccagtaaataggcgccagatgtttgatttccaaggcctcatcccaggttacacacccaccacagtggacagccccttgcagaagaggagctttgctgagctctccatggtcggccaagccagcattagtgggagtgaggacatcactacgtctcctcagttgtcaaaggaagatgccctcaacctctctgtccctcgccagcggaggaggaggaggagaaaaatcgaaattgaggccgaaagagctgccaagaggcgaaatctcatggagatggttgcccagcttcgagagtctcaggtggtctcagaaaatggacaagaaaaagttgtagatttatcaaaggcctcaagagaggcaacaagctctacctcaaatttttcatctctttcttcaaagtttatcttgcctaatgtctcaacaccagtgtctgatgcctttaagactcaaatggaactgctccaagcaggcctttcgcgcacacccacaaggcatctccttaatggctccctagtggatggagagcctcccatgaagaggaggcggggaaggaggaaaaatgtggagggacttgatctgcttttcatgagccacaaacggacgtcattgagtgcagaggatgctgaggtgaccaaagcttttgaagaagatatagagaccccaccaacaagaaacattccttctcccggacagctggacccagacacacggatccctgttatcaatcttgaagatgggactaggctggtgggggaagatgctcctaaaaataaggatttagttgaatggctgaagctgcaccctacttacactgttgatatgccaagttatgtaccagtgagtattgcagagtttagagttggaaggaatcttgcaggccggtccacttcattcccttacaacatagaaatccctgacagctggtccctctgccttttccttgaatgtttcctggtctcaaacatttcccaggtctttgttgttgaatcttcttcattacagatactagcttcaggtctgtcttactgaaggcagccttacagttatttgaagatgcgcgttatgcatttccttactgtttgcttctcccat

SEQ ID NO: 321811 - DNA, 478 bp, Homo sapiens
atggcttgtttctgcagcttaaaagggagctctctaagccttaactgagtttgcgagcttatatttcactggccttgcttagaaataagatagctgctgtttcctcagctctgtgcaccagtcatgaatgcttaattccttaagcttcttgttccttatttctaaaagccagcccatatagcagtactgttttggctcactgcaactctgttctgttggaatttttcaataggaagatgccctcaacctctctgtccctcgccagcggaggaggaggaggagaaaaatcgaaattgaggccgaaagagctgccaagaggcgaaatctcatggagatggttgcccagcttcgagagtctcaggtggtctcagaaaatggacaagaaaaagttgtagatttatcaaaggcctcaagagaggcaacaagctctacctcaaatttttcatctctttcttcaaagtttatcttgcctaatgtc

SEQ ID NO: 321812 - DNA, 330 bp, Homo sapiens
tactttttgtcctccagttgacttttaaacattttatgctcttttgcatcttgatggatgtatttatctagtaattttaaccagggctttgttaaaatttcttgtgacttttcttctccctccaggatagagtaatgataaaccgcttagacaacatctgtgaagcagtgttgaaaggcaaatggccagtaaataggcgccagatgtttgatttccaaggcctcatcccaggttacacacccaccacagtggacagccccttgcagaagaggagctttgctgagctctccatggtcggccaagccagcattagtgggagtgaggacatca

SEQ ID NO: 321813 - DNA, 2385 bp, Homo sapiens
cggcggcggcggcggcggcgcgggggttgagtcgtggtggtgcggacgcgctcgtgctcgggaactatcggattaaacttgaatcgagtgaaattacacaaaggagcgccgcggaggaggcggcccggggacccggacaccctgaaactcaccagagacccgttcgcccccggccaactccgtgcccgtggattcagccccctggccgcagctgccgagccaactccggagcccgctctgcgttttgttttcccctcggcactaggcagcggaggagcccgaccgacccggacctatatccagactttgcctgacactgcagggtccaagagaattaaagaaatatggaatgacatgaagaagattagttaaggattataggctttgagggcaaacacctcagtgaagtgaagcacaggcaagctcctgagctgtggtttggaggagccgtgtgttggaagaagatggcagatccaggaatgatgagtctttttggcgaggatgggaatattttcagtgaaggtcttgaaggcctcggagaatgtggttacccggaaaatccagtaaatcctatgggtcagcaaatgccaatagaccaaggctttgcctctttacagccatcccttcatcatccttcaactaatcaaaatcaaacaaagctgacacattttgatcactataatcagtatgaacaacaaaagatgcatctgatggatcagccgaacagaatgatgagcaacacccctgggaacggactcgcgtctccgcactcgcagtatcacacccctcccgttcctcaggtgccccatggtggcagtggtggcggtcagatgggtgtctaccctggcatgcagaatgagaggcatgggcaatcctttgtggacagcagctccatgtggggccccagggctgttcaggtaccagaccagatacgagccccctaccagcagcagcagccacagccgcagccaccgcagccggctccgtcggggccccctgcacagggccaccctcagcacatgcagcagatgggcagctatatggcacgtggggatttttccatgcagcagcatggtcagccacagcagaggatgagccagttttcccaaggccaagagggcctcaatcagggaaatccttttattgccacctcaggacctggccacttgtcccacgtgccccagcagagtcccagcatggcaccttccttgcgtcactcggtgcagcagttccatcaccacccctctactgctctccatggagaatccgttgcccacagtcccagattctccccgaatcctccccaacaaggggctgttaggccgcaaacccttaactttagttctcggagccagacagtcccctctcctactataaacaactcagggcagtattctcgatatccttacagtaacctaaatcagggattagttaacaatacagggatgaatcaaaatttaggccttacaaataatactccaatgaatcagtccgtaccaagataccccaatgctgtaggattcccatcaaacagtggtcaaggactaatgcaccagcagcccatccaccccagtggctcacttaaccaaatgaacacacaaactatgcatccttcacagcctcagggaacttatgcctctccacctcccatgtcacccatgaaagcaatgagtaatccagcaggcactcctcctccacaagtcaggccgggaagtgctgggataccaatggaagttggcagttatccaaatatgccccatcctcagccatctcaccagccccctggtgccatgggaatcggacagaggaatatgggccccagaaacatgcagcagtctcgtccatttataggcatgtcctcggcaccaagggaattgactgggcacatgaggccaaatggttgtcctggtgttggccttggagacccacaagcaatccaggaacgactgatacctggccaacaacatcctggtcaacagccatcttttcagcagttgccaacctgtcctccactgcagcctcacccgggcttgcaccaccagtcttcacctccacaccctcatcaccagccttgggcacagctccacccatcaccccagaacaccccgcagaaagtgcctgtgcatcagcattccccgtcggagccctttctagagaaaccagtgccggatatgactcaggttagtggaccgaatgctcagctagtgaagagtgatgattacctgccatcaatagaacagcagccacaacaaaagaagaagaaaaagaaaaacaaccacattgtagcagaggatcccagtaaaggttttggtaaagatgacttccctggtggggtagataaccaagaactaaataggaactcactggatgggtcccaagaagaaa

SEQ ID NO: 321814 - DNA, 7768 bp, Homo sapiens
ctggagttcaagatttctgatgaggaggcagatgatgcagatgctgctgggagggattccccctccaacacctcccagtcagaacagcaggaatctgttgatgcagaaggcccagtggtagaaaaaattatgagcagtcgttcagtaaaaaagcagaaggaatctggagaggaggtagaaattgaggaattctatgtgaaatacaaaaacttctcttatcttcattgtcagtgggcatctatagaagatctggaaaaagataagagaattcagcaaaaaattaaacgatttaaggcaaagcagggccagaacaagttcctttcagagattgaggatgagctttttaatccagattatgtggaggttgaccggataatggactttgcacgtagcacagatgaccggggagagcctgtgactcactatctggtgaagtggtgttcacttccttatgaagacagcacgtgggagcggaggcaggacatagatcaagcaaagatcgaggagtttgagaaactaatgtccagggagccggaaacagagcgtgtggagcgacctcctgctgatgattggaagaaatcggagagttccagggagtataaaaacaataacaaactcagggaataccagttggagggagtaaactggctacttttcaattggtacaacatgcgaaactgcattttagcagatgaaatgggtttgggaaaaactatccagtccattacatttctctatgagatatatttgaaaggaatccatggcccttttttagtaattgccccattgtccacaatccccaactgggaaagggaattccgaacctggacagagttgaacgtggttgtgtatcatgggagtcaagctagtcgtcggaccattcagttgtatgaaatgtacttcaaagatccccagggtcgagtgataaaggggtcctataagtttcatgccatcatcactacatttgagatgattttgactgattgtcctgagctgcggaatattccatggcgctgtgtagtcattgatgaagcccacaggctgaagaacaggaactgcaagctgttggagggactcaagatgatggacttggaacacaaagtgctgctgacgggaaccccactccagaacactgtggaagaactcttcagcttgcttcatttcttggaaccaagtcgcttcccttcagaaaccacatttatgcaagaatttggtgatctaaaaacagaagagcaggtgcaaaaacttcaagctattctaaagccaatgatgttgagacgtctcaaagaggatgtagaaaagaacttggcccccaaagaagaaactattattgaagttgagctaacaaacattcagaagaaatattaccgagccatccttgagaagaatttcacatttctttccaaaggcggtggtcaagctaacgtacctaacctattaaacactatgatggaattgcggaagtgctgcaatcatccgtaccttatcaatggtgctgaagagaaaattttggaagagtttaaagaaacacacaatgcagagtctccagattttcagctccaggcaatgatccaggctgctggcaagctagtgctgattgacaagctgctgccaaaactgaaggctggtggccacagggtgcttatcttttcccagatggtgcgctgcttggacatactggaagactacctcattcaaagacggtacccatatgaaaggatcgacggccgagtaagaggcaacctccgccaggcagctatcgacagattctccaaacctgattctgataggtttgttttcctcctgtgtacaagggcaggaggtttaggcattaacctcactgctgctgatacctgcatcatctttgattcagactggaatccccaaaatgacctccaggctcaggctagatgtcatagaataggacagagcaaatctgtgaaaatctacaggctgattacaagaaattcctatgaaagggaaatgttcgacaaggctagtttgaaactgggcctggataaagctgtgctacagtctatgagtggaagagaaaatgctaccaatggggtacaacagctttccaagaaagaaatagaggatcttctacgaaaaggggcctatggtgcactcatggatgaggaggatgaagggtctaaattctgtgaagaagatattgatcagatcctcctacgtcgaacccacaccattaccattgagtcagaagggaaaggttccacatttgctaaggccagttttgttgcatctggaaataggacagatatttccttggatgatccaaatttctggcaaaagtgggctaagaaggctgaattggatattgatgccttaaatgggaggaacaacctggttattgatactccaagagtgagaaagcagaccaggctctacagtgcagtgaaggaagatgagctgatggagttctcagacttggaaagtgattctgaagaaaagccctgtgcaaagccacggcgtccccaggataagtcacagggctatgcaaggagtgaatgtttcagggtggagaagaatctgcttgtctatggttggggacggtggacagacattctttcccacggacgctataaacgccaactcactgagcaagatgtagaaaccatctgcagaaccatcctggtgtactgtcttaatcattacaaaggggatgagaatatcaaaagcttcatctgggatctgatcacacccacagcggatggccagactcgagccttggtcaaccattccggtttgtcagctcctgtgccaaggggaaggaagggaaagaaggtgaaagcccagagcacacagccggtggtgcaggatgccgactggctggccagctgcaacccagatgccctgttccaggaggacagctacaagaaacacctgaagcatcactgtaacaaggtcctgctgcgtgtccgcatgctgtactacctaagacaagaagtgataggagaccaggcggataagatcttagagggtgctgactcaagtgaagccgatgtgtggatccctgaacctttccatgctgaagttcctgcagattggtgggataaggaagcagacaaatccctcttaattggagtgttcaaacatggctatgagaagtacaactccatgcgagctgaccccgcgctgtgctttctggaacgagtcggtatgcctgatgccaaggccatagctgccgagcaaagaggaacagacatgctagcagatggtggtgacgggggagaatttgatagagaagatgaagacccagaatataaaccaaccagaacaccgttcaaagatgaaatagatgaatttgcaaattctccttcagaggataaggaagaatccatggaaatacatgccacaggcaagcacagtgagagtaatgctgagttaggccaactttactggcctaacacttcaaccctgactacacgtctgcgccggctcattactgcctatcagcgcagctataaaaggcaacagatgaggcaagaggccctaatgaagactgaccggcgcagacggcggcctcgagaggaagtgagagctctggaagcggaaagggaagctattatatctgagaagcggcaaaagtggacaagaagagaagaggctgatttttaccgtgtggtatccacctttggggttatttttgaccctgtgaaacagcaatttgactggaaccaatttagagcctttgccaggcttgacaaaaaatctgatgagagtttggagaaatacttcagttgttttgtggccatgtgtaggcgagtatgtcgaatgcccgtcaagccagatgatgaaccgcccgacctctcctccataattgagccgatcacagaggagcgagcctctcgaactctgtaccgcattgagctgctacggaagatccgcgagcaggttctccatcacccccagctgggagagaggcttaagctctgccagccaagcttggatctgccagagtggtgggagtgtggacggcatgaccgagacttgctggttggtgctgctaaacacggggtcagtcggacggattatcacatcctcaatgaccctgagttatccttcttggatgcacataaaaactttgctcaaaacagaggggcaggtaatacatcttccttgaacccactggcagttggatttgtccagactcctccagtcatctcatctgctcatattcaagatgagagggtactggaacaagccgaaggcaaagtggaggagcctgaaaacccagctgccaaggagaaatgtgagggcaaagaagaggaagaagaaaccgatggcagcgggaaggagagcaagcaggaatgtgaggcagaggccagctctgtgaaaaatgaactgaaaggtgttgaggtcggcgcagacactgggtccaaatctatttcagagaaaggttccgaagaggatgaagaggaaaagctggaggatgacgataagtcggaagagtcttcccagcccgaagcaggagctgtctctagagggaagaattttgatgaagaaagcaatgcttccatgagcactgctagagatgaaacccgagatggattctacatggaggacggagatccttcagtagctcagctccttcatgaaagaacatttgccttctcgttttggcctaaggatagagtaatgataaaccgcttagacaacatctgtgaagcagtgttgaaaggcaaatggccagtaaataggcgccagatgtttgatttccaaggcctcatcccaggttacacacccaccacagtggacagccccttgcagaagaggagctttgctgagctctccatggtcggccaagccagcattagtgggagtgaggacatcactacgtctcctcagttgtcaaaggaagatgccctcaacctctctgtccctcgccagcggaggaggaggaggagaaaaatcgaaattgaggccgaaagagctgccaagaggcgaaatctcatggagatggttgcccagcttcgagagtctcaggtggtctcagaaaatggacaagaaaaagttgtagatttatcaaaggcctcaagagaggcaacaagctctacctcaaatttttcatctctttcttcaaagtttatcttgcctaatgtctcaacaccagtgtctgatgcctttaagactcaaatggaactgctccaagcaggcctttcgcgcacacccacaaggcatctccttaatggctccctagtggatggagagcctcccatgaagaggaggcggggaaggaggaaaaatgtggagggacttgatctgcttttcatgagccacaaacggacgtcattgagtgcagaggatgctgaggtgaccaaagcttttgaagaagatatagagaccccaccaacaagaaacattccttctcccggacagctggacccagacacacggatccctgttatcaatcttgaagatgggactaggctggtgggggaagatgctcctaaaaataaggatttagttgaatggctgaagctgcaccctacttacactgttgatatgccaagttatgtaccaaagaatgcagatgtgctgttttcctcatttcagaaaccgaaacagaaacgacatagatgtcgaaaccctaataaattggatataaacactttgacaggagaagaaagggtgcctgttgtcaataaacgaaatgggaagaagatgggtggagctatggcgcctccaatgaaggatctacccaggtggctggaagaaaatcctgaatttgcagttgctccagactggactgatatagttaagcagtctggttttgttcctgagtcgatgtttgaccgccttctcactgggcctgtagtgcggggagagggagcgagcagaagaggaagaaggcccaaaagtgagatcgccagagcagccgcggccgccgctgctgtggcctccacgtcagggatcaaccctttgctggtgaacagcctgtttgctggaatggacctgacgagccttcagaatctccagaatctccagtcgctccagctggcaggcctcatgggcttccctccaggactggcaacagctgccaccgccggaggcgatgcgaagaaccctgctgctgtgctgcccctgatgctgccaggaatggcgggcctgcccaacgtgtttggcttgggcgggctgttgaataaccctctgtcagctgctactggaaacaccactactgcttctagtcaaggagaaccggaagacagcacttcaaaaggagaggagaaaggaaatgagaatgaagacgagaacaaagactctgagaaaagcacagatgctgtttcggctgctgactctgcgaatggatctgttggtgctgctactgccccggctggattgccctcaaacccgctagccttcaaccctttcctcctgtccacaatggccccgggcctcttctacccatccatgtttctacctccaggactggggggattgacgctgcctgggttcccagcattggcaggacttcagaatgccgtgggctccagcgaagaaaaggctgctgacaaggctgagggaggaccctttaaagatggagagacccttgaaggcagcgatgccgaggagagcctggataagactgcagagtcctccctcttagaagacgaaatagcacagggtgaagagctagactcacttgatgggggggatgaaatagaaaacaatgaaaatgatgaataaccagtaccagttccagttcaagtgtttaaaacttttgacaagtggtagtcctactgtttacactcacagttaatgttcatacctagttttataagctgttctgtaacatagtgtagcaaaaaaaaaagttcaagtcatgttatacaggtgtgtcaaaaggtatcttggtcattaagtattgtgcagtgcattatttattatccctaggagagatgaaatttgagaggtgatcatgtctttttaaggaaacttacataatgctctgctttttttttttctcttggtaccattggtattataataaagagcaatttgtaactgagtggcactaatggaagaaagtgctgctcaaaggaagtatgaagttatatatttaattttttaattttaatttttaatttttttgctgtgaaggtcaagctgaaatttaccatacatatcatacttgctcatttgtttccctttttgactgtatgggggttcccacactcgtgcatacacacacatccatacactctgacaatctccacgctagtgtgaacgcctctgtcccgaggcgcagcaataataaggcagctgttgaatgtgaagggtccctttggaaaattaacctactgggagggttcttgccagacagaactacagttccattgtctcgtggtcttgtaatgcactggtaaaaacaaaataaatagatgaataaataaagagtgagagaagagagaatcaggtaccttttttaaattaaaggactttgttactttagccacaaagctaaaacagcattacctcagctctaaactagccttgaagtttacagacatgactttgtaaatgtattgtttttctttgttgtgatgtccttttatttttttctttgaaaactgctatcatgtaagataaaatgtaaattgctgccaactgtagtaatgatgcttttaataaaagtgacccatgatatgcagagatgtaattatagaatgtagtatatagggaaactggtgttcactctattttttttgtattcgcaatagatgcaaatacagcattctggcttttg

SEQ ID NO: 321815 - DNA, 4000 bp, Homo sapiens
ttgggctccaactcaagtgcgagcgggcgatgggcgcgcgggcgcggggcggctgagcagcggcggcggcggctcggggacggcggcgacccccgcctcccgcccccgcctcccgctccggaccgaccacgccgcgctcgccgggagctgcggccgcaccggcgcgaacaaagtgcgttcctcccggcgcggcggcgccagcccgcgcggggaccgccaccgagcgaggacctatatccagactttgcctgacactgcagggtccaagagaattaaagaaatatggaatgacatgaagaagattagttaaggattataggctttgagggcaaacacctcagtgaagtgaagcacaggcaagctcctgagctgtggtttggaggagccgtgtgttggaagaagatggcagatccaggaatgatgagtctttttggcgaggatgggaatattttcagtgaaggtcttgaaggcctcggagaatgtggttacccggaaaatccagtaaatcctatgggtcagcaaatgccaatagaccaaggctttgcctctttacagccatcccttcatcatccttcaactaatcaaaatcaaacaaagctgacacattttgatcactataatcagtatgaacaacaaaagatgcatctgatggatcagccgaacagaatgatgagcaacacccctgggaacggactcgcgtctccgcactcgcagtatcacacccctcccgttcctcaggtgccccatggtggcagtggtggcggtcagatgggtgtctaccctggcatgcagaatgagaggcatgggcaatcctttgtggacagcagctccatgtggggccccagggctgttcaggtaccagaccagatacgagccccctaccagcagcagcagccacagccgcagccaccgcagccggctccgtcggggccccctgcacagggccaccctcagcacatgcagcagatgggcagctatatggcacgtggggatttttccatgcagcagcatggtcagccacagcagaggatgagccagttttcccaaggccaagagggcctcaatcagggaaatccttttattgccacctcaggacctggccacttgtcccacgtgccccagcagagtcccagcatggcaccttccttgcgtcactcggtgcagcagttccatcaccacccctctactgctctccatggagaatccgttgcccacagtcccagattctccccgaatcctccccaacaaggggctgttaggccgcaaacccttaactttagttctcggagccagacagtcccctctcctactataaacaactcagggcagtattctcgatatccttacagtaacctaaatcagggattagttaacaatacagggatgaatcaaaatttaggccttacaaataatactccaatgaatcagtccgtaccaagataccccaatgctgtaggattcccatcaaacagtggtcaaggactaatgcaccagcagcccatccaccccagtggctcacttaaccaaatgaacacacaaactatgcatccttcacagcctcagggaacttatgcctctccacctcccatgtcacccatgaaagcaatgagtaatccagcaggcactcctcctccacaagtcaggccgggaagtgctgggataccaatggaagttggcagttatccaaatatgccccatcctcagccatctcaccagccccctggtgccatgggaatcggacagaggaatatgggccccagaaacatgcagcagtctcgtccatttataggcatgtcctcggcaccaagggaattgactgggcacatgaggccaaatggttgtcctggtgttggccttggagacccacaagcaatccaggaacgactgatacctggccaacaacatcctggtcaacagccatcttttcagcagttgccaacctgtcctccactgcagcctcacccgggcttgcaccaccagtcttcacctccacaccctcatcaccagccttggatgggtggagctatggcgcctccaatgaaggatctacccaggtggctggaagaaaatcctgaatttgcagttgctccagactggactgatatagttaagcagtctggttttgttcctgagtcgatgtttgaccgccttctcactgggcctgtagtgcggggagagggagcgagcagaagaggaagaaggcccaaaagtgagatcgccagagcagccgcggccgccgctgctgtggcctccacgtcagggatcaaccctttgctggtgaacagcctgtttgctggaatggacctgacgagccttcagaatctccagaatctccagtcgctccagctggcaggcctcatgggcttccctccaggactggcaacagctgccaccgccggaggcgatgcgaagaaccctgctgctgtgctgcccctgatgctgccaggaatggcgggcctgcccaacgtgtttggcttgggcgggctgttgaataaccctctgtcagctgctactggaaacaccactactgcttctagtcaaggagaaccggaagacagcacttcaaaaggagaggagaaaggaaatgagaatgaagacgagaacaaagactctgagaaaagcacagatgctgtttcggctgctgactctgcgaatggatctgttggtgctgctactgccccggctggattgccctcaaacccgctagccttcaaccctttcctcctgtccacaatggccccgggcctcttctacccatccatgtttctacctccaggactggggggattgacgctgcctgggttcccagcattggcaggacttcagaatgccgtgggctccagcgaagaaaaggctgctgacaaggctgagggaggaccctttaaagatggagagacccttgaaggcagcgatgccgaggagagcctggataagactgcagagtcctccctcttagaagacgaaatagcacagggtgaagagctagactcacttgatgggggggatgaaatagaaaacaatgaaaatgatgaataaccagtaccagttccagttcaagtgtttaaaacttttgacaagtggtagtcctactgtttacactcacagttaatgttcatacctagttttataagctgttctgtaacatagtgtagcaaaaaaaaaagttcaagtcatgttatacaggtgtgtcaaaaggtatcttggtcattaagtattgtgcagtgcattatttattatccctaggagagatgaaatttgagaggtgatcatgtctttttaaggaaacttacataatgctctgctttttttttttctcttggtaccattggtattataataaagagcaatttgtaactgagtggcactaatggaagaaagtgctgctcaaaggaagtatgaagttatatatttaattttttaattttaatttttaatttttttgctgtgaaggtcaagctgaaatttaccatacatatcatacttgctcatttgtttccctttttgactgtatgggggttcccacactcgtgcatacacacacatccatacactctgacaatctccacgctagtgtgaacgcctctgtcccgaggcgcagcaataataaggcagctgttgaatgtgaagggtccctttggaaaattaacctactgggagggttcttgccagacagaactacagttccattgtctcgtggtcttgtaatgcactggtaaaaacaaaataaatagatgaataaataaagagtgagagaagagagaatcaggtaccttttttaaattaaaggactttgttactttagccacaaagctaaaacagcattacctcagctctaaactagccttgaagtttacagacatgactttgtaaatgtattgtttttctttgttgtgatgtccttttatttttttctttgaaaactgctatcatgtaagataaaatgtaaattgctgccaactgtagtaatgatgcttttaataaaagtgacccatgatatgca

SEQ ID NO: 321816 - DNA, 3516 bp, Homo sapiens
ggacgcgtgggtcgacccacgcgtcgatgggtcagcaaatgccaatagaccaaggctttgcctctttacagccatcccttcatcatccttcaactaatcaaaatcaaacaaagctgacacattttgatcactataatcagtatgaacaacaaaagatgcatctgatggatcagccgaacagaatgatgagcaacacccctgggaacggactcgcgtctccgcactcgcagtatcacacccctcccgttcctcaggtgccccatggtggcagtggtggcggtcagatgggtgtctaccctggcatgcagaatgagaggcatgggcaatcctttgtggacagcagctccatgtggggccccagggctgttcaggtaccagaccagatacgagccccctaccagcagcagcagccacagccgcagccaccgcagccggctccgtcggggccccctgcacagggccaccctcagcacatgcagcagatgggcagctatatggcacgtggggatttttccatgcagcagcatggtcagccacagcagaggatgagccagttttcccaaggccaagagggcctcaatcagggaaatccttttattgccacctcaggacctggccacttgtcccacgtgccccagcagagtcccagcatggcaccttccttgcgtcactcggtgcagcagttccatcaccacccctctactgctctccatggagaatccgttgcccacagtcccagattctccccgaatcctccccaacaaggggctgttaggccgcaaacccttaactttagttctcggagccagacagtcccctctcctactataaacaactcagggcagtattctcgatatccttacagtaacctaaatcagggattagttaacaatacagggatgaatcaaaatttaggccttacaaataatactccaatgaatcagtccgtaccaagataccccaatgctgtaggattcccatcaaacagtggtcaaggactaatgcaccagcagcccatccaccccagtggctcacttaaccaaatgaacacacaaactatgcatccttcacagcctcagggaacttatgcctctccacctcccatgtcacccatgaaagcaatgagtaatccagcaggcactcctcctccacaagtcaggccgggaagtgctgggataccaatggaagttggcagttatccaaatatgccccatcctcagccatctcaccagccccctggtgccatgggaatcggacagaggaatatgggccccagaaacatgcagcagtctcgtccatttataggcatgtcctcggcaccaagggaattgactgggcacatgaggccaaatggttgtcctggtgttggccttggagacccacaagcaatccaggaacgactgatacctggccaacaacatcctggtcaacagccatcttttcagcagttgccaacctgtcctccactgcagcctcacccgggcttgcaccaccagtcttcacctccacaccctcatcaccagccttggatgggtggagctatggcgcctccaatgaaggatctacccaggtggctggaagaaaatcctgaatttgcagttgctccagactggactgatatagttaagcagtctggttttgttcctgagtcgatgtttgaccgccttctcactgggcctgtagtgcggggagagggagcgagcagaagaggaagaaggcccaaaagtgagatcgccagagcagccgcggccgccgctgctgtggcctccacgtcagggatcaaccctttgctggtgaacagcctgtttgctggaatggacctgacgagccttcagaatctccagaatctccagtcgctccagctggcaggcctcatgggcttccctccaggactggcaacagctgccaccgccggaggcgatgcgaagaaccctgctgctgtgctgcccctgatgctgccaggaatggcgggcctgcccaacgtgtttggcttgggcgggctgttgaataaccctctgtcagctgctactggaaacaccactactgcttctagtcaaggagaaccggaagacagcacttcaaaaggagaggagaaaggaaatgagaatgaagacgagaacaaagactctgagaaaagcacagatgctgtttcggctgctgactctgcgaatggatctgttggtgctgctactgccccggctggattgccctcaaacccgctagccttcaaccctttcctcctgtccacaatggccccgggcctcttctacccatccatgtttctacctccaggactggggggattgacgctgcctgggttcccagcattggcaggacttcagaatgccgtgggctccagcgaagaaaaggctgctgacaaggctgagggaggaccctttaaagatggagagacccttgaaggcagcgatgccgaggagagcctggataagactgcagagtcctccctcttagaagacgaaatagcacagggtgaagagctagactcacttgatgggggggatgaaatagaaaacaatgaaaatgatgaataaccagtaccagttccagttcaagtgtttaaaacttttgacaagtggtagtcctactgtttacactcacagttaatgttcatacctagttttataagctgttctgtaacatagtgtagcaaaaaaaaaagttcaagtcatgttatacaggtgtgtcaaaaggtatcttggtcattaagtattgtgcagtgcattatttattatccctaggagagatgaaatttgagaggtgatcatgtctttttaaggaaacttacataatgctctgctttttttttttctcttggtaccattggtattataataaagagcaatttgtaactgagtggcactaatggaagaaagtgctgctcaaaggaagtatgaagttatatatttaattttttaattttaatttttaatttttttgctgtgaaggtcaagctgaaatttaccatacatatcatacttgctcatttgtttccctttttgactgtatgggggttcccacactcgtgcatacacacacatccatacactctgacaatctccacgctagtgtgaacgcctctgtcccgaggcgcagcaataataaggcagctgttgaatgtgaagggtccctttggaaaattaacctactgggagggttcttgccagacagaactacagttccattgtctcgtggtcttgtaatgcactggtaaaaacaaaataaatagatgaataaataaagagtgagagaagagagaatcaggtaccttttttaaattaaaggactttgttactttagccacaaagctaaaacagcattacctcagctctaaactagccttgaagtttacagacatgactttgtaaatgtattgtttttctttgttgtgatgtccttttatttttttctttgaaaactgctatcatgtaagataaaatgtaaattgctgccaactgtagtaatgatgcttttaataaaagtgacccatgatatgca

SEQ ID NO: 321817 - DNA, 773 bp, Homo sapiens
tgtcgctctagaggtccctggcaggctctctactcccatgtcacccatgaaagcaatgagtaatccagcaggcactcctcctccacaagtcaggccgggaagtgctgggataccaatggaagttggcagttatccaaatatgccccatcctcagccatctcaccagccccctggtgccatgggaatcggacagaggaatatgggccccagaaacatgcagcagtctcgtccatttataggcatgtcctcggcaccaagggaattgactgggcacatgaggccaaatggttgtcctggtgttggccttggagacccacaagcaatccaggaacgactgatacctggccaacaacatcctggtcaacagccatcttttcagcagttgccaacctgtcctccactgcagcctcacccgggcttgcaccaccagtcttcacctccacaccctcatcaccagccttgggcacagctccacccatcaccccagaacaccccgcagaaagtgcctgtgcatcagcattccccgtcggagccctttctagagaaaccagtgccggatatgactcaggttagtggaccgaatgctcagctagtgaagagtgatgattacctgccatcaatagaacagcagccacaacaaaagaagaagaaaaagaaaaacaaccacattgtagcagaggatcccagtaaaggttttggtaaagatgacttccctggtggggtagataaccaagaactaaataggaactcactggatgggtcccaagaagaaa

SEQ ID NO: 321818 - DNA, 393 bp, Homo sapiens
tattaactcatacagttacttgtcttctggtttgttgattgattagaattgcaataaaagaaaagcttgcatcatttatgtatattttggaaggtatgagacccacaagcacaatgatcatttttatttgtttgtttgtttgaaacttcagcagaatagatatctgcatgctttatgaagttgttgcttcggtaagagcccatgggatgccagaaattaacatttctttgctgccatgggctgatgatgctgctattagataaagtttagctgtggcaccaagtcacatcattttcatagaaaaagattacttgtagcttattttagaagtatgaccttttggtctgtttgattgattgattagaattgcaataaaagaaaagcttgcattca

SEQ ID NO: 321819 - DNA, 365 bp, Homo sapiens
  misc_feature (33)..(33): n is a, c, g, or t
  misc_feature (39)..(39): n is a, c, g, or t
  misc_feature (44)..(44): n is a, c, g, or t
  misc_feature (54)..(54): n is a, c, g, or t
  misc_feature (325)..(326): n is a, c, g, or t
ggaggtagaggagggccaggggaagggaagggnaggaanaaaancctactcgcnaagcacctcaaggacgttttgttctgaagactctcatattcagctctgggaaataattatttctctgattatcccttcaacttttgaagattaccagatttctcaacagcaatactgtggtctggaataaaagggggcacttccctcagactttggagaagacattattttgaactagaattctgtctacagccatactctcaatgaagtaagatggcagaataaagatgtcatggcctcgttggcctcagcggtggagctctgcggccgnnaattaatattaatattaataatgagcaatggagcacaac

SEQ ID NO: 321820 - DNA, 661 bp, Homo sapiens
aaaaaaactttattgtagatatatgcaacctctaggctcattttgacccctacctcatctttttaatgcccatcatcttaatgttgtatctggtttgcctttgatgcctagaagaagaaaaaaatctttgcatttactaaagaaaacagttactccctgagtaagatcaagtgtttgatctgggaccttataaggaagttctcaaagaatggtgatcttggtattgaagaaagctgattttcatctcattagaaggtaatctttgcagaaaaagtaaagccggtgccttcattcctaacccccagattttcctattttgtaaatcccaagctatggagttcattagagcttttacaactcactagaactcatgagttcagtagctttagacagttaaatgcagctgagaacctgccttgggggcccagaaagaattcctaggcttatgggaatgttttttgttttgtttttctcccttaaaggagcagcaagcaagtaacacacttctttcaaaatcttcagagcctcacctagttacctatttcttaaccattgctttaagttatataaacatattcatcctttttatgtctgtgtctttcaaataaatatgtaagctggcagagtcctttgccttagacaccacgccgagcccccagag
